United States Patent Application Publication US 2004/0123343 A1 - sequence listing, part 13

SEQ ID NO: 34691 - DNA, 5144 bp, Oryza sativa
  Clone ID: PAT_MRT4530_38682C.1
tctaaatcgatacggaacccggcgcgcatccggtcctctcgtcgaggcgagaggaacctatacattcgccacactcccctgcttcgcttgcttgccctcctcttgcgtagggaaaaggaagaacacaagagcaagcgagagcccagaaatcctatcctcgactggaggcttttgcgtattgcatagcggcagatttttttactgacttgggagttgtgtgatagtgtgggttgcgttctttttttagtgtgtaaacgatgtcgtctttagtgtcgacgccgttcacgacggcaaccggggtgcagaagaagctgggggcgcccgtgccgctccactcgttcttgctgagccggcggcagccagcggcgggcgcggggaggggacgcgcggcggcggcggcgatacggtgcgcggtggccgggaacgggctgttcacgcagaccaagccggaggtgcggcgcgtggtgccgcccgagggcgacgcgtcgcggcgcggggtgccgcgggtgaaggtggtgtacgtcgtgctggaggcgcagtaccagtcgtcggtgacggcggcggtgcgggagctcaacgccgacccgcgccgcgcggcggggttcgaggtggtgggctacctcgtggaggagctccgggacgaggagacgtacaagaccttctgcgccgacctcgccgacgccaatgtgttcatcggctcgctcatcttcgtggaggagctcgcgctcaaggtgaaggatgccgtcgagaaggagcgcgaccggatggacgccgtgctcgtcttcccgtcgatgccggaggtcatgcgcctcaacaagctcggctccttcagcatgtcccagctcggccagtccaagagcccattcttccagctcttcaagcgcaagaagaactccggtggcttcgccgatagcatgctcaagctggtgcgcacgctgcccaaggtgctcaagtacttgccctccgacaaggcgcaggacgcccggctgtacatcctcagcctccagttctggctcggaggctcgccggacaacctccagaatttcctcaagatgatcgccgtctcctacgtgccggcgctcaagggcgccgacatcaagtacgacgaccccgtcctcttcctcgacgctggtatctggcacccgctggcgcccaccatgtacgacgacgtcaaggagtacctcaactggtacggcacccgccgcgacaccaacgacaagctcaaggaccccaacgcgccggtgatcggcctcgttttgcagaggagccacattgtcaccggagacgacggtcactacgtcgccgtgatcatggagctggaggccaagggtgccaaggtcataccgatcttcgccggcgggctggacttctcgggacccacgcagcggtacctcgtcgacccgatcaccggaaagccgttcgtgaacgcggtggtgtcgctcaccgggttcgcgctcgtcggagggccagcgaggcaggaccatcccaaggcgatcgccgcgctgcagaagctcgacgtgccgtacatcgtggcactgccgctcgtgttccagacgacagaggagtggctgaacagcacattgggcctgcacccgattcaggtggcgctgcaggttgcgctcccggagcttgacggtggcatggagcccattgtgttcgccggccgtgaccccagaacaggcaaggacatttccagattccttttggtctcactcacctacttcgcagggaagtcacatgcgttgcacaagagggtggagcagctctgcactagagcaatcagatgggcagagctgaagaggaaaactaaggaggagaagaaactggcaatcactgttttcagcttcccaccagacaaaggcaatgttggcacagcagcatacctgaatgttttcaactccatctactccgtcctccaagatctgaagaaggatggctacaatgttgagggtcttccagacacagctgaggccctcatcgaggaggttattcatgataaggaggcccaattcaatagccccaacctcaatgttgcttaccgcatgaacgtgcgggagtaccagtcactcacttcctatgcctccttgctggaggagaactggggcaagccacctgggaaccttaattctgatggtgaaaacctccttgtctatgggaaacagtacggcaatgtattcattggagttcagcccacttttggctatgaaggagatccgatgcggcttctgttctcaaaatctgctagccctcaccatggctttgcagcatactacacctttgttgagaagatcttccaggctgatgctgttcttcactttggtacccatgggtctcttgagttcatgccagggaagcaggttgggatgagtgatgcatgctatcctgacagtctcattggcaacatccccaatatctactactatgcagcaaacaatccatcagaagcaactgttgccaagcgcagaagctatgcaaacaccataagctacctgacaccaccagctgaaaatgctggtctctacaaggggctcaagcagctttcagagctcatctcttcttaccaatctctcaaggacacaggacgtggtccgcagattgtgagctcaatcattagcactgcaaaacagtgtaatcttgacaaggatgttcccttgcctgaggaaggtgtggagcttccaccaaatgagcgtgaccttattgttggaaaggtgtatgccaagatcatggaaatagaatcacgcctcctaccatgcggtctgcatgtgataggtgagccaccaagtgccatcgaggctgtggccaccttggtgaacatagcttcccttgatcgcccagaggatgaaatatactcactgcctaacatacttgctcagacagtgggcaggaacattgaagatgtgtacagaggaagtgacaagggaatactggcggatgttgaactgttgaggcagataacagaagcttcacgtggtgccatcactacctttgttgagaggactacaaacaacaaagggcaagttgttgatgttacaaacaaacttagtaccatgcttggttttggtttatcagaaccatgggtacaacacttgtccaagaccaagttcatcagagcagacagagagaaattgagaaccttgtttactttcttgggagaatgcttgaagctaattgtggcagataatgagctgggaagcttgaaacttgccctcgagggaagctatgttgaacctggccctggtggtgatccaatccgtaacccgaaggttctcccgacagggaagaacatccatgctcttgaccctcaggcaatcccaactacagctgccttgaagagcgccaaaattattgtagaccgtctgctggagcggcaaaaggttgacaatggtggcaagtatcctgagacaattgcacttgtcttgtggggcaccgataacatcaagacctatggtgagtcattggcccaggtgctgtggatgattggtgtgcgcccggttgctgacacctttggccgtgtcaaccgtgtggaacctgtcagccttgaggagcttggacgtcccaggattgacgttgttatcaactgctcgggtgtcttcagagatcttttcatcaaccagatgaatctactggaccgggcagtgaagatggttgccgaactggatgagccagaagagatgaactacgtgcgtaagcatgcacaagagcaggcacgggaacttggcgtttcattaagagaggcggcaacaagggtgttctcaaatgcatcaggctcttactcatcgaatgtgaacttggcagtggagaatgcatcatggactgatgagaagcagctccaggacatgtacctgagtcgcaagtcttttgcatttgattgtgatgctccaggggcaggcatgcgagagcaacgcaagacatttgagcttgctctagcaacagcagatgccacattccagaacctagactcatcagagatttcactaacagatgtgagccactactttgactcagacccgacaaagctggtgcaaggactgcgcaaggatgggcgggcaccttcctcatacatagcagatacaaccacagcaaatgcacaggtgaggacattgtcagagacagtgcgccttgatgcaaggacaaagctactgaaccctaagtggtacgaggggatgatgaaaagtggctacgagggagttagagagattgagaagcggctgacaaatactgttggatggagtgcaacatctggacaggttgacaactgggtttatgaggaggcaaatgccacatttattgaagatgaggctatgaggaagaggctcatggacaccaaccccaattcattcaggaagctagttcagaccttcctagaagccagtggcagaggctactgggagacatcagaggaaaacttggaaaagctcagggagctctactctgaggttgaagacaagattgaaggaattgaccggtaaatttatttgatctatcagatcctgcattcaaccaaggaggagaaatccttctgtctcactgaatctagagttgagacttgtacactttgtataatttataaaaagttgtaacatgacatacacgaggataccgtgttttaacaaagagggtggctgtgaatgaaaaaaaaaaatggataaaaaaaaaagaaagaaaaaaaaaaaaaaaaaaaaaacttaaacgatttcgccggccccttcgtgctcctcttcctcgccgactcgtcgccagcgccgtccccgcctccacctcctcccactgttaggtactacttccgcgcaacactcccgtttctccattaggtgttcggcgcgacgagtcggcaacggagacggccatccgggcggccgtcggcgacaatgctgggaccagcaaggccctgcgcttgttgctgaagcatggggggtgcttgaggcgtaatggcactggtggccgcagtgatccgtatgtttacatggtatgtgaaacttatgctaactgtttgaattgagacgggaataccaaattcgatgcatgttctgtgttgttgaatgatggtggctcattgtattgtatcttaagagatattcagaatggagtagtattacccttttatagtgtgaatttttggaaaaaaaaaaaaaacctgcagcccg

SEQ ID NO: 34692 - DNA, 264 bp, Oryza sativa
  Clone ID: PAT_MRT4530_38683C.1
atggccggcaccctggtccactgcatatgtttccgtcgcttgcgtccgccatcatccaccgcagcagtcatcgtcgcgtgcatccgcctcgtccgttgtagctatcgtggccgctgtcatcgcctgagttcgccgtcgtcgcagtttgcgtccgccttgtccgccatggccgtcgctgttaccgtctcctgcgcccgccatcgcagagactccacggctctccagtctccaccaaggatgcgccttgctaggtcccacccctag

SEQ ID NO: 34693 - DNA, 177 bp, Oryza sativa
  Clone ID: PAT_MRT4530_38684C.1
atggcccgtggtaccaaatctaaagcccgtcgctaccagatcagatatcccataggtaccagtgataccctgtcagtaccaaagtttgatacccatttgtaccagtcgatacccatcggtactagagaaaagaataatgagcttgagaggaagaagaagcttgatggaggatgttga

SEQ ID NO: 34694 - DNA, 203 bp, Oryza sativa
  Clone ID: PAT_MRT4530_38685C.1
atggcaacggagaattccccgtcggtgattgccctcgcgtcccggcccccgtggggttcaaatttcaccgtcacggtccccgtcaatcacaacggggacacaacttttaccatccccgtccccgcaaaaaacaaagaacatttgcttctaaaatcatatgctctccttgcttccttgccgttggacctcacgaggaatccatg

SEQ ID NO: 34695 - DNA, 1803 bp, Oryza sativa
  Clone ID: PAT_MRT4530_38686C.1
atggtgttcggcgcgggcgccggcggcggcgggagaccgtggccgcggctggggaagatgccggcggcggcgctgttcgcgaagcaggtggtgacggggcggtggttcatgatgctcgcgtgcatggtgatcatgtcggcgtcgggcggcaccaacatcttcagcatctactccggcgcgctcaagtcgtcgctgggctacgaccaacggacgctcaacacgctctccttcttcaaggagctcggcgccaacgccggcatcgtctccggcctcgtcgccgaggtggcgccgccgtcggccgtgctcgccgtgggcgcctgcatgagcctcgcgggctacctcgtcgtctacctcgccgtcgccggccgcgtcgcgcgcccgccgctctggctcatgtgcgcctgcatctccgccggcgccgactcgcaggccttcgccaacaccggcgcgctcgtcacctgcgtcaagagcttcccggagagccgcggcgtcgtcgtcggcctcctcaaggggttcgccgggctcagcggcgccgtcctcccgcagctctacctcgccatctacggcggcggccacgacgccgggtcgctgatactgctcatcgcctggctccccgccgccatctccctcgtgttcctccgcgtcgtccgcgtcatgccgcaccggccgacgaacggccgcgtcggcggcggaggcagcaatggccccatcttctccttcctctacatctccttcgccgtcgcctcctacctcctcgtcatgatcgtgctccagaaaaccatcagcttctcgcacgccgcctacgccgcgacggccatcgtgctcctcctcatcctcctcctcctccccctcgcggtcgtcatcagacaggagctcagaagccggagggaggccgatgtccaagaaactctccccgcggcggcgccgccgcctcagcccgtcgtcgagacaccaccaccaccaccggcgacgacatgcggcgtcggctcgtgcctgaagcgaacgttcaacccgccggcgcacggggaggactacacgatcccgcaggcggcgttgagcgtggacatggttgtgctgttcgtgtgcgtcatctgcggcgccggcggctcgctgacggcgatcgacaacatggggcagatcagccagtcgctgggttacccggcgaggagcgtgaacaccttcgcctcgctcatcaacatctggatgtacgccggccgcgccggcgtcggctcgctctcggagctcctcctgtcgcgctacaggtttccgcggccgctgatgctcacgctggtgctcgtcgtctccagcgccggctacctcctcatcgcgctcggcgtgccgcacggcctgtacgcggcgtccgtcgtcgtcggcttcagcttcggcgggctgtacacgctgctcttctccatcgtctccgaggtgttcgggctcaagtactacgccacgctctacaacctgggcatggtggcgagccccatcggcgcgtacatattcaacgtgcgcgtcgccggcgcgctgtacgacgccgaggcggcgaggcagaacggcggcggcggcgccgccggacacagggcgtgcgccggcgtgcggtgcttcagggcgtcgttcctgatcgtgacggcggcgacgttcttcgccgtgatcgtgtcgctggtgctggtgtggaggacgagggggttctacaggggggacatctacgcgaggttcaaggcggcggcgccggcgccggcggtggaagggcaccgcggcgaggtgacgccggaggaggcgtcggggacgaagctacatggttcgacttaa

SEQ ID NO: 34696 - DNA, 303 bp, Oryza sativa
  Clone ID: PAT_MRT4530_38687C.1
tccttcttagttagattgaatctctcctgactggtttgaatccaagtcagagaacgagagcttgttgatgttgtcggcgacgaggaagcgacaatcccgaagtgaagacgaagccggtgactcatggagttgattccatcgcacttttcgacgggtaattcgacgcaacccctacctagcgcgccaactgtcgaaacatgaattcggcaataataaaagggggtagcgtacgagacctaaaagtggatggatgcggaggcaaaggatttagacaggttcaggccctctcaataagaggtaata

SEQ ID NO: 34697 - DNA, 261 bp, Oryza sativa
  Clone ID: PAT_MRT4530_38688C.1
atgttgggaaacggaggcataagaaggctagacccaaattcatcctccgttcttgttctatttttgcgccttccaatgaacaccaccaccgccgacttggattcaccagcacaagccgacgagggtattctctctgcactggacatggccacaatcgctacattggcgcactacagcactagcagcgtgccggatggaataggcgacggagcaggccaccacgaactagcaatcggccgccgcacgagctcttcaccatag

SEQ ID NO: 34698 - DNA, 429 bp, Oryza sativa
  Clone ID: PAT_MRT4530_38689C.1
attcccccctattttttttttttttttttggggggtttttttttttttttttaaaagggggcaaaaattttttttcccggactggggtaaagggttttttcgggcccaacaaagcccaggattttcaaaggggtttgtccctcacccaaacccacatgaagggacggctcacctttaaaaatcaccccaggttccggttttgcaggacttgggctccccggacaaaacattcagtgaaagagggggctttttctcccccggggcgggaaaggactttttggcagggcacactctggggggggggcccccaaggccccggggcccggatgtaacagccagggaaaaaccctctttgagcccacaaggggccctccctcctttggagcccaaaatggggggcccggacaaaaaagccccccccccccccgt

SEQ ID NO: 34699 - DNA, 476 bp, Oryza sativa
  Clone ID: PAT_MRT4530_3868C.1
tgatggtgctccttcgcccaggacaattacttgactcattccaccacattatgctgtcttgaagaaagcagagcgtgtaaggatgccaatatatcgcgaatcaagacacaacgcgttaacgccttcgtctagccgaccttgcagggcaaacaactctagtattccgtgccctgtccagcttgatgtagtggcctaatgcgtatcgcatctcaagggagcaagcccgaagcctctaagaactaacatggcggagatagtagcacggtgccttcactcctagatttcaacaacaatactacccaggattatcgaatgagtccgaatagcgtagacttcagagtaatgtgagattgagtaactagtatcggcgtagagtaaaataaaacaccacaagtatgacacttggtggtgattctattcgatatcagtagtaaataaaggctacaaatttcttaaaaaaaaaaaaaaaaaaaaaa

SEQ ID NO: 34700 - DNA, 268 bp, Oryza sativa
  Clone ID: PAT_MRT4530_38690C.1
atggcagtttcagccggccggatggaggtagggggagaagctgacgagtgggccctgcggtcctacttgtcggccggagtgagagagaggaggctgaggaggaccggcaccggcctcgggggcccgagcactccgcaaaaccgacgccctgaggaagccgcccagcgggacttgccagaccggggctacaacgacaaggggtcggggacggccgagtgtaggcccttccgagcccccagggttcggcgcaacccggggcgcggcccgc

SEQ ID NO: 34701 - DNA, 298 bp, Oryza sativa
  unsure (1)..(298): unsure at all n locations
  Clone ID: PAT_MRT4530_38691C.1
ggttctttntttatttctttttttctctttctttctctcnacgcngggacacgccgacgcacgccctactctngatttctcctctctaaccactgggacatnttacccctgggcaacccacccnacacatacaccacacatggnttcgacctgatnttaccnaccaccnaccacgattaccgcgtanaccnacgtgacgggacaaagccttcaacccttacacgttgaccgcctcgtacgtagacctcctacacaaaactgaacgactcactttttcggtaattttggcctcctcccc

SEQ ID NO: 34702 - DNA, 1362 bp, Oryza sativa
  Clone ID: PAT_MRT4530_38692C.1
atggtgggggtggagcggatgcggcgccgggtggtagcgatagaggggattgcgtcgttgggtggcggagaggaacccggcgtcagtggaagggtggagggctccaactcctccacaactggccaatgcaacgccgccatcgggggccgcctcgactccggattccccgcggcggccgtatccaccttcgccgcgatgctccgcgccggcgcacgcccggacggctacacgctcccgctcctcaaccgcgccgcagcctccctccccgccagccgcggcgaggccgagctcgtcggcgccgcccacgccgtcggcgtcagggcggagttcgccgccaacgtctacttctgcaacacgctggtggatgcctacgcgcggcgcggggatggtcgcgtgcgccaggaagctgttcgacgaaatgcccacgcgcgacgtggtttcttggacgtcgctggtctcttcgcatgccggatggcagcctcggacgacgcggtggcgctgttccagcagtctccgagaagagatgcaatttcttggaacattatgatctcagagtattcttcggaagggaacatttccaaagttgccgaaatgtatcaaaggatgagaagagaggaggccgacttgcagggtgttcagaccagaacagttgaagcatgggtggatgctgttaggaaggttgccttggatgttgaagacgtaattgatgattttgacaatgatccaggccttaatcatttgaaacatgtgctcaaccttagctaccgttatctaccagaatatctcaaagattgctttctgttctgcagcatattcctagagaacagtatgatcaagcggaagcacctgataagactttggattgcagaaggctttgtggaggacagggcaggaactacgatggaagagctagcgcatgattacttatcagaactcattcgtcgaggaatgttgcaggtcatgaagaggaacgagaatggcaggatgacaaatcttgcattcctctggctccaacgggcattcgatggcccgcagttgaggtttgttctgggatggttcccaagattgagaaggctgcatctgaaagacatggaccatcttcattctttggagattgaagaaggttcagtggtcagtttggaggtgctggagatgactggtcttaatgagttgaatgatattcccggaggtattttctttctgaacaatcttcaagaggtgtacctcgattcaatgcacaaggacttcattaaccaccagagcgagggtgaaaatgttgaagatttcccaagattcatctacggccacagccccaacttttggagaggggaagatgtggcatattgtcaccaatacacatag

SEQ ID NO: 34703 - DNA, 2799 bp, Oryza sativa
  Clone ID: PAT_MRT4530_38693C.1
atggctgagtccgtgctccttatcgcactcggcaaaatcacggctgcactgggtgcagatgttctgcagcaaattcggaacctcttgccaacagaagtgtcgctatttgggcagctcactgggcgcatgaaccggatcaaaaaagagttgtttgtgattcatgcattcctgtcacaggccgacttgcagggtgttcagaccagaacagttgaagcatgggtggatgctgttaggaaggttgccttggatgttgaagacgtaattgatgagtacgttcatctattaggccagcaaaagtgtggatggttcacttcagtcaaaggaaaatttggaagatctcaacacctttgtttgtggcttcaaattgttgaacggctgaaggagattgagagagacctttggcacatctcggagatgaaagacagatggattcataccagtactgagctattgggcagaggcaatttggatggtgactatcattgtgcccttccatattcacctcagtgtggttacttcattaattcagatgatatgattgggtttggtaactacaaaatgttgttgatcaattggttagcacaaaaagattcgagtacttcggtaatggttattttgggaatggggggaataggcaagaccacacttgcttcaaatgtttatgagactgaaaagagtaggtatgattgtagtgcctggatagctacatcccaggtatataacatttgctctttgttgagaacgacaatcagacattgtttcaagaacacaaaagaaatcccacctaatgttgacataatggatcaacacagcctcattgttgaacttcgagaattcttaaaaggacgaagctgcttggttgttattgatgatgtctgggatcatgtatgtattggtactattctcaaggcgttttctcacaatgagcacagaaacaaaattatcataaccactagggaaattcagatagcaaagtttgtggatcaaagctatatgattcaaatggaaaaattagaggagagtgaagcatgggaccttttctgcagaaaggctttcctaaatgagaaagaaaagtcatgtcctgaagagttagtcggtattgcaaaggatattatgaagtggtgttgtggtctacaattagccctagttactatgggtggactcctgtccctgagagaaaaaaacaatagcgaatggaaacgtgtctacaacaacttgctttgcagttttgacaatgatccaggccttaatcatttgaaacatgtgctcaaccttagctaccgttatctaccagaatatctcaaagattgctttctgttctgcagcatattcctagagaacagtatgatcaagcggaagcacctgataagactttggattgcagaaggctttgtggaggacagggcaggaactacgatggaagagctagcgcatgattacttatcagaactcattcgtcgaggaatgttgcaggtcatgaagaggaacgagaatggcagggtgaagcactgtcggatgcattgcatcgtacgagaggtcacaatctcgctatgcaaatcgaggggtttccacatgatatggggcaacaaagaatcaacatctgcatatgaggcacgtcgttttgctatacatggaattaatcagtccagttccgaaatcctaactgatctaccacatgtacgcacattcctttcgtttgatgtcacaatgtctgacaccttgctgtcaagaatagtatgcagctctagatatttgacagtgttagatgtatcaggggcattatttatcaaggaagttccgaaacaagttgtatctctcttcaacctgcgttacttaggcttacgtaggactaaggtgaagaagcttcctagttctttgggaaggcttgcaaatctacaaacactggatcttcatcacagttgcataagtagactgcccagtggaataaccaaactagaaaagcttcgacatttgtttgtcgagacagtgaaggactccagttttcaaagtctgaatgcttgtagcggtgttggtgctcctagcggtatatgcaagcttaagtctttgcagacattgttcacaatagaggcaagcaagtgttttgtgcaacaggcaaacaaactggttcagctaaaaagcttccggatcacaaaagttagaggatctcattgctcagtgctgtctgagtcaatcaaaagaatgaagcagttggtgtacttagatatcttagctagtgacgaggaggaaatacttgacctggacatcagtccaccgccaagcacccttgagaagctttgcctgaggggaaaactgaatgattctaatctgcactctttcttcaattccttttgcaacaatctcacatgtctttttcttggttggagtagtctaagcagagaccccctcccattgttgtcccagatgacaaatcttgcattcctctggctccaacgggcattcgatggcccgcagttgaggtttgttctgggatggttcccaagattgagaaggctgcatctgaaagacatggaccatcttcattctttggagattgaagaaggttcagtggtcagtttggaggtgctggagatgactggtcttaatgagttgaatgatattcccggaggtattttctttctgaacaatcttcaagaggtgtacctcgattcaatgcacaaggacttcattaaccaccagagcgagggtgaaaatgttgaagatttcccaagattcatctacggccacagccccaacttttggagaggggaagatgtggcatattgtcaccaatacacatag

SEQ ID NO: 34704 - DNA, 670 bp, Oryza sativa
  Clone ID: PAT_MRT4530_38694C.1
tggatccccgggctgaacatatgatgagatgtctagctcaagcaattaatggtacatgtacatagtataaagctttataaagctagcagctagctggctcatcaaatgccaaattaatcaattcgtaaatgatcaatccacccctaatctacaccccattgattgtagtataatcaatcatcatgctactagacacaatcaggataccccgtacttagtagtagtaattgtatttacatcagatcaagacatgaagaaacctagctagctaggattaattaacaaggagtcctagctaatccctggaggtctggatggatgataaataatctgatcatccgaacccatcccgagaagaagccttcgatcggaaggaggaagagaaggatgcatcaacaaactgccactaattaacccaagcatgaaacaccaagttaattaatcaaatcaagtaattaatcaaccagcctgaagcaaaatcctgtagcgcaaggtcggtagggagctagctccggatcattcaggcgtggattagttccagaagtcgtcgaggcccagaatcccgtcgtcgaactccgggaacggctgggacgtcggcgccgacgagatctccgcgcagccggcggcgttggggtcggtgctgagcccggtgtcgcgcgaggcgctgagc

SEQ ID NO: 34705 - DNA, 467 bp, Oryza sativa
  unsure (1)..(467): unsure at all n locations
  Clone ID: PAT_MRT4530_38695C.1
tggacacgtcttttttcgttctnttatcgtagctctactgttcaaaattcacacattgcactactatctgtnattctctattgactgacttcaaatctcttcgacatacactcttgatacaactctccatcctaatgctaaaaggcaacatctcctccgatagcccatctgtacccatacacattaatcctcaggcatacgccatgctgtgctcgtaccttacctcnctaacgtataatgacttaatgtaacccctttttataccctgttcagatcaacgatcatgatgataacgtcactgcacctaaaannctttttagctgaacctaaatccatgccgcaacaacaaatacgatgctcccgagtcgatactctaataatactatgcaccacacganatatcatatgatcatacatanccactatacacacanacatagagcnttacatataaaaaccatcaggag

SEQ ID NO: 34706 - DNA, 671 bp, Oryza sativa
  Clone ID: PAT_MRT4530_38696C.1
atggtgggggtgggggattggggtggagcgagctagggatgggactgggagggcattgggattgggggatttggggaggtttgggagaggcggagagggagaggagaggaggagaagcggagacgtgggcgaaggcgcgaggtcgaggggacttttcccctccgaccgacacccttctccccacccattggcgaatgccctggaggtttgggggagatgaaaaaactccagcctcatgggcctgtgcatatgacccataggcaggcgacaccgcgtgcacgacctccgcctccccaatccgtcccgtctcctcgccctccgccctcgactcccgtctcctcgcctgccgctggcgccgatctccatcctgctagcagaggtggcgccggcgtccttctgctcccgccgcattcgctcaccgccacctcttcatcagcgagaggcagcaccggcagctgcagctgcagctgcacctccgtctgaacgccacgcgagtcagcgccgaggtggaggtggcggccgctcgtgctgccagtgccagggctccagcttccggtggtgcggcgcgacgaggagcaccccggcgccgccaccgctgcgacggcgcggctgccggagcacgccctccagctgccggagagcctgtccagcgaggagcgcagccacccacg

SEQ ID NO: 34707 - DNA, 147 bp, Oryza sativa
  Clone ID: PAT_MRT4530_38697C.1
atggcggagaagtcgatgatattgtcgaggaggctggggacccttattgccgctgcagctgagggacgagatggagaaggccagaggatcactgcttgccagtgtccgcgggacaggaggttcaagcagctaggagtttttcagtga

SEQ ID NO: 34708 - DNA, 252 bp, Oryza sativa
  Clone ID: PAT_MRT4530_38698C.1
atggcccctaccacgacctccacgattaggaataggggattctgcaaccgagttgttccctacctcttcatcctgattattttcaacttcttcattatggagctcaccaagaacgagccgagcaggaggaatcaagtggccctgatggacgacgacggccgaagcagcggcggcggcgcagaggcgacgtgggcaaccagaacgaccgcggcgacggcaagggcgcaggacggcatgagcggcggcggctag

SEQ ID NO: 34709 - DNA, 354 bp, Oryza sativa
  Clone ID: PAT_MRT4530_38699C.1
atctggagctaccttaaggccaccgtcatgggatacccacctccgttgggcacatcgtctctcgactccaatagcacaggctatacaaccacgcatcatcctaccgactgtacgcggtgcctaacgactggaactaggtcaaagacaccgccttcggctacgtcgacgatccgagggtcacaaacctgtaaatcaatctgaaatactgtttggatccccgcgcaatgataggccttacgcgtatggggcctactgctccactgttcgtgcttgactgcattgcatcgatcgatcttttgttgtacatggaagggaggatcttaaaagcattattccagttttacacggactcat

SEQ ID NO: 34710 - DNA, 194 bp, Oryza sativa
  Clone ID: PAT_MRT4530_3869C.1
cgtcgagcccttcctcatccacctcttcgccaagcttgaagatcgccggagccgtcccctcgtcgtcgacatatttgtctccgttgccctcctccgttcgtcgctgttgtggatcaagttcctctggatctcaatcccgctgttgtgccaaactcgtcatcggttgcaggggcggatctacagtataaacgtcg

SEQ ID NO: 34711 - DNA, 175 bp, Oryza sativa
  Clone ID: PAT_MRT4530_386C.1
actgaaaagtgttcgtttgtttacgtagatggggacagaaacataatcacaaggggggggaagcacaaaattactctactgccgcctggccttcctaaacaacggtacaatacgattcggctttgcttgtgcaggggaatagaatgaaaagcccaaacggcaagggtgcactgtc

SEQ ID NO: 34712 - DNA, 514 bp, Oryza sativa
  Clone ID: PAT_MRT4530_38700C.1
ttgctttagctcaacaggtggctcagcgacgaggaggggccgcacctgaaggttgctgccattgttggacctgcagggattggtaagacggcacttgctacagagttgtaccgtgaccgtagatggcaattcgagtgccgagctttcgtccgggcgtcgcgaaagcctgacatgcagcggcttcttgggggtattctctctcaagttcagcgtcgccaacgatcgtctgatgcctacgctgacagcacggtgcagagcctcattgataatctccgggagcatctccaagataggaggtaccttattataattgatggtttgtgggagacggcagtatggaatattgctaacagtgcttttccagatgttaacagtttcagtagaatattaataactgcggatatcgaacaggtagctctggaatgctgcggttacaagtatgattatattatgaggatggaacctcttggcagccttgatttcaaaaagttttcttaataaagttttggctccg

SEQ ID NO: 34713 - DNA, 1450 bp, Oryza sativa
  Clone ID: PAT_MRT4530_38701C.1
cggcgccttcgtgctcaagtccggcatcacctccccgatctacctcgacctccgcatgctcgtcgcccacccgcgcctcctctccaccgtcgcctccctcctcggctccctcccggcgacccgccgtgctcatcgtcgaggacctcgtcaccacgggctcctccgtgctcgagaccgtcgcgccactccgcgaggtcgggctcgtcgtcgccgacgccgtcgtggtcatcgaccgcgagcagggcgggagggagaacctcgccgcgaacggggtcgcgctccactcgctcatgacgctcacggaggtgctcgccgtcctcgtgaagcgcgggaagctgggcgaggagaaggcccaggaggtgaagcgattcctcgacgcaaacaggaagatggctgtgccgggactgccggttaaaccgaaagtagttaggaaggcattttctgagagagctggattggcgacgaatccgatggggaggaagctgttcgagttgatggaggccaagcaaagcaacttgtgtgttgctgcagatgtcgggacagcaacagagctacttgatctcgccgataagattggtccagagatctgcatgttgaaaactcatgtggatatcttgtctgattttacaccggattttggccacaagctccgttcgattgctgagaggcacagctttttgatatttgaagaccgcaagtttgcagacattggaaacacagtaactatgcaatatgaaggaggaatattccgcatattagactgggctgatattgttaatgcacatatagtttctggacctggaattgtagaaggcttgaagctgaagggtctgccaaaaggaagagggttacttttgctttctgaaatgagttcagctggcaaccttgctcatggagattacactgctgcagccgtgaagattgctgagcaacattctgatattgtaattggatttatatcagtaaatcctgcatcttggtcagtgacgccgtcaagtccagcgttcatccatgctactcctggagttcagttggttgctgggggagactcgcttggtcaacagtacaacactccttactctgtcataaacgacagaggcagcgacataattatagtcggtcgtgggattataagggcgaacaatcctgctgagaccgcgagagagtaccgcatccaaggatggcatgcttaccaatccagcttatcatgagaatgctgtaaggtctctcccattctgtaacacgaatgtaagggcattcaggcgattgactgacgcaataaaagagagtatacgcatgctctatcatcgctgtggttcgtaattcacatgccctatattgacacgcactatcccagcaacaatttcgtttatgtgatggtaaataaataaagtttgctccgaacaaaaaaaaaaaaaaaaaaaaaaaaaaaaaaaaaaaaaaaaaaaaa

SEQ ID NO: 34714 - DNA, 273 bp, Oryza sativa
  Clone ID: PAT_MRT4530_38702C.1
ccgatgcctgctgctattcgtgcctgcagtcctacaaaggcgcacatggatggacctagtgagactgattctgatatacataccgaagataaggctgaatccatactgacggtgctcgagggacctatccacccagatcctgagctcgacgtgccaaatgaactgatcactcagggtgagcttgtggactagaaattgctacgcaaaccatcatttgcttctctgagtaaacaggcgcatgacctgaaaatattggccgatacaaactcgtat

SEQ ID NO: 34715 - DNA, 975 bp, Oryza sativa
  Clone ID: PAT_MRT4530_38703C.1
aagtgtatacaatgatagcaatctttctcaagttctgtaccatatcctgctcataactggaaaaagtacgaattaccccctcccctgaactatcgctgtcgtctgaattaccccctgaaccataaaactggacatttttcaccccgaattatacaaaccggacgaattacccccctcgacccaatccgtgatggttttagtctacgtggcgtaagcgtggccgtccacggcggcctcggcacagaggcggcggcggcgagcggcgagcggcggcgggcgcggctggtggcgagcggcggtgcgcgggggcggacgcgaaggcggctggcagcgagcggcggtgcacgggggtggacgggcggcgcaggtgcgcggaggcggacacggaggcggctggcggcgagcggcagtgcgcgggggcggacggtcggtgggcggcggtggcggaggtggggatgatggagacggcggcgcccccgcctctctcttcccctctctctctctctctctctctctctcacgggcggcggcgcgagcggcagcggcgggcgcggctggtagagggtgacggcggatggccggacggcgcgcggggacgggtggacggcgcctcccaatccacctctatcgtcgccgccccttctcctcctcgccggagaagctcgccttggatccctcctcctcctcctcctcgtcatcgtcggtgctcggcccccgcgcaccgccgcctccgcgtccgcccccgtgcacccgcgccgcccttccgcccccgcgcaccgccgctcgccaccagccgcgcccgccgccgctaatgctgattggactgccacgcgtacgccacgtagaccaaaaccaccacggattaggtcgaggggggtaattcatccggtttgtatagttcgggtgaaaaatatccggttttgtggttcaggggggtaattgagacaaccacgatagttcggggggaggtaattc

SEQ ID NO: 34716 - DNA, 1500 bp, Oryza sativa
  Clone ID: PAT_MRT4530_38704C.1
cagcttctctcgtctcggctcaaggctctagccatggacgccgccgcaatggaatccctcatcctggagctccacgccatcgaggccgtcaagttcggcgccttcgtgctcaagtccggcatcacctccccgatctacctcgacctccgcatgctcgtcgcccacccgcgcctcctctccaccgtcgcctccctcctcggctccctcccggcgacccgcccctacgacctcctctgcggcgtcccctacaccgcgctccccatcgcctccgtcctctccgccgccgcctccgtccccatgctcctccgccgctaccacgtcacgccgcacgccgccgccgaatgcctcgacgggtccttccgcgccggggacgccgtgctcatcgtcgaggacctcgtcaccacgggctcctccgtgctcgagaccgtcgcgccactccgcgaggtcgggctcgtcgtcgccgacgccgtcgtggtcatcgaccgcgagcagggcgggagggagaacctcgccgcgaacggggtcgcgctccactcgctcatgacgctcacggaggtgctcgccgtcctcgtgaagcgcgggaagctgggcgaggagaaggcccaggaggtgaagcgattcctcgacgcaaacaggaagatggctgtgccgggactgccggttaaaccgaaagtagttaggaaggcattttctgagagagctggattggcgacgaatccgatggggaggaagctgttcgagttgatggaggccaagcaaagcaacttgtgtgttgctgcagatgtcgggacagcaacagagctacttgatctcgccgataaggatgatattcttctacttcagtattattccctgagtaagattggtccagagatctgcatgttgaaaactcatgtggatatcttgtctgattttacaccggattttggccacaagctccgttcgattgctgagaggcacagctttttgatatttgaagaccgcaagtttgcagacattggaaacacagtaactatgcaatatgaaggaggaatattccgcatattagactgggctgatattgttaatgcacatatagtttctggacctggaattgtagaaggcttgaagctgaagggtctgccaaaaggaagagggttacttttgctttctgaaatgagttcagctggcaaccttgctcatggagattacactgctgcagccgtgaagattgctgagcaacattctgatattgtaattggatttatatcagtaaatcctgcatcttggtcagtgacgccgtcaagtccagcgttcatccatgctactcctggagttcagttggttgctgggggagactcgcttggtcaacagtacaacactccttactctgtcataaacgacagaggcagcgacataattatagtcggtcgtgggattataagggcgaacaatcctgctgagaccgcgagagagtaccgcatccaaggatggcatgcttaccaatccagcttatcatga

SEQ ID NO: 34717 - DNA, 139 bp, Oryza sativa
  Clone ID: PAT_MRT4530_38705C.1
cacaacaacacctcaagattgaatcatccgtaagggctggctgatacaatatcaacatgggggggtccattggccggttccatataaacttacataaaagcaccgaacccccttttggcctttatgccgatcctagcct

SEQ ID NO: 34718 - DNA, 704 bp, Oryza sativa
  Clone ID: PAT_MRT4530_38706C.1
atgaaacacgtttatatttttagtgccgggcctgcgatgatgcctaaagctgttttagcacaagcacaacaagaattattaaattggcaacagcaaggtacttccgtaatggaagtcagtcatcgaagtaatgcttttatggcgcttgccactcaaactgaacaagatcttcgacaattatatgctatacccgataattataaagttttgtttttacaaggtggtgctcacggacaatttgctgcaattccgatgaatttaattggcaagaaaggcaaagcgctttatttaattagtgggcattggtcaaaccgttctgcgcaagaagctcgtaatttttgtgaggtcgatcagcttaatatattaactcaagatgaagcgggtgttttttcggttaatcagacagattttagcgatattgctgagcaatatgattatgttcattattgtccaaatgaaacaatcagtggcgttgaaattccggatattccgattgtcggtaaagcggtattagtggctgatatgtcttctaatattctttcacgtaatattgatattagcaaatttggcttaatttatgcgggagctcaaaaaaatttaggtcctgcgggcatcactattgtgattattcggcaagatttaatcggtaatgcacagcgtgcaaccccgtctatttggaattatgccacgcaagtgaatgccga

SEQ ID NO: 34719 - DNA, 468 bp, Oryza sativa
  Clone ID: PAT_MRT4530_38707C.1
atccatcaatggatacaccaattcagctgatgcatcctctctgtgtcacaacaccaactcgagcattatgtttgccccactactactacatttggcacacgatagacaggtacctcaatggcctcaagtgcctatcacacacgaccaaagcctaggaatgacacagctccccatttaactgaccaggggacaaagttgggggcgtacacccaggcgaaccacctcaacaatgacctaaaagacaatggtgacgctcatcatggggcccaaggcggagactaagaactgctaccatatgccggacaatgacaacatggctaggcatgaggacgacttcttcgtcatcatgactcacggatcggactctgatgacctgaaatgcacggccttgaaagcgcacggtcggagcttagctgtgcatgtacctatgaactccactggcctgaaaggtcagatcggttgatggag

SEQ ID NO: 34720 - DNA, 1496 bp, Oryza sativa
  Clone ID: PAT_MRT4530_38708C.1
ggccgccccttttttttttttttttttctaatagaaggctaggattatattgctaaaaacatcacgaattattgcaatccatatagatcaaaataactttctggatagatcaaagttcgaaaaagaaaacaagttagggcatgcatccaccaggcccgccataaaagcactcagcctgcgcaacaggagtaatagagtagcattactcattgcccatataagtaggcaagtctgcgttgatagggttggtgtttccatcctgattgatcacaccaagattagtcagtgatgcagcacggctcttattagtatgtgggtgagacccgcttcccattggtggagtaggcagtgctcgtcgagtaaccacatagccaccaaacgcgatagcattcgccttctctgccatattagtgaacagagattttgggtaagagcccacccccgtgggaacaccgttgaagccatagtacacccaccaatctccacttgtccctgtccaacagcacttcaactgtaatactctgtaggcttttgtcatctgaaactgggtcaatagaagcacctggtgcaaccgcagcaccgtttgctcgttcaaaaccgtccaggaagtataaaagtgaggacgagagtcgccatagcgttcaggatcaatatgccaaccagcgccaactgcattatagcttgatagtttgccatcgtcaccgaaatgactgacccaaagtgcacctccactcagctgaccgggttttagttcatgaccatacacatccatcgtcgcacgtagcccgtagtaattctcattaggaccagtagattgatgcgtggcaaaatatgacaccttcgctgaattaatgtcgtgtacaacttttcttgtcagaatggagtttgacatcatgaatgtcttatacagcatcatcttctgattgggtgcagcatgtagcagatattgccctaatgaattattttcctcttgaagagaaggatacaatcggacagctcttgcatccaaattataatatttgactgtcaataccagagctgtcggtatactttgctctaggttcggagaaacttcttctattaagtaagcatttgggatcttttctaaacaatttctatccgcgccgccttcgatgtcgcaggtcgcgtccgcgacgccatcgccacgggccgcaaccgcgccgccgtcacaggccgcgtccgtgtcgccgccaccgtgggccgccgtcgcaagccacgtccgcgtcgtcgccgccacgggccgcgaccgcgccgccgtaacaggccgcgtccgcgtcaccgccgctaggggccgcaaccgcgccgtcgtcacaggccgcgtccatgtcgttgccaccgcgggccgcaaccgcgccgccgtcgcaagccacgtccgcatcaccgccgccgcgggccgcaaccgcgctgccatcgctggccgcgtccgcgtcgccgccgccgtgggccgcaaccggtgccggttcacttcactgtag

SEQ ID NO: 34721 - DNA, 555 bp, Oryza sativa
  Clone ID: PAT_MRT4530_38709C.1
atggtcgccaccgtgttcgccatcttcatcacgctcgccgttgccctcatctcccgccgcggcagacggcggcggtggagtgggggcggcggcgaggggaagaggagctcgccgcctcctcatcccccaccgccgccgcagcctccgcgtcacccgccgccgccgccgacccgtgagagagagagaggaagatatcacaagcaacctagaggctcggtcctctgtgggtattactcatgtgaattcctcagggttaatgggagatacagggttaacgcagaggatcttcctagaatagaacatcgaataagcattgacgatacaactattacaaatgtgcagcgcgatctctgttacttcatccaccacgcactggtcctatcttcgcaggcggacgcctttagctctagtccgcctgggaaaataatcttcccaggcggacctcccgaccgtgttgatcttcgcaggtgttggggtccaggtggagcgggcatctgcctgggaaggccattttcccccgcctgggaaaatggtttttctagtagtgatagttaa

SEQ ID NO: 34722 - DNA, 600 bp, Oryza sativa
  Clone ID: PAT_MRT4530_3870C.1
caatggatggtgatgcaacccgtgtgtgtgtccgtaatatgtttgagtgacgtgaccatattacgccaatcagcttgaacccataggccaaaagggagtttcctattagccggcaacaacaatcgggctcaacaacaacaagtatatggtagctcaattgagcaacactctgggccaaacatattcagcggatttggtgttgagatgctaagtgaggctttaggcatcaacgcagtagcagcacaagaggctacagagcccaaatgatcacaagaggtagagatcatacatgtgaagaatggcccttcaattgttgaaaccgactttgacacatactaccaagagcaagcccgaagcctcaagaacaaccacggggagaagagcaccggtgccttcactcctagatgttcaacaacaatgactacccaggattatcgaatgagtccgaaagcgagacttcagagtaatgtaattgagaactagtatcggcgtagagtaaaattataccccaccacagtatgacaccttggtggtgattctattcgatatcagtactaaataaaggttacacaatttcttaaaaaaaaaaaaaaaaaaaaa

SEQ ID NO: 34723 - DNA, 282 bp, Oryza sativa
  Clone ID: PAT_MRT4530_38710C.1
atggcgtggccgtgtgcggagaaggagctccggatggggagaggcgagccgaggcgaggggtttgggaatggcggagaggcgcgattttgcggttttggatgacgcggctcgaggtggaagacgagggagtagagacactgaagaaggcatcggcgtctctgtcgattgcgtgcgtccgccttcgagatgggaagacagagaacagcctaacgactgacacaccctttcacttgcgaccaggttaccgcgtggtaaccgtgcttaccgccagggcgcggtaa

SEQ ID NO: 34724 - DNA, 427 bp, Oryza sativa
  Clone ID: PAT_MRT4530_38711C.1
aaaaaaaaaactttatgggccaacccccttacattaacttaacggaaaaaccccctttcctttcccccccattttttcaaaaggacaggtccggggaaaaccacttagataattccttgggacacatacccaaaaccctgcccctctgaacttgcacacgacttttttttttgcaacaatggcgaagggcttggggaacttgggcacaaacttttccaaccttacaaaaaacggtgaacaccaacgatgcctttcctccccgctttacccaaggaaccttcttccggctctggttggcccccttgcaccaattctaaaccttcatggggttgccgccggcaaccccaccaaggtccttgtccccggggggggcgccgaatttggggtaaatcttgttcaccatgccgacactctggaacccgttccc

SEQ ID NO: 34725 - DNA, 883 bp, Oryza sativa
  Clone ID: PAT_MRT4530_38712C.1
gctcgtcattaagagcgaaagaaagttacttggaattctttggtttgttgtaatgacaatcacgagagaagaagcggagagcaaggagatggagagcctacgggtgcacgccagcgcgctgctctcgctgtcgtcgcctgcagcgtcggcgtcgcagccgacgtcgtcgtcgtcgacgacggagggggtgttcgagtgcaagacgtgcagcaagcggttcccgtcgttccaggcgctgggcgggcaccggacgagccacacgcggctgcaggcgaagctgctgagcgaccccgccgcggcggcggcggcggcggccgagagggacagggcacgcgtccacgagtgcgccgtgtgcggggtcgagttctccatggggcaggcgctcggcggccacatgcgccggcacaggggcgagacgggcacgacgaccgtcgtgctcgcggacgccgacgactcgggcggcgccaccgtgccgcagccgccggagcccatgccggacctgaactacccgccgctggaggacgccggcgacggctcggagcctgagttacttaaccttcttgtataagttgcatcgatagatatacatgtgaattgaattggcgtctgtacatagatatggtggatggattctttaccaaatttgatcgaaaaaaagaactaaattttggagcgtgatgatcatagcatgtaagttgtaacaaatgattgttaactgtaagataggaattctattcatttgttctcttctgtacaaaattacaaataggttgattaattagttggtcggttgtggttgattctttgtaaaataccaatttactagtataaatatactgacagcttattgtttcaaaaaaaaaaaaaaaaaaaaaaaaaaaaa

SEQ ID NO: 34726 - DNA, 249 bp, Oryza sativa
  Clone ID: PAT_MRT4530_38713C.1
atgcagtgcgcggtctccaatgcatgcagaagcaggccaatcgggaaggccggggacagggcaagggcacatgtgtcgcctaggccagggagtggccgccgccctacctcaggcccgacccccctcggggagggccacgtggcattggagggcagcctcctccatccaatctctgggaaggagtggccgccgtcctacctcgggcctgactcccctcgggggagggccacgtggcatcggggggcagcc

SEQ ID NO: 34727 - DNA, 831 bp, Oryza sativa
  unsure (1)..(831): unsure at all n locations
  Clone ID: PAT_MRT4530_38714C.1
atggcaagcgacggcagcgcgagcccggccagctgcggcggcgcggcgtgcggggtgtgcggcggcgcggcgacggtgtactgcgcggcggacgcggcggcgctctgcgtgccgtgcgacgccgcggtgcacgcggccaacccgctggcgtcgcgccacgaccgcgtgccgctcgcggtcgccatggcggcggcgagctccggggtgggcaggggcaggggagccccaacgacagctcgtcgagcttcaccaacgacagcgccggcggcggcggcngcggcggcgccgaaaggagcctctttgacctgctctccgacgtcgacatcatgtcctgcggcggcggcggcctcgcgtcgtcgttcgacggcgccgccgcgccgncgctggggcttgcacccaggccagctcgccgcgttgacgccgtggtcaccggccgactccgtcgtcgtcccgacctcggcggccggcgcggtcgccgcggcggcggcggcgagggaggagagggtgaggcgctaccgggagaagcgcaagaaccgcaagttccagaagaccatccgctacgcctcacgcaaggcctacgccgaggcgcggccgaggatcaagggccgcttcgtcaagcgcgccaccaccgccgccgcctcctcgtcatcggacgacgacagcacggccgccgccggagtcagcggcgccggcggcgccggcgccgccgccacgaaggaggccaagttctggctctccttctccgacgacggccgcgccgacggcgtagggttctacatggacagcaccaccgctgccaccgcggcctacggcgtcgtgccaaccttctag

SEQ ID NO: 34728 - DNA, 1397 bp, Oryza sativa
  Clone ID: PAT_MRT4530_38715C.1
tttagcttagcttaagccacttgatctcaagctcaagcttaaaattagcttaagattaagccattaattagccaagctaactaagcaagcaagatcttgttgaggagatgatggcaagcgacggcagcgcgagcccggccagctgcggcggcgcggcgtgcggggtgtgcggcggcgcggcgacggtgtactgcgcggcggacgcggcggcgctctgcgtgccgtgcgacgccgcggtgcacgcggccaacccgctggcgtcgcgccacgaccgcgtgccgctcgcggtcgccatggcggcggcgagctccggggtgtacgaccacctgttcgcgcccgacgacgacgccgcctcgtcatgggctgccgccgcggcggcgggggcggcggtgcaggggcaggggcaggggagccccaacgacagctcgtcgagcttcaccaacgacagcgccggcggcggcggcggcggcggcgccgagaggagcctctttgacctgctctccgacgtcgacatcatgtcctgcggcggcggcggcctcgcgtcgtcgttcgacggcgccgccgcgccgccgctgtggctgcacccaggccagctcgccgcgttgacgccgtggtcaccggccgactccgtcgtcgtcccgacctcggcggccggcgcggtcgccgcggcggcggcggcgagggaggagagggtgaggcgctaccgggagaagcgcaagaaccgcaagttccagaagaccatccgctacgcctcacgcaaggcctacgccgaggcgcggccgaggatcaagggccgcttcgtcaagcgcgccaccaccgccgccgcctcctcgtcatcggacgacgacagcacggccgccgccggagtcagcggcgccggcggcgccggcgccgccgccacgaaggaggccaagttctggctctccttctccgacgacggccgcgccgacggcgtagggttctacatggacagcaccaccgctgccaccgcggcctacggcgtcgtgccaaccttctagaaagttccagaaacccctctcccaatgggcgccaacgcggcaacggcaatggcgtttgcccgtcttaagacaaacattaagaaaagggcaacatgtcataatctcgccgtcatgctaatggtggcgcatggtgttcatgtcgtcgtcttcttcgccgtcgctttctgattccgtggtggaaacccgcatcactatttttaactgctgatgcgggttttcggtgggtggaattccaaattccatcggttaaaattagggggattattattaatgcattgtgacttttgtaagataactcatgtagttaatttctatggttcagtgctgaaataataaaaaaaatccaatgtgatttttctctaaaaaaaaaaaaaaaaa

SEQ ID NO: 34729 - DNA, 1849 bp, Oryza sativa
  Clone ID: PAT_MRT4530_38716C.1
cacacaggatagggaaaaaaaagtagagtaggcgaaattatagatggccaaaaggtccaaggctcggcccaagcacgacacggcccgacgagggtcaggcctatgccggcctggcccgaccaccgggccatgcctgggctcctccaccagcacgttgggccagcctggcacgatgggctacaggctaggcccgacacacaaacaataggggataggccacccgtgccttcgggccggcccaactactggtgggccgtgcctgggccaaaggtgcagtctatgggccagcacggcctggcacgaagtacggcccgatggctggtagaccgtacctgggctgggtcatgccgtacgggccttttggccatctatagacgaaatgcaaggtttctgcctttctggtatttggagcaaaactttttctgctccgagaatactgctcaaaactagttgacagttggacctaaactatgctaacctcgcaccagcgcgctcgtgcgcgcggagctggacgcgctcggcgtcgcgtacgtgtggcccatcgcgcaaaccggcgtcgtcgccaccgtcgtcggcgccgccggccccggccccgtgttcgggctccgcgccgacatggacgcgctccccatccaggaaatggtagaatgggaattcaagagcttggaagatggaaagatgcatgcgtgtgggcacgatgttcatgtcgcaatgctgctgggagctgctaagctgctgcaatcacgcagggatcatttcaatgggaaggtgaagctcgtgttccagccggcggaggaggggtacgccggcgggtactatgtgctcgaggaaggcgctgtggacgatgtgcagggcatcttcggcatgcacgtcgatgcgggtttgccggcgggcgtagtcgcgtccaggccggggccgttcctcgccggctcggctcgcttcacggcgaccatcaacggtaaaggcggccacgcggcggcgccccaccacgccgtcgatccgatcgtggctgtctcttccgccgtcctcagcctccagcagattgttgctcgcgagaccgatcccctccaaggcgcggtggtgtctgtgaccaccatcaaaggaggtgaagctttcaatgtcattccggaatctgtcactctgggcggcaccttgaggagcatgacaaccgatggcatgtcttacctcatgaagagaatcagagaggtgatagaggggcaagcagccgtgaaccggtgcacggcggcggtggacttcatggaggataagctcccgccatacccagcgacggtgaacgacgaggagatgtacgcgcacgccaaggcggtggcggagagcatgctcggggaggccaacgtgaagctgtccccacagggcatgggggcggaggatttcgggttctacgcgcagaggatcccggccgccttcttcggcataggggtcggcaacgatggcggcgggatggcggagacgacgacgaagaatcagctgcactcgccgcactttgtcgtcgacgaggaagcgctccccgtcggagccgccttccacgccgccgtcgccatcgagtacctcaacaagaacgcctctggcccttcagcctgatgcgtcccgtcaaggagcttaaatcgcctatgcatggcttggtaatggggttatctaagactataataatatccaaaaataatggtcctactagctactagctgcccaagaacaggccgttacaaaaacgtgtaaaaactattccagttggtcagcacaagcagtgataataaattcccggattgttttcttttaaaaaaaaaaaaaaaaactcatgggtacgacgagcgaaaaaaaaaaaaaaaaa

SEQ ID NO: 34730 - DNA, 390 bp, Oryza sativa
  Clone ID: PAT_MRT4530_38717C.1
gtatacatgatttattttcatttttttatatatttttaaaatgttaacacatttattttatataaaaaggagagaagggggaaacagaaaaaatgggaggaaaaggtatagggaaaaatggcaaatatataaattggccaaaggactatgcgggttggggaaacggaaataaaatccacgggggaaaaaaaaataagttcacgggaaccgggggaaaaaccaaaggttaaaattaaaaccattaaaaggccgaagggggttggttttctagaaacacaaattgggggcttccttcccttttttcaaggatgggaaaaaaaaaccgggcacccaaaaaaaaattgggaatttcctaattgagggggggggaacaaaacccttggaatttga

SEQ ID NO: 34731 - DNA, 159 bp, Oryza sativa
  Clone ID: PAT_MRT4530_38718C.1
aaaggttggcccccttttggtaaattataaaggcctgggttggttttggccttttaaggcctccattttggttttaaaattctgtcgtggcttgtaataaaattaaactctatatgtgatccttccgtgtcatattttctaaaaaaaaaaaaaaaaaaa

SEQ ID NO: 34732 - DNA, 619 bp, Oryza sativa
  Clone ID: PAT_MRT4530_38719C.1
atgccgtgctgggccgtgctttcctcgtgctgggccatcgtgccttgggccgacccgacaaagcacggcccaagtcccagctatgcccgcgtgttagccactgttactgcatcggcattacgccgaaggatcatccctgttgtggctgctgccgactgcctgcttgctgctgcgctaaatattataccagcgaaaatatttacagaaatagatcatgccgcccaagtggagagcagcaaggtgacgtggcacacggcgccatgcccgggccttgggccatccagccgatcagcagcaatcatgcaggcagtcggcagcagaaacaacggcgatgcagtcggcagtgacgggcatgatgcgaaacttggggctcatgggggtggatctagttgcagcgaagggagagggggcagatcccatcatcagcacggtaggcctccagcttcacggtcaccacccccgcaacgaggcctccgagctcaaggtcatgcatggctgccgcattgcgctccagcttgcagccttgcagggctccctccacaccgcgactgccggtcatcatctcaatcttatggatggctacaagcccacaatgccgaggacctggactgctggatga

SEQ ID NO: 34733 - DNA, 963 bp, Oryza sativa
  Clone ID: PAT_MRT4530_3871C.1
atggccgaggggtggcgcacggtggcgaacaagatgccgaggcggcatggtgccgaggcagacacgcaagggaaggagatagagacacacggcgatgagatggctgcggcgccgaggttgacgaggccggcaccgagcacgctcgagaacctcaatgctatactggtgctgactcaggagaagaccggagctgtcaccggtgactgtgatacccaaaaaatggaaggcattctacacatcaagcttatgaacaagccaatttcgagaaactgcgagactgaggactgtccgaacagtggccagcttaacaaccgggctaaaggtttcgtcgaagtcgatcccgggccattgagtgaagccacgaagtacccaacgcgccttgtacctgtccaagctaccgtcagactggaacttgtgatgaaaaatccacttgccggaaagccgggaggtggtcccggcggtcgccagagcatgctgctggtggaggatggcgacgcaggagggcgccgggcagccgacccggtagatggcggcccaggggaagccgactcgtgggcaggcagctcagcagagggagccgtcgaggccgggccagcaggggccgagctgacaggagccgagccaacaggaggcgtgggcggctcagtggagcgagccacctcagcagtagggccggcaggagccacgcgcgccgctgggccagagcggccggagtggggacgactgatcggagtcagcgaagctgaagactcgaaggtgggtgtagcttggatgggctccaaaaggggcgaaaaagggggtgtggtgttgaagggtcttggtgggatggtgatttatgaggtgagtggcggtatggagggcctcaacccaatagggagcgggaaggctgccttgaaaaagcaaagagcacactatgttgttgatggaacgaagcatgcgttcagccttaccgttctggggtag

SEQ ID NO: 34734 - DNA, 627 bp, Oryza sativa
  Clone ID: PAT_MRT4530_38720C.1
atggctgagctcccgccagccggatctggtggccatggagcggaagagatggctgctgccagggaagcggaagaagtggctgccgctatatatggccataaggcccgcccgagcacaacacggtcggcgcttcgtgccatacctgtccacgggctgcacctcgggtcaaggcacagcccactagcagtcgggccgtgccgtgccggcccgaaggcacgggcggcccatcgtgccttttttgaaataagtctattttacgttcctattctttgggttgtgccatataatacgtttatttttcctctctattctttgtttcgcatccctgaactttgtgctgacccagcgtaccgaggtagcagccaggcacggcacggctgtcgggccaggccgtgcctaggccggaccaaatcaccaggccatcgggcctctgactctatggccatctacagcgctggcaccaagctaaaaactggagtcgtccctgtcctgacagtgcactctgtcattttccacaaccgtctaacaaggataaatccggcagatgatgagatgaagaggaagatgaactatggccacggacatggagggcacaccgcacactacggtgctggggccagagcatga

SEQ ID NO: 34735 - DNA, 1204 bp, Oryza sativa
  unsure (1)..(1204): unsure at all n locations
  Clone ID: PAT_MRT4530_38721C.1
atgcagaggtacacgaagacgggtggtgagatatgggacatggagaagagccagagcccgcgcatggggagcgtcatcctcggcgtcgacggcggcgccggcaacaccgtctgcgtctgcatcccggcggccatgcccttcgccgaccctctccccgtcctctcccgcgccgtcgccggctgctccaaccacaactctgttggagaagataaggcaagggagacactggaaagagtgatggctcaagctcttctcaaggcacgccggagacgatcaaatgtatgtgctgtctgcttggctgtggctggcgttaatcacccgattgatcaacaaagaatgctggactggctgagggagatatttccaagtcatgtcaagttgtttgtagagaatgatgcggtagcggcattagcaagtggaaccatgggaaagctccatggatgtgtgttgatcgcaggaactgggaccatagcctatggtttcaccagagatggcagagaagctagagcagcaggtgcaggaccagttctgggtgactggggcagtgcatatgggatttcagcacaggcattgacagcagtagtgagggcttatgatggtcggggtcctgaaacagcgcttacaaacagcatccttgacttccttggactcgcatcaccagacgaattgataggctggacatatgaagaccaatcttgggcgcgaatagctgaccttcttccggttgtggtagaatctgctgaagctggtgatgaagtagcaaacaagatcttgcacaattcagttggtgaactagcttccagtgtcaaggctgtagtgcaaagacttgaattgagcggtgaagatggaaaagaccattttcctcttgttatggttggtaaagttctcatggcaaacaagagatgggacattggaaaagaagtgatagattgtgttaccaaaacttatccaggagcctatccaatacaccccaaggtggaaccagctgttggtgcagcactgttggcatggaatgctgtagcaagtgaattagacggtagtcctcggactgttgcctagaatgtgatcttccatcatattcttgtatattacattagtgttttgcatttnttgcaccaagttgctttggatatttgtaatcgtttcaagaagcaccatcatgagaaagataaagaaactagtgtaaccaaaaaaaaaaaaaaaa

SEQ ID NO: 34736 - DNA, 885 bp, Oryza sativa
  Clone ID: PAT_MRT4530_38722C.1
atggtggagctctgcggcggcgagggggaggggcagatcatgctggcgacggagctggcccagctgcgggccatggcgagggagctggaggcgaagatggacccggacagggtggccgcgcgggagctctgcagggcgctggcgtcgtccgtcgaccggtccatccgcctcgccgcgtcctgcttcccgccgccggagcacccgccccccgccgccggcaatgccggcagggacgccgcgttcaagaagaggcaagtcatggttcccggtcatggtggtttaatttcagggttgagagatcgccggagcaacgctctgacatgtgtttcgatgcaggaaggggatggccaaggtgaggaggcaggtgagggtgacgtcggtgcaggacacggcgtcgctggacgacggcctgagctggaggaagtacggccagaaggacattcttggcgccaaatacccgagggatgcaacgcgaccaagcaggtgcagcgcgccgacggcgacccgctgctcttcgacgtcgtctaccttggcgaccacacctgcggccaggccgccgtcgccgccgccgcccagagcgcgccgcccgagcatgccggccaggagcagcagaggcagagctcgctgctcgctgcgggaacggaaggaattcatcagcaggtagtggcagagcctatggcggcgccgttcttgttcacctcgacggcggccggcggcgtcgacgacggctacttctccttcatctcgccggcgaactccgactgccagttcagcagcgacttctcggcgggcagcgtcggggttgacatggaccacgaggctcgtttcgaagatcttttctcgagcactcttgagtttttccaatcggagattcagaatctgtag

SEQ ID NO: 34737 - DNA, 438 bp, Oryza sativa
  Clone ID: PAT_MRT4530_38723C.1
atggcaggattgcgaaaggggaaacgagatggtcatgctcaacatcgacttcttcaccatcaacgagatatatcgtcttcttcacgctttgcatataagggagctcagaacattcaccatgaggagaagagcaatatgctcgagatgtcatctccatcactcacgaaggaagaagagaagactgatgcacctacattatctgaagagggcataaaaggtaaattaaatggtgctggtattacccaaggaataaggttgatttgcaccggcaagatcaacaacccacggagaggtgtatcgatcgctaaggcgcaacgcaacgtcttttatcacaactcaccgaaagatcgggccaacaacagccttgagtttcgagaggaactcagggttcatcaagctggctgccgatgcagagacgatcagctcgcactgggatga

SEQ ID NO: 34738 - DNA, 138 bp, Oryza sativa
  Clone ID: PAT_MRT4530_38724C.1
atgggcgtggcaaatgagggggagagagttggaataatcattgatgaaatggagagggaatattcgtataacaagcaaccagagggcaatgcatcgtctgacgaggaagatgatgttcgtcgcttagtttataattaa

SEQ ID NO: 34739 - DNA, 405 bp, Oryza sativa
  Clone ID: PAT_MRT4530_38725C.1
aagagagcaattttaattttttaagaaataggaattacatttactttttttttttttaccaagggccaacaaacgaaattcacaaaccaaaacgctttttacatgaatgaaacttcaacacattcccaaccaaccatttaattaatttgaacaaattaaccatcacattttttgtttttttgcctgtccggcccctttcgcttttcttcacatttccagggcatattaaggtgtgtgtgtatgtggggtgggtctgcttggcatatttgcaaacgaacgagtgggtcacaaaccgatcgtgtttttgatcgatcagggggggcgggttttgaggatgggagggtcggcaaacgggccgtaaaaccagcccttggcgatttggccctaagaccccttcgtgagggg

SEQ ID NO: 34740 - DNA, 488 bp, Oryza sativa
  Clone ID: PAT_MRT4530_38726C.1
cccacgcgtacgaggacgcgtgggcggacgcgtgggtttactgggaccgctggagtatggcgcacagaagctatcaatgactcaggaggttgtaaggatcgaactacagctgaagacatggacttggctgtccgagcaaccttaaagggatggaaattcatatatttatgggacctgagagtaaaaagtgagcttccatccacttataaagcatactgccgacaacagttacggtggtcttgtggccgtgcaaacttgtacccatggatgatctgggatgtcttggctgccaagaaagtgttatctttgaagaagatctacatactgggtagctcattgcttagctcttcctgccaatctaggggcgtagcctacatacctacagcactactgattgacactgacatagaagcatcagaacatctgtactctgagccactgcggatgttattaatgagcgagatgtgcatgcatgggatgatagctgc

SEQ ID NO: 34741 - DNA, 587 bp, Oryza sativa
  Clone ID: PAT_MRT4530_38727C.1
cccacgtttggtcgcaccgcatcagaggacacaaggacaggagcgtagcgccctcagcccgtgcgatcgagtgatacgagtggctctcgctctctccacctctgctgctgttgccgctgccgccgtgacccgggcgctcgcggcgagggtgaccaccacgagggtctacaccacgctcttggtggcgacagcgatgaggtgttcgtgaacaacggtggaaggaaaggtcgcatgcgtgatgacgcaggctatagacggatcgatgaccctggcggcgagggaggcagcttgacctcccgacccacgagtacggaccctacctgccctgcaacttcgtcggtagggccgacggctgcaatgtcagagctgacaaactggcgcgaagttacgcccgctcgtgacgcacacgaactcaccatccggcgagcgactacgacaacgatcccacgtatctaaatagcggcgatgctgctatggttaacatgattccgaccagcgcctgagtgcggagaccttctctgagcaccctactattgatcattatgcacgatcgtgacatgaggcaaacggtcgctgttggcgtcatc

SEQ ID NO: 34742 - DNA, 1552 bp, Oryza sativa
  Clone ID: PAT_MRT4530_38728C.1
tttttttttttttttttttttttttttttttttttttttttgaacagcaaagcaggctaagcaataagcatttgatctcacactggaaaggattatacatattcatcgttttagttgaacaacaaaagcttatagctcgaacaagaggacatattatcatataggtatggcaaatctttcaagttccagcaatcaggacgagctaatggtaagattttccatctcgtttgctacatcatcagctatctccacttctagagctcccagggacttctcaaatctttcaagggctacaaaggcaccctcaggtgagccaccaaggctcctgatttccctccgcattgcattggcgccaccatacaatcttttcactgaggatttcatctcagataagtcttgtggtgggtacacagacgccccgaggtcgttaatctggtcagcagcctgtctgcaacagctcaacaattgttccattgtctcaactttttcctcattagctccacttcggttacctgagatcttaagcaaacaagtaatgaaacgaattgtttctttcaccacaacaagcgcatcggaagccacagtgacaaccaatttggcaacagcaacctcctcttcagtgaagtcctcatctaactcaaggtcacttgacgatccatctctatcagaacaacttgtggtgtccacagctccattagaagatttttcagcagtgccattagaatcaccaattggtagttctttcatctctcggagaatatccttcagatacacacctatctgagtcatggctcgtcctatggcaacacagttggttgttggtaccttgttgagagcaagacatgcttcccatacagttcctgtcacctgaggtatagttgttttccggtcaggactgcgtgattcataagcagaaacagcttgattgaacaatgagaagctggagtcaacaacattctttgcagagctacagatggatttgtgaagtgtgggtcctgcgccaactgtgctgccgtggcaacccaaaaggaaaccctgcaggatgttgaaatatgcgacgatgttctccttgagtgtttctacatcaggcaaatcaccactccagaccattccagcaacagtggcctgcctggagacttgctcgccgagcttgacgacctcagaccactccgtccgctccaagccgccgggagccgcctccgccatcatctggaaggtgtcgttgatggtctggaggtgcgactgcaggaagcgggacagctcgccgccgcccgccggcttcttcgccgctccacctctcctcggcatggcaggcagctaccgcctcgtcgcgtcgcgccggcgaagaagagagggagaggaagagggatgcgagccgcggcgaggcggcggcggcggcggcgggggcggaagggtttatttcgttagggcttttgggggaagttgggcttggccggttggccctcctgacattgcgtcgatgtgggccgttcgattgaagttaagattcgtgctggaatacgaccgtgattccccgtcacagctggactag

SEQ ID NO: 34743 - DNA, 267 bp, Oryza sativa
  Clone ID: PAT_MRT4530_38729C.1
atgagtaagagcggtgggagatgcagcaaggagggagacgatgcatatttcgactggaaccgtaccaatggggaagacaaacatttcttcaaggtcatgcttggtgatttccatgaaagagtgggtccaattcctggtctctcattgggccacgtggcctcatgcattgcgctctgtttcaattctcagctgaaaaacatgccacgtattcgcaccatctcacagccgttagatggcatatcaacggtgaaagaaactttaagatag

SEQ ID NO: 34744 - DNA, 4405 bp, Oryza sativa
  Clone ID: PAT_MRT4530_3872C.1
ggttggggttttttttttattttttttttttttgcacacaaggccaacatgcaacttttatacacagtataatatgtgaatatgaaattaatatgtactttaaaagcattcccaagacacaggaaattaaaacatagtcagcggcattgcacacacggccaggtatctctcagcagtcagaaataataacgatactgaactgcactgcttctgcctcgatttcattttttttttggggtctcccagccacgatgagaccaaactaacaacacctattgttgatcctcaaactcatggccatgatccaaaagatagttggcagccagctcttcatccttgttgcatgcgaagaagacctccaaaacgagctcacggttgaaccccattgcctccagccgctgaatggcctcccgttcctctggagtaactgtaagtgcctgtggcatagcggctgctagttgacctagtatgtttcccccagcagcgccgctatcaggagattcattcaccagacggagaaattcagcctgattttcctgaatcaaccgcaagatttgcggattctgcttcccaagctcttgaagcattggctgcaagatttggggattagcctggaccaatgcaagcagcgcttggaactgtggaagttgtcgcaatgcatcaagggcaccagcaccggcaccggcaccagcagcagcaccaggatttgacccagcacttggaatgccctgggggaataggtttagaggattcgcattaggtcctgaggcaccaccagctggctgcacaggcggtggaggtgcagcctgagcctgagatggaacctgtggatttccctgttgaacagcagcaggtgctcgagccacaggttgtgggggctccacattctcaggaattccagaatacagatagtcaatagctctctcagggttgttatatgcagcacgcaaagcacggacaaccatgtcacgttcccaggtgccaccacccatgtcaagaatttgttggattgtctgttctaggttgctacctgaaacaagatttgatgcagcctgactgtagacatccgcatcacttgatgcggtcacagcagcagctggagtggcagcagcagctggagtggcagaagcaactggaggctgtgcacttggaggtgccggttcaggtgtaacaacaggtgcttgtggaggtggtgttcttgcaactgaggcaactggagttgctggttgagactggctcacaggtgcctttgaagcagttgaagctccacttgatgatgctttggccttagacagcattataacaaggaagctgttctcagcaactttgttgccttccaaagttgtatcatccttgagaattttcccttggtgtatgagcatctgctgtgcccttgaatcatatagaccaaactatgagcattgacattccagaatggtgagagaatagcattctggtataggtttactctggtagcactcatttggatgaggttaaggatggggaacttctggctgttgacacttgaaatccttccagcacgtgggttgtatgaatcagcacgactaggattttcaatgtttactcttgccttgattgtgcagaagttctcctccaatccgttccatcgggaagatgtttgttgttgttcactatattgaacttcttggtattgagcttgtgcttgttcttgttgttgtgtcaaagtcggtttcaacaattgaaggccatttttcacatgtacgatctctcctctctgatcattttggctctgcagcctctttgctgctactgtgttgatgcctaaagcctcacttagtagctcagtaccgaatccgttgaatatgttttggctagagtgttgctcaattgagctgccatatacttgttgaaccctattgttgttaccagctaataggaactccttttgccttggttcaagttgatttgcactgttgtttatgtcataaacatatatggcaacaaccgatgcatcaccatcattgtagaaccaatgtgcaacaccagctgggagtgcaacaacatctccttgtctaaattgatggatcttttgatgctcatccctaaacttttggctttgactttggccttgagacgaaaattgttggaattgttgctgataagtcgctgggcaaccggggaaggttaaacccatagaacccctcccttgaatgatgtagaccaggccaggagtattgctatatcgaggtaccaaaaggccttgaggttgaatgacacgtcggatgacaaaagtacctgtgcattggaataattcattcttctcatcgaagtactcagtcaccccagcttctgaccttacttttcgaagtggctcaaatgcttgtagtctatcaaacctacactccctaaaacttccttgccgaggactatgccatgggtttgtgcttggattaaatagttgggccatagaaccctggcataatagcatagcacaaaagtatatagaaaaacgagagaaaatggtagttgccatagctattagcagttgctaatggaacccacgcgtccgggggaaacatactaggtcaactagcagccgctatcaggagattcacccacgcgtccggttctagatcgcgagcggccgctcgcgatctagaaccataagcaagtacaaatagctatggcgagttccgttttctctcggttttctatatacttttgtgttcttctattatgccatggttctatggcacagctatttaatcccagcacaaacccatggcatagtcctcggcaaggaagttttagggagtgtagatttgatagactacaagcatttgaaccacttcggaaagtgaggtcagaagctggggtgactgagtacttcgatgagaagaatgaattattccagtgcacgggtacttttgtgatccgacgtgtcattcagcctcaaggccttttggtacctcgatacacaaatattcctggcgtggtctacatcatccaagggagaggttctatgggtttaaccttccccggttgccctgcgacttaccagcaacaattccaacaattttcatctcaaggccaaagtcagagccaaaagtttagagatgagcaccaaaagattcatcaatttaggcaaggagacattgttgcactcccagctggtgttgcacattggttctacaatgatggtgatgcacctattgttgccgtatatgtttatgacgtaaacaacaacgccaatcagcttgaacctaggcaaaaggagttcctattagccggcaacaacaatcgggctcaacaacaacaagtatatggtagctcaattgagcaacactctgggcaaaacatattcagcggatttggtgttgagatgctaagtgaggctttaggcatcaacgcagtagcagcaaagaggctacagagccaaaatgatcaaagaggagagatcatacatgtgaagaatggccttcaattgttgaaaccgactttgacacaacagcaagaacaagcacaagcacaagatcaatatcaacaagttcaatacagtgaacgacagcaaacatcttctcgatggaacggattggaggagaacttttgcacgatcaaggtgagagtaaacattgaaaatcctagtcgtgctgattcatacaacccacgtgccggaaggataacaagtgtcaatagtcagaagttccccatccttaacctcatccaaatgagcgctaccagagtaaacctataccagaatgctattctctcgccgttctggaacgtcaatgctcatagtttggtctatatgattcaagggcgatctcgagttcaagtcgttagtaactttggaaagactgtgtttgatggtgtccttcgcccaggacaattattgatcattccgcaacattatgctgtcttgaagaaagcagagcgtgaaggatgccaatatatcgcaatcaagacaaacgctaacgccttcgtcagccaccttgcagggaaaaactcagtattccgtgccttgccagttgatgtagtcgctaatgcgtatcgcatctcaagggagcaagcccgaagcctcaagaacaacaggggagaagagcacggtgccttcactcctagatttcaacaacaatactacccaggattatcgaatgagtccgaaagcgagacctcagagtaatgtaatgtaattgagaactagtatcggcgtagagtaaaataaaacaccacaagtatgacacttggtggtgattctgttcgatatcagtactaaataaaggttacaaacttcttaattttcctacttcatgccatggatattccattattgactatagcggatgtggctatattcatataatttatcctataaacagaaacacatgtcgtgttgatttcgtggacgaaaaaaaaaaaaaaa

SEQ ID NO: 34745 - DNA, 338 bp, Oryza sativa
  Clone ID: PAT_MRT4530_38730C.1
cgtacgcctgccgtatattagtgcatagcatcacactagtcatgcataagtcaccccatagccagcatcacaatggcgctttgactgtcgtgcacaagcgtatataggcgatagatcttaggccactaacctaggcaatgtgctaacttctatctacagaaatccaagacaatgcaggtttgatatgcagcactcatgtgaaccaatcaacagtgcaaggtctcaagctctcacatcatgagacatagcatgttttctttagcaagttcaatggaccagagtatgtgcaggccttatagtaattgcacctataggacgtttactataccattacacta

SEQ ID NO: 34746 - DNA, 406 bp, Oryza sativa
  Clone ID: PAT_MRT4530_38731C.1
agaagccaagggagagaaagaaaataaaatagcagaagaaaatgagagcaaagacagccgcatctgtgcagcagcgcggcgacgtcgtggagagcgacatgcgagcacgagaaaagccggcggtcgtctggcccgtccgtcgtggtggtcagtcaggcaggcagtcgcgcacacacgccgacgaacggcgtggctcctgttcccggacgcgccgctgcagcgatgcgcgcccgagttattttcgttttatctgtctcaccgctgcgtctacgtgttgggtttagcgcgcgacgtgtcacgctggccggttcccgcacgggacacgcacttggcgcgtagccgattcaagcccgacgcgtgtcctcgtttcgggaacttgcaggcacgttgtcacgtactactatag

SEQ ID NO: 34747 - DNA, 528 bp, Oryza sativa
  Clone ID: PAT_MRT4530_38732C.1
atggcatccagcagcagcgcgcaggagaccgggcggtggagcctcgccggcgccacagctctcgtcaccggcggcagcaaaggaatcgggcgagccatcgtggaggagttggcgagcttcggcgcgacggtgcacacgtgcgcccggaacgaggctaccctgaacagctgcctggaggagtggagcgccaagaagctctccatcacctcctccgtctgcgacgtgtcagcccgcgccgacagggaggcgctcgccggcagggtcaccgccatgttcgacggcaagctcgacatccttgtgaacaatgttggcttcctcttcctaaaaccagccgtgaacgtgacgccggaggagctctccagagtgatggcgggcaacctagagtcatgcttccacctaagccagctgatgcaccctctcctcaagacctccggcaagggcaacgtcgtcaacatctccggcatatcaactgttaccgggttcccatctcttcccatttgtgctttctgtgcagcaaaaggaagttga

SEQ ID NO: 34748 - DNA, 407 bp, Oryza sativa
  Clone ID: PAT_MRT4530_38733C.1
cagcggaccacacaaaacaacaaagggggctctaattgaaaggctctgtttgtaaaaggggccagggaataacaacacacattacactttacattcctccgttaacttggacccgacaaaaaaatagggaaaaaaaaaaatttaccgcccgcctccagtttttaattccaccctttttccccccccccaacttcctaaacacaaaaagcccgttccaacactgtttatcccccaaaaacaaaaattaaggggcccaggggaaaggggccactatttcccgaatcctacaatggaaaagggggggccaaaaaaaaaaaaaaaaaggaatatggatgggacatcgccaattatactttacacaatctccgacccgcagagggaaatatcagagggaaaaaacccccggg

SEQ ID NO: 34749 - DNA, 441 bp, Oryza sativa
  Clone ID: PAT_MRT4530_38734C.1
atggcgttttcgtgggcgtcccgaaagccaggatgcgatgggcggtggagcgtggaggcggtggatcgtgcggtgaaaatcgaaccacgagcgcgggaggggcagcgtggcgcggtcaaggtgggtgcacgggcgctgcagggcgtcgtcggcgtcctctgcctccgcgtgcaaggtgacaagggcgggagagagagagagggactgggcctagaagggaaaaagggagggaggacggtggaaaggggagcttgccccttccgtttttggacggcaaagctggcgaggcgcgtgggagcggtgtcgccgcgttggcggcttgtggcgtgcggaggcgaggtcgggatgagatgcctgatgacgcaagaaaggggtggtggccggtctggcgtcgagcggggccaggcggtcgtcggcgcaggcggcggccatagaaagtga

SEQ ID NO: 34750 - DNA, 213 bp, Oryza sativa
  Clone ID: PAT_MRT4530_38735C.1
atgaacgttgctgaggagaacggacactcgccggagatccagaaggccgattcgtcgccaccaccaccaacacgagtggaaaagaacaacgtggcgaaggggatggaggtggactgcaaggggctggaccacgtggatgcgctgcggctgattcgccatcggcaaccggctacgtgctacctcgccgccacattggacgaggacccaagttaa

SEQ ID NO: 34751 - DNA, 2946 bp, Oryza sativa
  Clone ID: PAT_MRT4530_38736C.1
atgtactctctccgtcctaaaattcggccaccgcccttcgcgcttgccgccgccagggacagccctctgcgctggcctccaccgccgccgcccggccgtctcccctcctggatccggtggaggggtgaccgccgtcgcctcctgccgtatgccatgagccgcggcccgccagaggggagccagaggggagggagagagaatgaggaggaggagaggagtgagaggagaggaggagaaggaggaggagatggggaaggaggagaagagataaaaggaatgaggggtgagaaggaggagaagagagaagagataaggttgggggcaggaaggatgaggcgggacgcgtgcacgggcagtttcgctgattttttgtcccggttgtttaataataaatctttagtctcgctatggttaattgccaaagatgaaattaagcagctagccgggaatcgccggcggcctgacattgggatcggaggccatggtgcagccaaggatgacttgccgatcgatcgatctatctatgaagctaagctagctggccatggatccatccatcaattggcaagttgttcttggctacatcttggcccctgctcctcatgtaaggccggcctgtggcgacgacgatcgaaggcgagcgcttcagctttgttaattagctcttgttcttggccaaatccaacgcaattttgcaagcctaatcgcagtcaaaggccggcaacaactcttgcgacctctatctcatctcttttgattctttcatttccttttttttccctttatttctctctgcaaaaccactactcatgcatattcatatctatcttctctcttaatttgttcggtcgctttcgttcgcccccgccgacgtcgatcgtacggccaccgacggcgatgcgcacgtacgtacgatcgatcgtatatataccggtatacgacggtgtacgatacgagtggcgtaaattggcgccgtacacttcagcgatatccatgagcagcagcctcctgaaccctatggaacaaacggtgcgctgcattggctcttcggcattggagtctttgggcattggcacaccgattcatcgagcagccaagcccatagcatttttcggatattgcaatttccctttttttttcctcaagaaatatagtaaaacagaggcgctcgcacacgcgtacacggcacactcatcctctataaacaagcgcgcacacacacctataagaaaactagacatcctctataaacaagcgcggcctaatctatgtacgagcccgtgccgaaacagatctcggcacatcaaccattcagcccaacactgtactcacaacaggcttccagcccaataccgcgttgatctttctgaagcccataggcccaaacagcgagaagaaagggaagcgcgtgaaaccgcgcgcccccacgatcgcacgagctccatcgaacccaaccgcccaccgccgccggccaccgcggagcgcatgccgccgccgccgccgccgccgccatctctgcccccggatctccaccgggcccacgcctacctcctcccccgcggcggccaccgccacgcgcgcgtcgcctccgcgctcctcctcgcctccctccgcctcccgctccgcgaccacgcggccgcgctcgtccgccgcgtccacccctccgtgtccctcagggccgccgcgcggctccgcggccggggcgggggagggctcgccgcgcagctgcattccctgctcgtccgcgcgggccacgccgccgacccgcacgcctcggccagcctcgtccaggcgtactgctcctgcgggagcgtcgcctccgcgcggagggtgttcgacgagacggccgcctccgcggacgtcgtttcatggaacgtcatgatcgatggatacgtgaagtccggggacctggcccgtgcgcgcgagctgttcgatgttatgccggggaggaacgtggtgtcgtggacgatggtgatcggggcctacgcgcagatgaagcaaccggaggaggcgatcgaggtgtttcggaggatgcaggtggaggggatcgaaccggatggggtggcgttgctgtcggtgctctcggcgtgtggagatcttggtgtggttgatttgggagagtgggtgcacaggtttgtgctgcgacggggtttatgccaggagataccgctgatgaatgcgatcatcgacatgtacgtcaaatgtgggagtgttaagaaagcgttggaagtgtttgagggcatggagcagaagagtattgtcacttggacaacgatgattgctggatttgcattgcacggccttggtttggaagctgtggagttatttcgccggatggagaaagagaatgtgtcaccaaatgatatcacttttcttgcagtcctatcggtatgtagccatgttggactgactgatttgggccgctggtacttcaaaactatggtgtctcagtacaagattaagccacgagttgagcactacgggtgcatgattgatctacttggccgtgcaggttgtttgatggaagctcgtggtttaattcaggatatgcctttcaaggcaaatgcagcaatatggggagctcttcttgctgctgctcgtactcacggtgatacagagcttggagaacaagccttgttgcatctaattgagctcgaacctcacaacagtgggaattatattctcctatctaatatatacgcagaacaggagaggtgggatgctgtgagagaacttcgaatatcaatgagagatagaggattaagaaatgtgccaggggcaagttctattgatgttgatggcatggttcatgagttcacttccagagatggctctcatccttccttgcataagatacgtgaagttctatgtgcaattaacagtaacataaaatccgtcggtcatattgcgctgctccctgaaagtttgcatgatgttgaagaaggg

SEQ ID NO: 34752 - DNA, 592 bp, Oryza sativa
  Clone ID: PAT_MRT4530_38737C.1
atggggtactcccacggaataatactgccagcgacatccttaatcaaatggcatcagtactttagagaattcatgcatctatggaatcaaattctgccataggaacaactttacttcagggtgaagagaatattggccaattcctctaccttgagggcattgagtattatatgtggaacacatatgatgttcatttctatgcatcattctctctgatcatgctgtttccaaaactccagctcagcattcagagagatttcgctgctgctgttttgatgcatgatcctgaaaagctcaggatgttacatgatggaaaatgggttgcgagaaaagttcttggtgctgttcctcatgatcttgggctatatgacccctggttcaaagttaatgcatatacgctctataacacagatcgatggaaggacttgaacccaaagtttgttctgcaagtttatagagatgtggttgccacaggtgacaaatcctttgctcgtgctgtttggccatctgtttatatggcaatggcatatatggagcatttgacagggataaagatggatgattgaaatgaggactttcagacagacttatg

SEQ ID NO: 34753 - DNA, 4191 bp, Oryza sativa
  Clone ID: PAT_MRT4530_38738C.1
catcggcttcagtatcccctgaaaaaatgaaagggttctatcggccatcatgaaagtagcagcagcctacagatgagccacccatcaaaacaaagaacttgtccaactacatcacagcaaatactaacacaaaggctaaagcatgctctaagagttacagaagaacactctgatgctgatgcagttatgtgacctattctcgcttcgatctgaaaggtcaacttagccattgttaactaagaaatatacaaatcagaccattaacaacgaattccagacaccaggtcattagcaccaagatttctacaaatcagaccattaaggactttaccacctctccactcgatgggccctagtgttttcttatttcttgaatgtgccacggatctgaagctgctaggtctcggacaggaaaggagattctgtttttacagccattgagagcccaacagtttgtctagttctttcgctatgcgcaatgatctttcagataattttgttcctaatgtcctccagcttcttcaggatttcaccaggagttctgtcgagttcatcggcaatcttcctttgcatatcagctgggagggatggaaactgctcacagaggtcaccatcaatcacatccttcactggaaaataagcagatctgtaggccatgtgatctcttccacataatggtggatgctcctggcggagatgcatctccaagtgagaaaagaagtcaacatcttccctggaggtgaatgcaagcagtgccccaacactgcccatcacagtcccataaataagacattcgccgcctcccggtattaaagaggctttctgcaaacatgtgacaacatcaccaacatgaaactgaacaatctcctctactttgtttggggccccattcaacttcccttgctcccatttaatcttccccccagttgggtcttcttcaatctcatctgagagatcctgaggaaggcgagcaaaatatatgttcccaaacttatctgcccctgccatagtatcaaaatctatgtgatttgctgctgtgagccacctgggaacactatcatcagcgaagatgtacagttggttttcatcccttctgtacttgcaataatgaaatgactcttgcatatcaccaacatagatcctatctcggtaagtatggatagacactatcgtccttgggaaaagtttgttttcacacttcctgagcaacttcctcttcccaagatcatataacctgaggactgaaccaacaccagcaagcaaccgtccttggaactggcacaaggcaagaggtacttcctccacctgtgtcttgtgaagcagttcaagtgacctcccttcatctacaaacttgtatatgtggatgaacccagctgaaaggttcctctttggccagaattgcaatcccttggcagtaccaacagccaagagagtaccatgctccttatcatgaaagttcacagtgcaaatgctaacagctgcttcattgtcttgcaattcaagcagacaagtcgtgtctctgctctttggatcaagaatcctgatgcaagaaacccacctttctgattccgcctttggataaccatactgttcatctggaagtgtgtttctgtcctcagcaccatcttcttgaccatcaccattctccatctgatccccattatttgcattaccattttctgtaacaccagcagcctcaaggcactccttcttagccgcttctcgctcttctgcgctgagcgcacctttatcactctcaatgacagcaaggtatttcttttttggaagaatcacaaattttcttggggtgtagcgcagagggatggctgtttcattgaaagtctcccccaggtgttcaatggtgaaaattcgtagggcatcaccagcaacggcaacaacaccttctgagcactgatcagaagagaaggatgcagcagattcaagtgtatcacaggacagtggagtcaataggaagtgaccttgatgtatgtagccaagccagggacggctggacaggcaaagcattgcttgccggtggctaactatgcacggaaacagttttggaggtctcaggccaaggaaccgagatcgtgtgtcagataactgaccagtgaccatgtcaacattggtgcggaacaggacaccattttgcaggccagcattgaggaaaaggttggctggatggtccgcaccgtcctcaccgccaactgatgcctgaacttctagaaacatgagggactctggggctgaagagacactttggacactcagaggctgcaagcagtcatcagggtccacggagagtattcggatggtgttatcaaaggaaccaactgcaaggaatcgggacctctgtctcccctctggaactggcgcaatggccaggcatgcaacatcaccagacatgtcctgcttctcgacttccataagctgacctgtcatgtccatctcaaagtagataagctctccaccactgagggcgattaccacctggagccggtttgatccaaccttagtgatagttttcttcccaggtgtcctccactcattcacacggccatcttccctgatgtgcctgatgccgttcgggtggacctgcatgagagagtcctcgccaaggagagaaactgccagggagtgagtggtatccagaaactggctgtcgctgacttcctcaatagtctcaccgatggagagcacaagtgtaacattggcaaaggacacgacaatgtaggcatcaaacatgtcattgatattcttctttacagtccagacagcaataggctcagccggcaacatcgatcgagccatctcactaatggcaagcccaggcctcaggatgcgcaaggtggaccgaggaccacggccgcaggctgtgaatacctgtggtgtttcctcatcaaatagatttgcaacacgcatgtccatgattggcatgagactttcaatttcatcgatccggtacaggttcttgagtgctcttggctgaaagaatacgggctggaacccctcatctgtctccatcagtgtagctgaagacgactcaacatccacatcccgcccaatatcacggaactgataaagtgcatggttgccaaactcagaagcagcaaagagaaaacctgagcgcagcacacagatagcagatgtcacaggtatggtgtcaaagtacttgatcctgagctcagtaacagtgtcattactgtgttcgaggtcaaccttgaagatatcgccgtactcagtctgtagtaagaagaagaacaagctcttctgcctgtgcgtggcggctgcgactatgaggacaccccgctcagccgggagatcagcgcggcgtggaatgacagcccgcacttccgggtgcccctggttccggtaaagcacaaagttgtcgcagcacacgaggagcccgcttggcccatcaccaccaccaggcacagtcaccagtagattagcaccgttatctatcggctcggaggccttgcgcgagacatgattgagccccaggtctagctcatagaatgtgaggtgcttctgcgcctgctcggcagcctgcccggtggggtcgcggtcggactcggcgtactcaagctcaatggcggcgaagacagggttgtcgaacccgcagtcgagggcagtgagggagaaggtgagcgtgttggacttgtgcgcctcgagaggagacgagatggtgaggcgcgcggcggcgtcacggttgaggacgtagacgagcttctgcttctcgagggcggcgatgcagagggcgcggcccttggggtcgacggcgaggagctggccggggacgatgcggcggcagccggacttgccgaaggtctcctggtggaccttgtcgaggcggttgcggtcgggggagtactcgaggatgacgaggcggccggagtcggagccgacgacgaggtagtccttggtggcgccggtgaggcggaactgggcgagcgagcggatggcgccgaagacgtcgacggagaggagcgtgcggaggcggccggtctccgggtcggggcggaggagctcgagagtggtgccacgggccacggcgatctcctgcgtggacgacgacgacgacgacgacccggacgccgccgacttcttcgagtcgcgcccgctgaagctgccgatgacggcgcacaccgcgcccgtcgcccgctgcagcgtcaggctgtagaggtacat

SEQ ID NO: 34754 - DNA, 506 bp, Oryza sativa
  Clone ID: PAT_MRT4530_38739C.1
atgtggatccgatgctccgccatgttgaacctcctctatctacattccttgagttgaacaaggtgaatttggatggttacaatgaagtaaagtacactccatcacgcgatcgccagtggcatatttacacactcatcaagaacaagaaagatcagagatcaaatgaccagaggttgttccttcgtaccatagtaaggcaaccaggtgtgaccaatgggtttttgtcaggaaatgttgacaatgaagtaggccgtgctcaggcttcatcatcatacacatcaagtagtatactcagatcactgatggcagcactagaagaaatagagctacatgcacataatgagacagtgaggtcaagctattcacacatgtatctgtgcatattgagagtacaacagttgtttgatcttataccattttcaagaacgattgataatgttggtcaagatgaagcaactgcatgtacgcttttgaagaatatggctttgaatatatatgaacatgtt

SEQ ID NO: 34755 - DNA, 635 bp, Oryza sativa
  Clone ID: PAT_MRT4530_3873C.1
ccggccccgggggacatcaaaccccagaacgacacttccgcacagccctagggtttctgttcagcgaccccccgaatcgaatcaagagggaggtgccatggcgtcgcggccgtcgctgaagccgaagcccaaggtcaagggcgcgaggaagggatccccggcggccgacgaggagcagtccacggctgcggcggcggtgcggttcgtcaaggagtggaccacgtggaccatgaagaagaccaaggtggcggcgcactacggcttcatcccgctcatcatcgtcgtcggcatgagatccgagccgaggccctccctcgcccagctcctcagcccggtctgatctgacgatcgccttcaagccctagatgcgatcgatctgcccccctttactaccgctttagtagtgactttagtaatagttctttcttagatcgtgccttctgagcagttgatgctgctgtgcggatttagaggtttttgctatatgaatctaataatgttatatgggtggatgcttctttggattaaactcttgctattattgtgcgggtcatggatctgctattaatacttcggtatggtatggagaaattttctgtgaaatttgcaaaaaaaaaaaaaaaaaacccgcggcc

SEQ ID NO: 34756 - DNA, 432 bp, Oryza sativa
  unsure (1)..(432): unsure at all n locations
  Clone ID: PAT_MRT4530_38740C.1
gcgagggcgccgtggctgtggtggtgggtggtggtggttgttggtgtggcggtggcggaggcggcctccggaggaggaggagggggagatggggaggggaaggcgctgntgggggngnaggncggnnccggaaacgcgccccccgagccccnncgctgnnacgccacggcccnccgctgggggggggggggcnntctcatcctcacttctccgcnccgtctttnccctcatacctcctatgcttnacctatnangtgtgatctcaacgaccattcganaactagggacactacngttcattnatctgacagggaacagactcaccngcccnatgccctctcaaatgtgccacatcaccttactgnatatagccggactaagctttcancttcttctgaggagacattccctgcttcctttctgngctcattc

SEQ ID NO: 34757 - DNA, 640 bp, Oryza sativa
  Clone ID: PAT_MRT4530_38741C.1
ctcatgtcccagctggcaagcacgccgggaagacagtccaactgctgttcgcagaggcgcgtcgccgaccacctacatggtaccatgctgattgcgccaagcacttcaccgatctctgcagtggggtcatcttcgacatcgacgaccttaccctcaactaccttcgggatgaatgcgtgacgctggacaagcgctaccggagtcctccattcaaatggacggcgtggatgcggcgcgagtacttccgcaacccctgcgtcgccgtcggctctgtgattgccatcatcatcacctgcgttcgcagtgctgcaggcggtctatacggtcctaaagctcaagggaaaagtgaaataatcttctagtactaataaatacgcttgtgtataaagtgctcgtatgcccgttggggctttttaattacctaatcgtgcgatatggaacaccatgtacgtatacatatagccatatatataggcatgaataagtgtgatttcaatgtttgccctatattgtaatattacattttatacttatactaccactatgagtatggacggtttgtaataattccctaatttttacacgtactttggatcataattcacctcgtaaaaaatattttagcaaaaaaaaaaaaaaa

SEQ ID NO: 34758 - DNA, 752 bp, Oryza sativa
  Clone ID: PAT_MRT4530_38742C.1
gcaggggaaataccataagtaatagacgattccccatttaaatatatatccccaaaataacccttaacctgtaggccaagttccaatccgaaaaccccgatcttgctctccccatattttcttgtttttgcttttttttttttttttttttttttttttttttgttgcgatctatctagcaaatcgatctcatgtgtatatatgtacatagtttctgtatatcgaacaaatcaacaaaaagaatgaaacaagaaaaacaagtagcgtgtgtcatacactcatacatacacaactaagatagagagcctacagaggagggagaggaagagggcaaatacgagtagctagctaagctagtttgtgcgcttgctggggctggatggctgtggcctccctctgggcttcatgcttctcaaccaagacagctgctgctgcatcacttgttcttcagtcgtcgtcgtcgtatctgctgatgctgtctccgattcgtgcttcagctgtggctgcatcggcgtcggcgacggaagaggcagaggcctgctgcaactgccgtggtgtgcgaagaagacgagcaggaggagcagcacaagcagcagcaacgacgacgacgagctgcagggcttcttgttgcttgacaatagcaatgtggccattgttgtgatctccttgtgttggaagctaatatggatggatttgcagaggaattgaagcacaggtagctatccgggatataaatacaagagataggtagc

SEQ ID NO: 34759 - DNA, 464 bp, Oryza sativa
  Clone ID: PAT_MRT4530_38743C.1
tcagaggtgggacccacgtgggctccacatgtcaggctgccacgtcacacccccctctctctttcccctctcctctcccttcctcttcctcctctctctctcaattttctcctcaatggaaagccagccggcgggtgaggagagggtcgtcggggcaaggcgggagaggaggtccggcggcgggcgacgtggcggtgggcgtcgatgggcgccgctgcggggggcgacagaggcggcggtggcggggccgggtgacgcgggggtgggcgttgacgggcgcatctgtggggggcgactaggcggtggatgcggttgcgagcgactcaacggtgggcgtctaccggcgcccgcggcggtggcaacagaggcggcggatgtggatcccgccgactcggcggggggcgtcaaccgccccctctgcggaggtcgacaatgcggtgcccctcggatccatttttgtgccc

SEQ ID NO: 34760 - DNA, 1206 bp, Oryza sativa
  Clone ID: PAT_MRT4530_38744C.1
atggcggcgcgacagcagcacgccgccgtgctcgccatcggcacggcgaacccggcgaagtgcgtggtggcgcaggaggagttcgtcgactggtacttccgggtcacccagagcgaccacctccccgaccttaaagccaagatgaagaggatgtgtgacaaatcagccatcaagaaacgccatttctaccactccgaggagacgatcgccggccaccctgagttcatcaaccgcgctcttccttccctcgacgcgcgcctcggcatcgccaaggacgccgtgccggagctggccatggccgccgcggcgagggcgatcgccgagtggggccgccccgccgcggacgtcacccacctcgtcgtctccaccaacgccggcgcccacgcgcccggcgccgacgcgcggctcgcggcgctcctcggcctccgcgccaccgtgcagcgcgccgtcctctacatgcacggctgcaacgccggctgcaccgcgctccgcctcgccaaggacatcgccgagaacaaccgcggcgcgcgcgtgctcgtggcgtgcgcggaggtgacgctcccgctgttcgcggccccctacgaggcgcgcctcgacgcgctcgtcgccatggcactgttcggcgacggcgccggcgccgccgtcgtgggcgcggacccgacgacccccgtcgaacacccgatcttccacgtggtgtcggcgtcgcaggcgaccattccggggaccgaggagggagtctccctgctgctgggcgagcgcggcctcgactgcaggatctccggcgaggtggcggcgctggtgcgcggcggcgtcgagcggtgcctgctcgacgcgctgacgccgctcggcctcggcgccggcgccggcgggtggaaccacctcttctgggcgatgcacccgggcgggcgcgcgatcttggacgcctacgaggcggctctccggctggagcccgggaagctggcggcgagccggcgggtgctgagcgagtacggcaacatgagctgcgcggcgatcatcttcgtcctcgatgagctgcgacgccggtgccggcgggatggtggggaagaagaggaggagtcggacgagtactgcgagtggggagctatggttgggctcgggccggggctcaccattgagacgatcgtgctgcgtgccaccggcggcggccatgtcgacgacgaaggcaagaagtccattgcggcctaa

SEQ ID NO: 34761 - DNA, 444 bp, Oryza sativa
  Clone ID: PAT_MRT4530_38745C.1
atggtcacctgtgaggccgcttctttatcaatcctatcagccaatgaagatggaaaatttaagggacgcattgcaaaaggttccaagtactcccactcaacccctggtggcgggggaggtggtagaggagtcgagcagctgtcagtgtcgtcgtcgtcgtctgtagaatcatcctcatcaagttcaccgtctctctttttcctccttatcactattggactaaacggtagcggtggtggagggcgtggtgagggtggcaatgaggatgtcatcgagtacggtggcactgaggatgtcactgagtatgcaggaggtactggcaccggtggtggcggtggaggtggaggtggaggtggtggtggtaggcggtttgtgcagccgcaagctcaactcggcgccgcattagctgcttcatcagcttcctcctatccttgcacctcctga

SEQ ID NO: 34762 - DNA, 366 bp, Oryza sativa
  Clone ID: PAT_MRT4530_38746C.1
gtttaatcaagccaagagtagggctctaggtgatgacaattcatcaatggttagctgggtgacaaaggactcagacacttcagcgatggcctggaggagtaagaagtcgctggcaggaattgccaaggagattgatgaatacttcttgaaagcagcggcgagtgggagtgacatcgtcatacttttggactcttctggtgggcagccagatccctcagagttagaggcaaacagaggtgcaggaaaaaattccaaatccgccaaggttttttccacaattttcttggagctgtgcattcaaatctgcgcaagctaatagacaatcctcaatgcattcaagggaagcctctggatatggttaccatg

SEQ ID NO: 34763 - DNA, 449 bp, Oryza sativa
  Clone ID: PAT_MRT4530_38747C.1
aactaagaccattttgaatcaaggacaaaaacatttttttttacttacggatacacagtaaaacaccgtttacttaaactatacatcccttggcctgcctgattatgtaattaattcacccactgttttaattatcactggcaatacacacccactgacacacattctttctctcttataaagcagccatgctcatcacgttcgcattgaccaacccacagtttccatccaaccttaaccatgaaagggtctctgaactattataacctcgatattatggcgccactgttcccctaagttgctaggaaggttctcctcaggggcaacaccccttttttttgaccgaaacctgcaccctcccacagaagatattccagttccttcaccaatcttgatgtccttgaaaacatactcctctaacccaacccttttctttgaaaatataactt

SEQ ID NO: 34764 - DNA, 501 bp, Oryza sativa
  Clone ID: PAT_MRT4530_38748C.1
gtggctcaaaggggagatcgctttccgcacctgttgttgtccatccaagtcagaaaattgttcaaactttctttcctggatcttatgaactgtgtgactgtataagactggtatttgctccagaaatttgtgactagcttcgttgcactgtttgttgaagcgttggccatgcagcctcctcgtcattactgtatccatttacaagaaaatcagcgcagttcctccggcatcctcgactgtaaggattcctgaagcgtccgtcaggcccccgaagatatgcatagcgtgactggtttgctgcttcattagttgtgagattgcgtgctatctgtgttgcttgtgctcctgtcagaataagcgctccagtcaataaaaagacatccatgaacatgaacagtacagcaccaggatggtttgacagcatgaagttaatccatgactcagaagatgagagtataatgggctctgtccaaagtctgtggaacccaacccacgcgtccg

SEQ ID NO: 34765 - DNA, 2476 bp, Oryza sativa
  Clone ID: PAT_MRT4530_38749C.1
cagtactctgatattggaattttattgttgtgaaatagaaaatagtttcatataatgagaattgagaagttgagaacatgcagcaacagactactgttcaactgttcaagtatctagttacacatgaatcatttcccagtaacctcatagacatccacctcttcccaaatcgagactatgttgatctattcaaaagactactatgcctgtactgacttaaaatcgtcgctaaattctttccctttttaagttttggaagagaagtgtattcacgtagaaccagtttctttgcctacttacaatgaacaatcacaacgaaccatgccggatgcagtcacgaagaaatggcaggtgaaactgctcccgagtggctggcgacaatctcactgcatctactgataccttcgaacgcctgcacgcatactccggaaaaccccatcagagcatggaacacatttggaaggctcgtctgaagattgttcagtgtcatggctcgactagtcctcacggagttcagatacctagccttctcctcttcaacctgctttttgaacgtgtccagctttgcaagtgtaggctggcccgaattttgggttgcattgttgctgtgtttctctaactgggtatggaacttgctctcgatttggtcggactttttcttcagttgacgctcctcagtctgctgtacaactatagtgtgtataactgacagaaaagtctttattgcttctgcagctaccttctcaggtaatcctgtaagagctcgctggagttctgcacagagactacgaattcctgacgaacttttcataaagccatcgttatcaggcaggcaatcagtgagtttaatccactggttaaggatggttacgtagtcacgctgtaaggtgatgagattgcagaatgaactatgccatgcagaaacttcaacttccagctgagatgttgcctgacaatgagtgtcagttgttggttcattccctggtaaattgcctagaagattggcttgctgggcaatgtggttctgaacctgatggcactcatacatgtttctccacatatgcacaagccctgcagataattcaataatctgaggatataactcctcatctctgagctttgatatggacaaacatgtcaaaccaacagcttcctccaaagagattatccgagcttgcaattcctctatattatctcgcactttctctgcatgcaatttatcatggtcacctgattctagtctttgtagcaacgaggtgttctttctgtactggagccttgcaaattcttcatccttgactaacttgtagagtttttgctcctcttcataaagtttctctagtgttttgccatggtaaccatatccagaggcatcacttgaatgcattgaggattgtctattagcttgcgcagatttgaatgaccagctccaagaaattgtggaaaaaaccttggcggatttggaattttttcctgcacctaggacaaccaatgttattctctggaagtgattgcttgcgaataaacacttttcttgtcctttcgtacttaactttactctgtttgcctctaactctgagggatctggctgcccaccagaagagtccaaaagtatgacgatgtcactcccactcgccgctgctttcaagaagtattcatcaatctccttggcaattcctgccagcgacttcttactcctccaggccatcgctgaagtgtctgagtcctttgtcacccagctaaccattgatgaattgtcatcacctagagccctactcttggcttgattcaactggacactgctcacaatgccttcaacattaccagacacactttcatcgtcatatccatcaaattctgtgttagtctccacccagttatcatcatccatggtcacctgtgaggccgcttctttatcaatcctatcagccaatgaagatggaaaatttaagggacgcattgcaaaaggttccaagtactcccactcaacccctggtggcgggggaggtggtagaggagtcgagcagctgtcagtgtcgtcgtcgtcgtctgtagaatcatcctcatcaagttcaccgtctctctttttcctccttatcactattggactaaacggtagcggtggtggagggcgtggtgagggtggcaatgaggatgtcatcgagtacggtggcactgaggatgtcactgagtatgcaggaggtactggcaccggtggtggcggtggaggtggaggtggaggtggtggtggtgatggatgcactgcaatacctgcagggggctgctgtgacaatgcagactccacctcggcgaattgtcgaagtgtggctcctgtgtttcggagtgactgcaggtaggcggtttgtgcagccgcaagctcaactcggcgccgcattagctgcttcatcagcttcctcctatccttgcacctcctgacggcctcctcatcctccaccttggagtgtgtgcaacccat

SEQ ID NO: 34766 - DNA, 383 bp, Oryza sativa
  Clone ID: PAT_MRT4530_3874C.1
cagagcgtgaaggatggcccatatatatcgccaatcatagacatacgcgaacgccttcgtcagccaccttgcagggataactcagtattccgtgccctgccagttgatgtagtggctaatgcgtatcgcatctcaagggagcatagcccgaagcctcaaggactaccacggggagaagagcacggtgccttcactccctagatttcaaccacgatactacccaggattatcgaatgagtccgaaagcgagacttcagagtaatgtaattgagaactagtatcggcgtagagtaaatataccccaccatagtatgacacttggtggtgattctattcgatacccccccccaatagcctacaatttcttaaaaaaaaaaaaaaaa

SEQ ID NO: 34767 - DNA, 451 bp, Oryza sativa
  unsure (1)..(451): unsure at all n locations
  Clone ID: PAT_MRT4530_38750C.1
ccggccggatcagcaaccaagcaagaagcaattcttgagctcaatcagcaacaacatctatctccttcttgcttagttaagtccttcgccctcccagnaagaagaagatgtcttgctgcggcggactgcggtgcggcgcggctgccgtgcggggggctgcggggatgcaagttccctgatgtggagggcacagccaccaccaagaccttncgtcctccgctgctccatctcaacaaggcgaaggtcctggagggatgggagnnatgtgcggtgggagagaggcgagaacancggctgcggctgcacacctgcaagtgtggcaccagcttgccgcggctgctcctgctgctcctgcaactaatctaatcntcgtcgtcgcccggctgcatgaggattttccgtatggatgctgctactggcgatcaaagctttgatcgaggctttatttgct

SEQ ID NO: 34768 - DNA, 2353 bp, Oryza sativa
  Clone ID: PAT_MRT4530_38751C.1
ttttttttttttttttttttgtcaaacgaaagttgaattgtaagaacaggtgaaaatttctcagggtatttgtctacttgcacgaaagcatctaatgttacagattattatacatcagaagttcaaacctgcatttctcatctattggcactcgaaatcgaatacaacacgatatgtatggtaatagtgatgtaaccgccaaaaaagaatacatatatagcacatacacataatctacaaaatcaaaccattcccatgactcaaccttgtataaacacctggatgaagcagagtggctcaaaggggagatcgctttccgcacctgttgttgtccatccaagtcagaaaattgttcaaaccttctctcctggatcttatgaactgtgtgactgtataagactggtatttgctccagaaatttgtgactagcttcgttgcactgtttgttgaagcgttggccatgcagcctcctcgtcattactgtatccatttacaagaaaatcagcgcagttcctccggcatcctcgactgtaaggattcctgaagcgtccgtcaggcccccgaagatatgcatagcgtgactggtttgctgcttcattagttgtgagattgcgtgctatcatttgctcttccaagaacttacgccataggggagtaatagaaacatagaatactttaagctgtgttgcttgtgctcctgtcagaataagcgctccagtcaataaaaagacatccatgaacatgaacagtacagcaccaggatggtttgacagcatgaagttaatccatgactcagaagatgagagtataatgggctctgtccaaagtctgtggaacccaatcgcagcgcccagaaatgctgtagttgttcccatacaaaggaacacaaaaaagtcccacttatttctccttccaacacaatttgatatccaaggacagtgatggtcaaactgctcaacacagtgcttacaagttggacaatgtttggagcgcattgggcgaattatcttgcatgtggggcataactgagaccaattgcctgtccaagcagaagaattaaggtcaatctccataagtggttcctttggatcaagtcgcttggtattggcttggatgtagcctggattttttctgcttactctgtagaacatcaccaatgaagcaaaggcaagagaaatagcaccccatgaccaaataccaacagcggcagttattctagaaaaattcggtgcaaaaataattgagttcagaaaaagggtgataaggacaataagaaagcaaaacaggatagaagcatatccaatcttccgcgatctccctgagcagtacttgtcttcaaatgttacttttgtagcattggaaaggatataggaaagatgccgatgacctttgtcgtttgcaagttccacaggagtaaacccaccgctatccttcaatgtgagttcctccttggtaccagcatgtacaagaacagtgcacacctcataatttcctcttattgctgcccagtgtaatggagtacaaccatttttgtcttgccttacttgattagcatccataaacagcagtaacctaattgtatcagcatttcctttgtaggcagcccagtgcaatggactcctcccatcattgtccaaacactcaaagtctgcaccgtactttgagataatgtggtgcaagaatgctgtttgtccatactgagctgcaacatgaactgcccggtagccattcacatcggccgcctcgaccctcgcaccgttctccagcaacacgtccgccgcagctatggctccacgcaccgccgcccagtgcagggccgtctgctgcgcattgtccccggcgttgacgtcgcctccatgctcgatgatgtagagcgcgacgtgggggtagttgttgagcgtggcccactggagcgcgtggtagccgttgccgtcgggcgccgcgagcgacgcgccgccgtcccgctccacgaacccgcgcagacgctccaggtccccgtacgccgcggcggagtacacgtccaccacggggtccccctccccgccgttcgcccgcgcctccctcacctccaccaccccctgcttcacccctccacctccgccgccgccgccgccgtcgccgaccacctcgatctccgccatcccgcgcctccctcacctccaccaccccctgcttcacccctccacctccgccgccgccgccgccgtcgccgaccacctcgatctccgccatcgaggcgaagctaggttttcctctctctctctctctctctctttctctctctgttttttttttttttttttgcgcgcgcgagggggaggaggtgaggttggctaggtcaagatcctcgtgc

SEQ ID NO: 34769 - DNA, 6046 bp, Oryza sativa
  Clone ID: PAT_MRT4530_38752C.1
tctgactcctcctcgtcagtttgcccgccgcggcgccgccgccgccgccgccgatccccatccatcccgcgagcgagcagggcgccgtcgttcgtcctgctgcatccgccgcatcgctgtaaacatgaaccctttaaagaggtcattggaatcatcttctcaggaacatgaagcaggcaaacagaaactgcagaagagagagtgtcaagatttcactcccagaagatatcagcttgatgtctatgaggttgcaatgcggagaaacacgattgcgatgcttgacacaggagccgggaagacaatgattgctgtgatgcttatcaaggagttcggaaagataaacaggacaaagagtgctggaaaagtcatcatatttcttgcaccaacagttcaacttgttacacagcaatgcgaggtgattgaaatccacacagattttttggtaaaacaacactatggtgcaaagggggttgatcaatggacaggttatggtcatgacaccacaggtgttcctacaagctttacgcaatgctttcttaatcttggacatggtatctcttctcatttggattgtgaaggtcagttctgtgaattggagaacctgttagatgctaagatctacacagtttcagatagagaagagatagagttttgtgttccttctgcaaaagaaatgtgcaggtactatgactcgaaaccagtttgttttgaagatttgagtgaagaattgggagttttatgttccaagtatgatgcattgataacagagttgcagaataagcgaagcgacatgtataaagatgctgatgatataacaaaagaatcaaagagacgcctttctaaatctatagcaaaaatttgctactgccttgatgatgttggtcttatttgtgcaagtgaggccacaaaaatctgcattgaaaggggccaggagaaaggttggctgaaggaagtagttgatgccacagatcagcaaactgatgcaaatggatcacgcctatttgcagaaaattcagcgcttcatatgaagttctttgaggaagccttgcatttaattgacaaacgcctccaacaaggtatcgacatgcttctaaactcagaaagtggatgtgttgaagcagcaaagacgggctatatttccccaaagctctatgaactcatccagatctttcactcttttagtaactctcgtcatgctcgatgcctcatttttgttgatcgaaagatcactgctagagtcattgaccggatgattaagaaaattggccaccttgcacatttcacagtttcttttcttactggagggagatcttcggtggatgctctgacacccaaaatgcagaaggatacattggattcatttcgctctggaaaggtgaacttactatttactacagatgttgctgaagagggtatccatgtcccagaatgctcttgtgtaatacgatttgatttgccaaggacaacacgtagctatgtgcagtcacgtggacgagcacgccaggaagactctcagtacattctcatgattgaacgggggaacgtgaagcaaaatgatttgatatctgcaattgtgagaagtgagacttcaatggttaagattgcttcaagcagagagtctggaaatctgtcgcctggttttgttcccaatgaagaaataaacgaataccatgtaggcacaacaggagcgaaagtaactgctgattcaagcatcagtattgtctaccgatactgtgagaagcttccgcaggataagtgctactccccaaaacctacatttgagttcactcatcatgatgatggatatgtgtgtacattagcattaccaccaagtgctgtgcttcaaattctggtgggcccaaaagcaagaaacatgcacaaagcaaaacagctcgtttgccttgatgcatgtaagaagttgcatgagctaggagcacttgatgaccacctttgtctatctgttgaagatccagttccagaaattgtaagcaaaaataagggtactggtataggtacaaccaaacggaaggagctacatggtacaacaagaattcatgcttggtctggcaattgggtgtcaaagaaaactgcactcaagcttcaaagctacaaaatgaattttgtttgtgaccaagctggtcagatttactctgaatttgttctgttaattgatgcaactttaccggatgaagtcgctactttggagattgacctatatttgcacgacaagatggtcaaaacttcagtttcttcttgtggacttcttgagttggatgctcaacagatggaacaagcaaagttgtttcaagggcttctcttcaatggtttgtttggaaagctgtttactagatcaaaagtacctaatgctccgagggaattcattcttaataaagaggatacatttgtgtggaacactgcgagtgtatatttgcttttaccaacaaatccttcttttgactccaacgtttgtattaattggagtgtcattgatgcggcagctacggcagttaaacttatgagaaggatttattctgagaataaaagagaattacttggaatatttgattctgaccaaaatgttggagatttaattcatttagctaacaagtcgtgtaaggctaacagcctcaaagatatggtagttctagcagttcacactgggaagatatatactgctcttgatattactgaattatctggcgatagcgcttttgatggtgcatctgataagaaagaatgtaaattccggacattcgcagaatatttcaaaaagaagtatggcatagtacttcgccacccctcacagccactactagttttgaagcctagtcataatcctcacaaccttctttcctcgaagttcagggatgaaggtaatgttgtggagaatatgagtaatggcacaccagttgtaaataaaacaagcaaccgtgtccacatgcctcctgagttgctgattccccttgatttacctgtggaaattttgagatcattctatttgtttccggctttgatgtatcggattgagtcattaacgttagctagtcaactaagaagtgaaattggatacagcgattctaatatatcaagtttcctgattctggaagctattacaacgcttaggtgctctgaggatttctctatggagcgtctagaattattgggagactctgtattgaagtatgcagatgaggggcagctatcatccataaggtgccatatgatttgtaatgccacactttataagcttggaattgaacgcaatgtacagggttacgtacgtgatgctgcatttgatcctcgtcgatggctagcaccaggacagctctctattcgtccatctccttgtgaatgccctgtaaaatctgaggttgtaactgacgatattcatatcattgatgacaaggctattgttctaggcaaggcgtgtgacaagggacacagatggatgtgttccaaaaccattgctgattgtgttgaggctattattggggcatattatgcagggggtggtttaagagcagccatggcagttctcaaatggttgggcatcggggctgaaattgaagaagacttgattgtgcaggccatattgagtgcttctgtgcagacttatcttccaaaagacaatgtatttgaaatgcttgaagcaaaactaggctattctttctcggtgaaaggtcttttggtagaggctctgactcacccatcacagcaggagttaggtgcaaaatactgctacgagcgcctagagttcctcggtgatgcggtcttagacattctgttaacaagatatcttttcaatagtcataaagacactaatgagggggagttgacagacttacgttctgcatcagtcaataatgaaaactttgcacaagttgcagtaaagcacaacttccatcactttctccagcattcttctgggcttctgttagaccaaattactgaatatgtgaataggttggaaggttcatccatggacaaagttgaactgttatcagatggactcccaaaagggcctaaagtccttggtgatattgtagaaagtattgcaggtgcaattcttttagacaccaaacttgatttggatgtagtctggggtatttttgaaccccttctttccccaattgtcacacctgagaatctggagttacctccatacagagagcttatcgaatggtgtggcaaacatgggtattttgtaggaattaactgtagagatcaaggagacacagtagtggctactcttgatgtacagctcaaagaggtgcttcttgtgaggcaaggttttagcaagaaaagaaaagatgcgaaagcgcatgcatcttccttactgctcaaagatctcgaggaaaaaggactaataatcccaaagaatgcaagcaagacagaacaatttgaaaagcattgtggcagcactaatcccttcaacaatttgcatgtcgatgcaatggatacacagactccaaaaccaaccaaggaaaaaaacgcagctgattcaaggaacatttctgatcccctgcttggtaaaccattgcacgtgattgtgaaaacgagtaaaggaggaccacgcattgcattatatgagttgtgtaaaaagttgcaatggccaatgcctacaatggaatctgagaaagtacaaccaagctttagcagcgtgtgctcctcccctggtggttcctctcagaaagctaccccccaagcgttcgctttcgcttcaaccattacattgcatataccaaatgctgatgtgatcagcctcacaggagatggccgtgcagataagaagagctcacaggattctgctgccctgttcttgctctatgagcttcagcggcgaggtattgaagtgaagccaggaaaggctgtttcatttaacgttgatgatgagtgtgtgattcacatatcacaggttgcactgggagaaacaaagaaggcaggaagtgagaatgtagttgtatctgttaaagttgatggcaagaagacagttattggaaatctatcggctaaaaatcatcctcaatttatgtgtgatttgtttattggcaatgactttgagctttcacacagttcaaagactactagtgtcttcctgtgtgatgaagatgaaaacatgtctgacatctgtgacattatgggtaaacatctgggaaggcctgttgcagaggaaggtaaaaaggataattctgatgatggtatggacttgtcctcatctgatgatgatgatgattctttggactcgtcctcatccgatgatgatgatgatgagtcaggtgatgaggatgatggatctgatgagttaccagcagaaatggagtccagtgaagaagaggatgggagtgatgggcaggatgaatcatcttcatcgatggtgtccactgatgaagaggatgaaagtgatgaggaagatgaaattccagagaaacctgagagcagcaagctgacagctgctggatctacactttcttctggtaagaagtcaaagactgcaacacactttggccagaaaacaggggactcaactttagctaatttttcgcatttactaaaggtgataagaatactcatccagcaaaggaagatggcaagacgccggcaatcagcaaaccaaataaggagactcccgaatcctccggcacccatgcctgcaagtattgcagcaaggcatttagtagtgataaatcactccggtctcatcagaaggcaagacatccagccaagtgaactactggtggcatgtttgactgcagctgcttttgcttcaaagatgatcctctaaccagttgcttgccaccactcagctttgtacatcttctccagtgttcaccttctgaattatgataagagggtacccaaagaatggagaacagctggcctggttctggtgtgtgtcagttgttatgtgtgtttgtccatatgttatctgcgtagaaactgaataagcccccaaagttgttgctgacgataaacacgcaaatatcatgcccctgtagcctgtaggtgttaaaccaattgttcaaggataaaaagaaagacccttttc

SEQ ID NO: 34770 - DNA, 559 bp, Oryza sativa
  unsure (1)..(559): unsure at all n locations
  Clone ID: PAT_MRT4530_38753C.1
ggaagatatatactgctcttgatattactgaattatctggcgatagcgcttttgatggtgcatctgataagaaagaatgtaaattccggacattcgcagaatatttcaaaaagaagtgtgtatagttttgtgcatgtccatgtgcttgctcaggtataatcttgctttttttgtctaatatattcgtttacaggtatggcatagtacttcgccacccctcacagccactactagttttgaagcctagtcataatcctcacaaccttctttcctcgaagttcagggatgaaggtaatgttgtggagaatatgagtaatggcacaccagttgtaaataaaacaagcaaccgtgtccacatgcctcctgagttgctgattccccttgatttacctgtggaaattttgagatcattctatttgtttccggctttgatgtatcggattgagtcattaacgttagctagtcaactaagaagtgaaattggatacagcgattctaatatatcaagtttcctgattctgnaagctattacaacgcttaggtgctctgaggatttctc

SEQ ID NO: 34771 - DNA, 427 bp, Oryza sativa
  Clone ID: PAT_MRT4530_38754C.1
aaaaaaagtccggtatgtttatgtaataatagaacaaggaaacatgatttgaaaatggtctctctttttatccttgaacaattggtttaacacctacaggctacaggggcatgatatttgcgtgtttatcgtcagcaacaactttgggggcttattcagtttctacgcagataacatatggacaaacacacataacaactgacacacaccagaaccaggtcagctgttctccattctttgggtaccctcttatcataattcagaaggtgaacactggagaagatgtacaaagctgagtggtggcaagcaactggttggtctattattccaacttccaagcaactggttggcaagcaatcagttgtcgttccttcacacctcctggagttgcaaagtacctcgccgttgaagctcattgagcaagaac

SEQ ID NO: 34772 - DNA, 1139 bp, Oryza sativa
  Clone ID: PAT_MRT4530_38755C.1
gtccggaatcccgggtcgaccacgcgtccgccacaacctgaccttctcaggcgtgatcagcatggccaaggagcacgacgtcagcacgaggcccgtcatcgagatcgccttcaaggaccttacgctgacgctgaaggggagcaagaagaagctcttgaggtccgtgacagggaagctcaggcctggccgtgtggccgccgtgatgggcccatctggcgcggggaagaccacgtttctcagcgccattgccgggaaggcgactggctgcgagacgtcaggcatggtgctcatcaatgggaaggtagaacccatccgcgcgtataagaggatcattggctttgtcccccaggatgatatcgttcatggaaacctcaccgtccaagatatactattggagggagagggcctccgggatgagctctctcgcctacttcatgtccaaggacaccatagaccacctcaacaccatcgtcaagcccatagtctacctctctatgttctacttcttcaacaaccccaggtcatccatctgggagaactacgtcattcttgttgccctcgtctactgcgtcactggcatcggctacactttcgccatcttctttcagccaggctctgcacagttgtggtctgcgctgcttccggtcgttttgactctgatagcaactcagcggaagaacactttctttgctgacctgtgctacacaaagtgggctctagaagggtttgtgatggcaaatgctcaaaactactccggggtgtggctgattacacggtgcggttcgctggtcaagagcggctatgacatcaacgacaaggctctttgcatagtggttcttattgccaatggtatagttttccgctgcgtggcattcttctgcatggtgaccttccagaagcactagaatcgtccatgacaagagaaaaacaaccccataattctccttctttgtctatccatgtagctgatacgttcattcattgatttatgtgcaatagaaatgtacattataacctcttctgtcgggcgccaggtgtagatgagagcagactcttcaatagtagtaaaaaactgatcaggattcatgaataccctaaatctctatctattataaaaattgaaaatgtttttgctgtat

SEQ ID NO: 34773 - DNA, 258 bp, Oryza sativa
  Clone ID: PAT_MRT4530_38756C.1
atggcagcggtggacgcgacggcaccctcagtggtgaaggtggatgttattgcaagaaaaaagaagaactggatctggatcttgaggaaaaatgaaggaagaaagaggaaggtgaaggtggctcaaggatcaggggaaaggactagtgttgatgggatgtgggagggaagaggcgccgccacccgccgcgtccgccagcaccgtcgcggcggcggcggcaaggcgcggagtgtgaggagggagcgcaggttaccatga

SEQ ID NO: 34774 - DNA, 103 bp, Oryza sativa
  Clone ID: PAT_MRT4530_38757C.1
aataaaagcatacataattttaatacattcgtttaatggaatataaattgcatgtttgaacaatagaaaatcaatcttagtgtatgaaggtgaacagatgctc

SEQ ID NO: 34775 - DNA, 371 bp, Oryza sativa
  Clone ID: PAT_MRT4530_38758C.1
gggggaacagagggtttttataaatacaccttatttttagtttcaaacaagatcatcaagaattagtggttgctcaaaagccaacaaataggctccgagggcatcccagtagcaatcacctagctggggggttctactatattggttatcaacgacctttgccgatgatttattttgttctccaaagctatgccagcacgatcaggactttagctgctgttggggcaactgtcgttgcttggaatggcaagcagcgtctggggaaggttactgacctttgttgcctaatttgcacgctttgccggtttttgtttttcaataccatgatgatgaagttcagcagtagccttcggtgggttaacttgcctatt

SEQ ID NO: 34776 - DNA, 212 bp, Oryza sativa
  unsure (1)..(212): unsure at all n locations
  Clone ID: PAT_MRT4530_38759C.1
cccaaatgtaaaacattgtccaatgacggagggtatttattcaaatggagccatgcaacgacacaaactatgtagatcccatcattggaccagactatcgagcgggccctgaagcgtattggaggggggttagtaataagtgccccagctgcatatgcatatgnacggcccgagtgtggtttaaccaaacacaggcaacattacatacttca

SEQ ID NO: 34777 - DNA, 347 bp, Oryza sativa
  Clone ID: PAT_MRT4530_3875C.1
acgctaacgccttcgtcagccaccattgcagggataaaaactcagtattccagtgccctgccagttgtatgtagtggctatatgcgtatcgcatctcaagggagcaagcccagaagcactcaagaacaacaggggagaagagcacaggtgccttcactcctagatttcaaacaaacaatactacccaggattatcgaatgagtccagaaagcgagacttcagagtaatgtaattgagaactagtatcggcgtagagtaaataacaccacaagtatgacacttggtggtgattctattcgatatcagtactaaataaaggttacaaatttcttaaaaaaaaaaaaaaa

SEQ ID NO: 34778 - DNA, 975 bp, Oryza sativa
  Clone ID: PAT_MRT4530_38760C.1
atggaccacgccgccgaccacctcgacccggcggcgccgccgtccgggcccgcctcctcgtccgccgccgtcgccgaggtcaacgcgtggttggcctccctcgcggcggaggccggaggggccgggggaggcggggtcggggctccgggagggcgcggcggcgtcgtcggcgtcggcggtggtggggcggcaccggagctctcgctggggcccgagcccacgccgcgcggggtggcctacctccgcgcgctggcggccgcgtcgcaggcgaggtcccgcgcggcggggatcgcggccgcggggctgcgcgcgcaggccgcggagtaccgcgccgaggcggcgcgcctgcgggaggcgctggagcgggcagggctcgcgcgggacgcgctctcgccgcccgcggccgtgtccgcgcgcgccgtggccgccgtcgccaacctcctcgccatccgcgacacggagatgagcaggtggagggggctaggctttgttgtggccagtgcggacctgtcgctgaggagagcagaggtggaggagaagagggacaaggtgcataaggaatcaaaggcgcttcttgattacacaaggaaggccatcaccaagcttactgagctcaagaagatgctggaaaaatttaaaaatgatgtggagaagcaacaagcagaacagatgacggattggcagacaaagttggttatgatggactcaaaggaacgccaatatatactccaagtctccaattataaggcaatgctcaaccgagtgggatatacaccggagatcaatcatggtgtgctgatggaaatggcagagcataagaaggatctagagagaaagactaaacccattgcagacacattgagaagctaccaggacttgccaccactactgagctaccatgtcatcgacaaccaggatgcctctgaacatcttggcctgtttgctgtatatcattttgcattgatgtctatgtga

SEQ ID NO: 34779 - DNA, 387 bp, Oryza sativa
  Clone ID: PAT_MRT4530_38761C.1
gtgtgcataatatttccattgctgtcaaagaaaccagttcttttctacagtaacttaaagcaattctccctccactcgccgctcagaacagacgacctattgcacggaacaccccttgtacatttttcacccttccatggataaataagggaaattacttggaaacctaatgcccatgaattttatattttactgctgctagctcctatagtccctctggtgtgataatttaacagttccaacacagcattctcaccctgtgcttttcaattaactgtatggaacaagggtaaaggaacaaccatagttctcttaaaaaaataaaaagctccagatatgaggattagcttctaatgataaaatctgagagaagcaacaaaagaaagg

SEQ ID NO: 34780 - DNA, 311 bp, Oryza sativa
  Clone ID: PAT_MRT4530_38762C.1
acggcgcgccggttaatagcggcggtctgcctccgccgccgctatctcgcctccgtcgacagatgggtaaggtgccgtttgctcccggtatatgcgagaccaagcctcggcgtcgcccataccgccgccatgacgccatctgttattgctaccgtgtcacgatccggtcgaatctataagcccgatagtacttcaatggtatcgtcttctcaagtccctcacaccacctccgtttcccacattattagtacaatttccatcctgagcctcccctgcattggtaataatccctttgcttagctttcttccct

SEQ ID NO: 34781 - DNA, 863 bp, Oryza sativa
  unsure (1)..(863): unsure at all n locations
  Clone ID: PAT_MRT4530_38763C.1
aaaggcttggtatgaaatgcaagatcttcatgttaccgagactcttctcagaatggtagctctttcagaagcttacatgcaaatatacgagcagcccgaatgagtgatgattggtgatcatcatgtagcacctggcataccgacctttctttggtggcttctctcagattttatcattagaagctaatcgtcatgtctggagctttttttttttagagaactatggttgttcctttacccttgttccatacagttaattgaaaagcacagggtgagaatgctgtgttagaactgttagattatcacaccggagggactataggagctagcagcagtaaaatataaaattcatgggcattttatttcccagagctttgattgaccggttgtttaaagcagaagacacttcggtttccaagtattttcccttatttatccatggactataggagctagcagcagtaaaatataaaattcatgggcattttatttcccagagctttgattgaccggttgtttaaagcagaagacacttcggtttccaagtattttcccttatttatccatggaagggtgaaaatgtacaaggggtgttccgtgcaatgggaggcctgttctgtgcgacgagtggagggagaattgctttaagtggtactgtagaaaagaactggtttctttgacagcaatggaaatattatgcacacaaagtatacttaggtatacttttaatgaggttttagtgaagttgaggacacttgcaataaaatttaatgaattgacagcaaaatgctatgtcggggatgtatttttaagaggttgtttggttggtgattaaaaaaaacaaaanananannatcgcnccc

SEQ ID NO: 34782 - DNA, 442 bp, Oryza sativa
  Clone ID: PAT_MRT4530_38764C.1
gcttctagctgctgcagcttctcccataatcagaagctcccccaaacagtccagcttttggtccagattctgagaagctgtagttgtaaaatccaggaaatgaactagaagccagaagctggaaaacccagcttttccagattctgagaagctggctaccaaccagctgcttctcagaatcttaagctcccccaaactctggctatagttggacttgaaaacacgggctctggcctctggcaataaaacagtctgtagaaacttttgaagattctcaagaagttatgagaagtggggaaggtgatattgcacaattatgtaaaatttgaaacgcggatttgatttcatctgtaagataaaaaaaattccttgcctcgccagagaaaatgagtttgatcttgaattttgtatggttatataatatcacctcctctactatgag

SEQ ID NO: 34783 - DNA, 1800 bp, Oryza sativa
  Clone ID: PAT_MRT4530_38765C.1
atggcaaagcttctgatagagatagcaggatcaatgggacctgcttttaggaatgctccacacatcggacgagaaatggaaaaatctcacctcattcaacttgtttctcagaactgcgagaatcatcatattatctccatatggggaatgattggtattggcaaaacctccttcattaggagtgtctatgaaagcaaagagatcactagcatgtttgagcagtatgcctgggtcactatattgcatccttttaaccttcatgattttgttacgagcttagcccaggaattagatgcacacgattttagtcttcttggaaatggtgtgcagaagagtgaagaatcaatcaaggcttcgaagagaagatgcccccttgtcctcgatgatgtattatctattgaagaatggagcttgatacaaccacatttgcctaatgagacaaacacaaagatcatagtcaccacaagagaagcaagtattgctgagcattgctcggtgacatacaaaaacatatataagctggaaggtcttaaagaagatgcggcacttgcactcttcaagaacaaggtatttgtagatagttcgaatactgatttggatcttgacatgtctactcaagcaaagctcattataaaggagtgtgacggtcatccccttgcaataaccaatattgctggtttcttggcaagaaagcaaaaaacagcttcggaatggaaaaagttgaatgatgattttagttctgggtcatatctcaaaatccaaggaagaaaagttagctctaataacgaaggtacaatacgccatttatctataatcgacgtatgtgagacaaacaagaatgcattgaagcagtgtgctgatctgacccatgtaagatcagtgactgtatttggggagtggagatcatccttagattttagcatgatgaggatgcttcggattcttgatttggagggcacatcgggtttgaaagatgatgacctggatcaaattggcatttttcttcacctcagttacctttctttgagaggatgtgccgatatctataaactgccaaattcattgggcaacttgtgggacatccaggtgttagatgtcagtggtacacgtatcatcaagctaccaaagaccatcaccaagctgaagaagctccaatacctttgtgccggcaatgtaccaaaggatgatgccacctcttctatagagttgaaagaatcaagtgatctttcaaaaatggtgcatgaggcaattgatgatctagaaatgccagattttgtagccaaatcagttcaacttggcacgacggcattggacatgacagcagcttattgcagaaaaaaaatgcaaaatactgacaatgtaaagatgcgtgacatataccacgaatattgcaaggtcaagtttcctagtattctacatggacttgacatgtatggtgttgaagctcctgaagggatcgaccaactgaatgacctgcacacacttggtgttgttaatgttgcagccgagaaagccatattacatgatcttgaaaaacttaaaaaactacataagttaggattgacgggggtcaataagaaaaatagccaagctgttctatctgccattgcaaaccttgtcctcttacactcattatcattgcgatcagagggggaaccaggtttacaaggttgtttggatcacacattcacacctccaagtaagcttcaaagcctcaagatttatggaaatctagttacactgccaacatggatcacccaaattcagaatttgactaagttgaagctacggagcacctag

SEQ ID NO: 34784 - DNA, 2311 bp, Oryza sativa
  Clone ID: PAT_MRT4530_38766C.1
aaatggaaaaatctcatctcatccaacttgtttctcagaacagaacattatctccatatggggaatgattggtattggcaaaacctccttcattaggagtgcctatggaagcgaagaaataactagcatgtttgagcagtgtgcctgggtcactatatcgcatccttttaaccttcatgatttcattacgagcttagcccatgaattaaatgcacacgattttagtgttcttggaaatggcttgcagaagagtgaagaatcaatcaagcattcaaagaggagatgcctccttgtccttgatgatgtattatctattgaagaatggaacttgatacaacctcattttcctaatgaaacaaacacaaagatcatattacacaccacgagagaagcaagtattgctgagcattgctcgatgacatgcaaaaacatatataagctagaaggtcttaaagaagatgcggcatttgcactcttcaagaacaaggtatttgtagatagttcaaatattgatttggatcttgacatgattactcaagcaaaactcatcataaaggagtgtgatggtcatcctcttgcaataaccaatattgctggtttcttggcaagaaagcaaaaaacaactacagaatggaagaagttgaatgataattttacttctgggtcagtgaacaaagaaaatcttgaaatgataagtacaacccttgaaccatcctataataacttgtcctatcatctaaagttatgccttctgtacttatctgtttttcccaaaggccataatattaggcgcaaacgcatagtaagacgttgggttgcagaaggttacataagtaagactcatagcttgagtgcagaagaagttggtgagagctattttgcagagcttatcaatagaagcatcattcaaccatcagaaccagtaccagctcacaatgttggcaatattgaatattgtcgagtacataatcttatgcacaagattagtgtttcaaaatccatggaagaaaatcatggctttgtacttgaagttagctctaataatgaaggtacagtacgacatttatctataatcaacactggtgagacaaacaagaacgcattgaagtgtgttgacctaacccatgtacgatcagtgactatatttggagagtgcagagcatctttagattttagcatgatgaggatgcttcggattcttgatttggagggcacatctggtttgaaagatcgtgacctgagtcaaattggcaattttcttcaccttaggtacctttcattgagaggatgcactgatatctatcatctaccaaattcattgggcaacttgtgggacatccagatgttagatgtcagtggcacaagtatcatcaagctaccaaagaccatcaccaagctaaagaagctccactaccttcgtgccggccatgtaccaaaggatgatgccacctcttctatagagttgaaagaatcaagtgatctttcgaaaatggagcacgagcatgacatattccacaaatattgcaaggtcttgttacctggcattccacagggacttgatatgtatggtgttaaagcacctgaagggattggccaactgaatgacctgcacacacttggtgttgttaacgttgcagccgggaaagtcatattgcgtgagcttgaaaaacttaaaaaactacataagttaggattgacgggtgtcaataagaaaaatagccaagctatcctatctgccattgcaaaccttgccctcttacactcattatcattgcaagcagagggggaaccaggtttacaaggttgtttggatcacacatttgcacctccaagtaagcttcaaagtctcaagatttatggaaatctagttacactaccaatatggatcacccaactccagaatttggctaagttgaagcttaggagcacccagttgaagttggctccttccatggaaatccttgggaagctaccacatttggtcattctacgactgtggaagaattcttttcttcagagcaaaaaaatacttttcgattttcagcagggcactttcccaagccttgtagtgatggagcttaaagatcaagaaggcctcaaatcattaaacttcttgcaaggagcgatgccaaggcttgagttgctgcagataaataattgcatgcacatagacaacaatgggttttttggtgtgtcatctcttccaagcctgaaagaagttatgctcatgggtgaccacaacgaggaactaatgaagaacctgcgtgaccagcttgctctaaatcaaaaccaaccagttctaagggggcat

SEQ ID NO: 34785 - DNA, 2361 bp, Oryza sativa
  Clone ID: PAT_MRT4530_38767C.1
cgagagaggttcgataccagttttcaagcttttaggaatgctccacacatcggacgagaaatggaaaaatctcacctcatccaacttgtttctcaggacggcgagaatcatcacattatctccatatggggaatgattggtgttggcaaaacatccttcattaggagtgtctatgaaagcgaagaaatcactagcatgtttgagcagtgtgcctgggtcactgtatcacatccttttaaccttcataatttcattacgagcttagcccatgaattagattcaaacgattttagtgttcttggaaatggcttgcagaagaggagatgcctccttgtccttgatgatgtatcatctattgaagaatggagcttgataaaaccacatttgcctagtgaaacaaacacaaagatcatagtcaccacgagagaagcaagtattgctgagcattgctcgatgacatgcaaaaacatatataagctggaaggtcttaaagaagatgcggcacttgcactcttcaagaacaaggcatatggttcaaatattgatttggatcttgacatgactactcaagcaaaactcatcataaaggagtgtgatggccatccccttgcaataaccaatattgttggtttcttggcaagaaagcaaaaaacagctacggaatggaagaagttgaatgatgattttagttcagggtcagtgagcaaagaaaatcttgaaatgataagtacaggccttgaaccatcctatgatgacttctcctatcatctaaagttatgccttctgtacttatctgtttttcccaaaggccataatattaggcgcaaacgcatagtaagacgttgagctgcagaaggttatataagtaagactcatagcttgagtgcagaagaagttggtgagagctattttgcagagcttatcaatagaagcatcattcaaccatcagaaccaatacctcacaatgctggcaatattgaatattgtcgagtacataatcttatgcacaagattagtgtttcaaaatccatggaagaaaatcatggctttgtacttgaagttagctctaataatgaaggtatagtacgaaatttatctataatcaacgttggtgagacaaacaagaacgtattgaagtgtgttgacctaacccatgtacgattagtgactatatttggagagtggagagcatctttagattttagaaagatgaggatgcttcggattcttgatttggagggcacatctggtttgaaagatcgtgacctgagtcaaattggcaattttcttcacctcaggtatctttcattaagaggatgtgctgatatctatcatctaccaaattcattgggcaacttgtgggacatccaggtgttagatgtcagcggcacaagtatcatcaagctaccaaagaccatcaccaagctaaagaagctccactaccttcgtgccggcaatataccaaaggatgatgacacctcttctatagagttgaaagaatcatttggcatggaggtattggacaggacaacatcttattgctgcaaggtcttgttacctagtattctacaggaacttgatatgtatggtgttaaagcacctaaagggattggccaactgaatgacctgcacacacttggtgttgttaacgttgtaaccgggaaagtcatattacgtgagcttgaaaaacttaaaaaactacataagttaggattgatgggtatcaataagaaaaatagccaagttgtcctatctgtcattgcaaaccttgccctcttacactcattatcattgcaagcagagggggaaccaggtttacaaggttgtttggatcacacattcgcacctctaagtaagcttcaaagcctcaagatttatggaaatctagttacactgccaacatggatcacccaaattcagaatttgactaagctgaagctacggagcacccagttgaagctggatcttttcttggaagtccttgggaagctaccgcatttggccattttgcgactatggatgaactcttttcagagcaaagaactctgtttcaattttcagcaagggactttcctgagtcttgtagtgatggagctgaaagatcaaggaggcctcaagtcattaaccttcatgcaaggagcgatgccaaggcttgagttgctgcagatcgataattgtatacacattgacgaaaatgggctttctggtgtgtcatctcttccaagcctgagagaagttatgctcaagggtgaccacaacgaagaacaagttatgctcaagggtgactacaacgacaaattattgaagaacctacgtaatcagcttgctctaaatcaaaaccaaccagttctaaagggggca

SEQ ID NO: 34786 - DNA, 1225 bp, Oryza sativa
  Clone ID: PAT_MRT4530_38768C.1
ctgcaggaggcccgcgcgccgcaccaatccgccactcccctccgcggcaacccccccgcgctccgccacagaagccgacgccgacgccgcgcgcgtacatgccgccgctccacgccgtctcccccgcggcggcggccgccccgccgcgcgcgctctcctccgccgcgcgcgtcccgcagcgcccaggttgtgttccagaacgcccaaacattttaagctcctccacaaacttcatgagtctccgtgctggaccaatgcgcttctatagcaggcctcttattcttcaaaactcggacaagagagcagtattgaggcatgccactattgaagaaattgaggcagaaaaatctgtcattgaagaccaagctagagaaaggatggaaaaggcaattgaaacagtccaaaataacttcaatactgtgaggacagggcgggcaaacccagctatgcttgacaggattgaggttgagtattatggaactccagtgaacttgaagagcatcgcacagataaacactccagatgcaacttctctccttattcagccatatgacaaatcctccctcaagctcattgagaaaacaatagttgctgcaaatctgggggttacaccaagcaatgatggagaagtgattcgagtcactgttccaccattgagggcttctcccgcagaaaggaattggcaaaaactgttgctaaattagctgaagaaggcaaggttgctataaggaacataagaagagatgccatcaaagcttacgataagcttgagaaggaaaagaaactttctgaagataacgtgaaggatttgtccgctgatctacaaaaagttactgacgagtacatgaaaaagatcgaagctatccaaaagcagaaggaacaggaactcatgaaaatttagacaccaggttttaatcttgaaattggtgagttcatcttcctgcgaagtagatgaagccgaagaaaacaatgtcctcagctaacacggtgaattatgcggtcacagatttcttgagccttttccatctttctgatggccggcattttgccggatgcatctttttgggctggagtgcaatttcagacaatgttgccgtgtccttcattttcatttttgtaattattgtgtgtactccgtgtaaaagtaggtcttgaccttatccttgttctaccgctacattgtcaatattcctcacgtgaattaaaatgctacagttgtgaattt

SEQ ID NO: 34787 - DNA, 2430 bp, Oryza sativa
  Clone ID: PAT_MRT4530_38769C.1
tcatatccaccagctcacagtttgtgatccactatgactatcctccttgtcattcttgggcttcatctctgcagcctacacctccctgcaatctctgctgcagcagacacgctctctcccggccaatcgatcgccggcgacgacaggctcgtctccagcaacggcaagttcgcgctcggcttcttcaacaccggcagtaagtcctctggaaatgacactctcagctactggtacctaggcatatggttcaacaaagtcccaaacaaaacccatgtttggatagcaaacaggggtagcccggtcacagatgcaacctcatcacatctcacaatctcccccgatggcaacctcgccatcgtaagccgagccgatagctccatcgtttggtctagccaagccaacatcacaagcaacaacaccgttgccgtgctcttggacaccggaaaccttgtactacaaagctcctcaaactcatcacacattttgtgggagagtttcgaccatccgaccgatgttttcctccccagtgcgaagattggtctcaacaagatcaccggcctaaaccgccgtatcttttcgagaagggatctagtagaccaatccccaagtgtgtactctatggagtttggacccaagggtggttaccagttggtatggaactcatcggtagaatactggtctagcggcgaatggaacggccggtacttcagcaggataccggagatggtagtcaagtcaccccattataccccattcattttccaaatcgaatatgtgaacaatgatcaagaggtgtacttcacataccgcatacacgatgaaaccataccactgtacaccgtgctagaagtaactgggcaaagaaaggccttggcctggttaaatgacacacagggttggcaagcagtcttcacccatccaaatgatcagtgtgaagttgctgctacctgtgggcctttcacaatctgcaatgacaacacatttccatcttgtagctgcatggaaggcttctccatagaatcacctgacagctgggaactaggagacagaacaggtgggtgcaggaggaacattccattagattgtgttagcagcagaagtgacacaggcacggcagataagttctatcctatgacttctgttcagcttcctgataaagcccagagcataggagcagctactagtgcagatgaatgtgcagctgcctgcctcagtagctgctcatgtactgcgtattcctacggtgaaggtggctgctctgtttggcatgacaagctgctcaatgtacgacaacaaggtaatggtgttctctaccttcgcctttctgcaaaagaagtactggaaagtaggagaaacaatagatggggggtgatccttggtgcttcaattggtgccagcactgctgctttgggtttgatctttctgctgatgatttggatcagaaaagggaagagatataacctcacaatggataatgttcagggaggcatgggaatcattgcatttagatacgttgatctccagcatgcaactaaaaatttttcggagaagttgggggccggcagttttggttctgtatttaaggggtcgctaagtgactcgactatcatagcagtgaaaaggcttgatggtgctcgccaaggagagaagcaattcagagctgaagtgagttccatagggataatccagcatgtaaacttggttaaactgattgggttttgctgcgaaggtgacaggaggttacttgtttatgaacacatgccaaagagttctcttgatgcccatctcttcccaagcagtggtgcagttttgagttggactattaggtaccaaatagccctcggagttgcaagaggactagcttatttgcattctagttgccgagactgcattatacactgtgatatcaaaccagagaacatacttcttgattcatctttcactcctaaagttgcagactttggaatggcaaagtttctcggaagggatttcagtcatgtcgtaactacaatgagaggaaccataggatatcttgctcctgagtggataagcggaacagctatcacatcaaaagtggacgtttacagctatggaatggttttgttagaaatcatttcaggaagcaggaactccagtaaacaatcttcgcgtgatggcgtgcatgaagcttgtttccccgtgcaagttgcacgcaatcttctgaacagagacattgacagtctggtggatgcaaacttgcatggtgaagtgaaactggagcaggttgaaagagtttgcaaagtcgcatgttggtgtattcaagacaatgagtttgatcgacccacaatgagtgaggtactacagtttctcgagggtctatctgaagttgagacacctccaatgccaagattgcttcatactcttgcaggaggtttagattcgaaaataatg

SEQ ID NO: 34788 - DNA, 942 bp, Oryza sativa
  Clone ID: PAT_MRT4530_3876C.1
atggagagggtagcaacactggtctcttgtatagcggccgcgaccgctatgctgcttgcggtggcagcagccgcagcggggagtggcggcggcggctgcacgcggagctgcggcaacatcagcgtgccgtacccgttcggcgtggaggccgactgctactaccccggcttcaacctcacctgcaaccactcgtaccacccgcccacgctcttcctcgtcgacggcgccggcacgtcccaccaggtgctcgacatctccatctccaactccacggtgcgcatcaacagcagcctcatcgcgttcaccaagtctgccgacaagcaagccgtcatcaacacaacgtgggaggtgagaggcccgtactacctgttggatgatccttccaatatggtcgtcttggtaggctgccaagcgcggttcgacgtccggggaggaagcaacaacaccctgatcagctcctgcaccgtcgtgtgcccatcacctgatcctagcaccacctacatcggagctggcgacggctcctgctcgggcgtcggctgctgccaggcgaacatcgtcctacgctactctcgctacaccgtccagatccacgacctgcaagagcaggatgcgccgtcgtccagtcctacttttaatgatggctcggcgtacatagtagatcagccattcaattacaccggccttatgattttcgaaaaaaatttccctcaagcgctcccagccatgctagactggttcatagtaggtgataattcgacatgcccgatgtcgacgaatgagtctgcgcctgcgcctgcgtccgctgccgagtgtcgcagcgtgcacagcttttacgaaggttactacggtgacgtttctgacgatgtggtggtggggtatcggtgccgctgctctccgggttaccaaggaaatccttacgtaaaagatggatgctacgtatag

SEQ ID NO: 34789 - DNA, 2272 bp, Oryza sativa
  unsure (1)..(2272): unsure at all n locations
  Clone ID: PAT_MRT4530_38770C.1
ncagtgcagcccgatgtccggctgttccaattttctgccgccctccatgcatctgattgcttctcttgccttctcatgtggaactggcactttgacttccccttcgtcaggttcccctaccgaccctgttaggcacagcccacctggccggcatctgagaggtcccgcctcctgtccacctcccaggttgtgccggcgggccgccccgccgcgcccgctggcgcgcgcccgcccctctactttctcctcgtcacgcgggtccgcggggagcggcgggcgcgcaccgccctgcctggccaataggcacctggaggccccaactgtcgccaccgtgaccgtgaacccatcgacgacgaccggcgtcgctgtcgtcccgggtgccgcccccttgcggtggaggtcgagggccggcggcgcggggcccgcgaccgccgcccgcggcagcgccggctgcccgtcgtcgccgccgatgcccggcggcacgccccccagcccgcgcggaacgacgaaagactttatcattaatacggcaaacaagagattgagcaagtagttggagaggaaggagaagaatacggaggccggggcgcccccaacacggaagacgttccaagggaggacaaagtacctcgcccagcgctggcccaagcagaagtggccgtaccagacagttcgctttacaggcgcggcggtcgaagagagagaggatgacttcggggttgaaatcctgtgagctatctgcccagcgcagacagatgttttcagcggcgcggttgatagactcccaagattgttagtagcccaatttgttcagttcaggctagattgcagttaatttcaccaataatacttggatccagcagcaaacagattattatcctctttttacatgtggcagacaaccgaaccaggagaccagtttgcacgaacaaggaccagttagtcctattggcaatttcacctgcacgctgttgagcgactagatcttttaccttccattgcatccttctttttcctacaatctgaacaaagataagggccaacccatggtgtcgatggggcagaacagcaaccacctccattatctgtcactaaatcttcaaaaggtgcttgatccacttggcagattgcacagcgagatggggacgagtttgcttttgatggaaaattcctacccaacctttcatcccctaccaaaaagaagagatctcaacttgttctggtttttctttggagatagtgatggaggtgttgaagaatgatcagatgggatgatatcaacaaccacacaggtggtgtcatctttcagcccacttgtcttcagtgcttgcttcacgacaagctttgcagccagctctgcaggcaatcctcggcatgcctgagcagcagcttctgaggacagtgcatcccaaattccatctgatgcaattattagcctccctccagcatttgatagcttcacttgcttgacatgtggaattggcacaatgaactccccaacgtcagtatccccaatcgatcttgaaaggcacaatccacctggccagcatctgagaggtcccacctcctgtccaccacacaggttgagccggctgacctcccctccactcgcggtgacgcgctcccgctcctctacattctcctcgagacgatggtccacggttagcagcgagatcacaccgccctgcgtgtccaatatgcacctggagtccccaacagacgccaccgtgaccgtgaacccatcgacgacgaccagcgtcgctgtcgtccctgatgcctcccccttgcgttggaagtcgatgtccgtcttcacgaagcccgcgaccagcgcgcgcggcagcgcctgcagccagtcgtcgcggccgatgccctgcggcacggcgctcatcacgtgctccagcaggtgctccttgctgaacaccgccgccgacacgccattgtgtccgtcgaacacctgccaaaccgcagatccaagaacaagaacaaaacccgacacgccatcagcatcacggaatcccgagacgagaccagaaacgcgacacggggggagggcacgtacggcgaagacggagaaggcggaggaagggtcgcccgggacgcggaggcagtcgggcttgacgaggaagtagtcctcgccgcgcttggcgaagccgaagtggccgtaccggacgagcggccgctcggagccgccgccgcggagctcgcggccgatcagggtcgccaggggaagcgacggggcagccttcccctcctccccggcggcgctctccat

SEQ ID NO: 34790 - DNA, 255 bp, Oryza sativa
  Clone ID: PAT_MRT4530_38771C.1
ggaacgggaaaatatttagggggcgcctttcccttttttttgggaaaaagagcacaaatgcccccattgggggaaaaataacggccatgggaaaaattggtaattggggaataagggcttagggccaaactatggttaaaattaaaatccaataaagggggggggaaggccatggacaaagttgggggaactggaaatttttgccaaaggaaagggtgggctcgttgaaaaagggggggggaaaaattggggggg

SEQ ID NO: 34791 - DNA, 2019 bp, Oryza sativa
  Clone ID: PAT_MRT4530_38772C.1
atgccgagaacggcggcgggggtggacgtggaggacctcctcgtccgcgtcaagaacggcgccgacgccgagctcgccgaggtggcgcgggaggtggcggcgctcgcggagcaggggaggctcggggaggacgacgacgaggacggggtcctggtgccggcgctgctcgcgcggctcgccgccgccgggggcgcggaggccagggtccgcgtcatggccgcgctgcggcggctcgcgcgctgcgttggctgcgagagcaaggagaggttagcaagcatcgaggcactttcaagcattgttcgttccttgtctagagatgttgacgagacaagggaagcaattgcattgctattggatttgtcagacatcccgcaagttcggcagaggattggcaggattaaaggcagtatagtaatgctagtcacattaagaaatgcacatgaaccaggtacccatgatgatgcagagaaattgctgcacatgttgtcatccaatccgcaaaatgtgctcctgatggccgaggctggttattttcgaccattgatacattacctgaaagaaggttctgatatgaacaagatcctaatggcaactgctatttctaaaatgttcctctctgagccgatgaaatcttcccttggagaagatggtgcagttgagcctctagtggaaatgtttaaatccggaaatcttgaagccaagcactcggccctaggtgccttacttaatctctctagctctctacaaaatgcagaaattttgataaattctggcataacaggaccactgctccaacttctattctctgtcacgtcagtgttaatgacccttagagagccagcctcagctatacttgcagctattgcacaatctgagcgtatcctgcttcataaggatgtagctcctcaaatgctctcgcttcttaacttatcgagtccagtaattcaacttcacctcctaagggccctaaatagtatttctgggcacacaaatgctaaaagagctagagctaaaattagacaaaatggtggagtgcaactcctcctgcccttcctgacagaaaagaatattgatatcaaaattgctgctttgaattttatttccaatctgtcaaaagatgcttcacaggaattagctgagcagattagggatacccaccttaatattttcgtgaagattatctcttcacctacatctggaaatgagaaggctgcagctattggtatcctaagcaacctcccagtgacagacaagaagattactgagttactcactgaagcaaacttgcttcctctcctgatatccttacttgagataaacatcacagcgccattgacaccattgagaacgtctttacttgagggcattgctggcgtgttaattcggttcacagtcccttgggataaaaaattacaaagtttagcagttggacatggggtggttccttgccttgttaagttgctttcggaaggatcaataaaagccaagtctaaagcagcaacatccttggctcaactgtcacagaattcactagcattacgtaagacaaaattgccaaggtggctttgtgttgccccatcagctgaaacttactgtttagttcacaactcccagtgcactgtcaaaagcactttctgcttagtgaaagctggtgctgtcagtcctctgatccaaatcttagaagatgacaatcgtgaagcagatggtgcagtattggaagcactagctacccttatgcaggatgagatttgggaaaacgggagcaaggtgatagaaaaggcatcaggtgttcatgctctgctgagaattgctgaggcaggaaactcaacttcccaggagaaggcgatatggatgcttgagaggatcttccggcttgaagcccacagagagcgttatggtgaaatcgcacaagctttgctcattgatcttgctcagaaaggagatcctatcctgaaaccaatgattggaaagatacttgctcaccttgagctacttcaaacacaatcgagctacttttaa

SEQ ID NO: 34792 - DNA, 2718 bp, Oryza sativa
  Clone ID: PAT_MRT4530_38773C.1
atgggcaaatgcgcagcgcggcagcggcagtggcggtggccgctcctccaccgctcgcctcgccctacgccgccgccaccgcatggcctccaccccccgcgtcgcgctctcgccgagcatgcccggatgccagcagagcagcagcagccgcctcctgtggctcccgccagggtcacgttctcccgcgtcttccagagctgcgcccaggcaggacgggaggcgctcgccgccggccgcgccgctcacgcgcggatggtcgtgtccgggttcgtccccactgccttcgtctccaactgcctcctccagatgtacgcgcgctgcgcgggcgccgcgtgcgcacggagggtgttcgacgcgatgccccgccgggacaccgtctcctggaacaccatgctcaccgcgtactcgcacgcgggggacatctccaccgcggtcgcgctcttcgacgggatgccggaccctgacgtggtgtcgtggaacgcgctcgtctccggttactgccagcgcggcatgtttcaggagtctgttgatctattcgtggagatggctcgccgaggtgtttcccctgaccggacgacgtttgctgttctgctcaagtcgtgcagcgctttggaagagctgtcacttggcgttcaagtccatgcattggcagtaaagacagggttagagatcgatgtccggactgggagtgctttggtggacatgtatggcaaatgcaggagtttggatgatgcactttgcttcttctatggtatgcctgagaggaactgggtttcgtggggtgcagctattgcaggatgtgttcaaaatgagcagtatgtgcgtggactagaactgttcattgagatgcagaggttggggcttggggtgagccaaccgtcttatgccagtgccttcagatcatgcgcagcaatgtcatgcctgaacactggtagacagttgcatgcgcacgccataaagaacaaatttagttctgaccgagttgttgggacagccattgtggacgtgtatgctaaggctaatagcttgaccgatgctagaagagcattctttgggttgcccaaccatacggtggagacatccaatgccatgatggttgggcttgtacgagcagggctaggaattgaggccatgggactctttcagtttatgattaggtctagcattcgttttgatgtagtcagcttatcaggggttttcagtgcttgtgctgagactaagggttacttccaagggcagcaagttcactgtttagcaattaaatcaggttttgatgtggacatctgtgtcaacaatgcagttctggatctgtatgggaagtgcaaagcattgatggaagcataccttatcttccaaggtatgaagcaaaaagattcagtctcttggaatgcaattattgcggctcttgagcaaaatgggcattacgatgatactatacttcattttaatgagatgctgcgctttggtatgaaaccagatgatttcacttatggtagtgttcttaaagcttgtgcagctttgcggtctttggagtatggattgatggtgcatgataaagttatcaagtcaggacttggttcagatgcttttgtagcaagcactgttgttgacatgtactgcaaatgtggcataattgatgaggctcaaaaacttcatgatagaattggcgggcaacaagttgtttcatggaatgccattttatctgggttttcactcaataaagagagtgaagaagcccagaagttcttctccgagatgctagatatgggtctaaagccagatcatttcacgtttgccactgttcttgatacttgtgcgaaccttgccaccattgagcttggtaaacaaatccatggtcagattatcaagcaagaaatgctggatgatgaatatatatccagcactcttgtagatatgtatgccaaatgcggggatatgccagattcactgctagtgtttgagaaggtagagaaacgggattttgtatcatggaacgctatgatatgtggatatgcgctccatgggctaggagtagaagcactcaggatgtttgagaggatgcaaaaagagaatgtagtgccaaaccatgccacttttgttgcagttcttagggcatgcagccatgttgggctgttcgatgatggctgccgctactttcatttgatgactacccactacaaattggaaccacagctggagcactttgcttgcatggtggatatactaggacgctcaaagggcccacaagaagctgtgaagtttatcaacagcatgccttttcaagctgatgcagtcatatggaagactctcctcagcatttgcaagatccgtcaggatgttgagattgctgaacttgctgccagcaatgttctactattggatcctgatgattcttcagtttatatccttctctcaaatgtatatgcggaatcagggaaatgggctgatgtttctaggacaagaaggctgctgaagcaggggcgtctgaagaaggagcctggttgtagctggattgaggtgcaaagcgagatgcatggtttccttgtaggagataaggcccatccaagatcgggtgagctatatgagatgctgaatgacttgattggtgaaatgaaactctctggatatgaacctgattcagcttcttttgttgaggtcgatgaagaggggagtgcaccagagcattgcttggagttgttggtggctaatctgttgtga

SEQ ID NO: 34793 - DNA, 1062 bp, Oryza sativa
  Clone ID: PAT_MRT4530_38774C.1
atgctcgcctccgccgccgccgccgttggcgtcgccgcgttgctcccggggcggctcaagcccaagccgacgccccgccttctcaagcgcctcgccaccgcctcgtcctccgcgtcgacgccgccgagcccccggagcggcggcgcgggggtggaggcggaggcggacaccacgccgctcttcctccgcccggcggcgcacccggtcgcggcggcctccctcgccgcgttccggcgccgcgcggcggagctcgtgccggactccgcgccgcacctccaccgccacctccgctggctcctcgccgacgccgccgcccgcgacgcgggcgccgacccggcgctcctccgcgcgccgctcggcgacctcgagtccctctggctccgccacgtccgggaccgccgcccgttccagtacgtcgtcgggaacgagcactggagggacctggtggtcgccgtccgggaaggcgtgctcatcccgcgccccgagacggaggcggtggtggacatggtcgcgaaggtgcaagggttcgaggccgggtggtgggccgacctcgggacgggcagcggcgccatcgccgtggccgtggcgaggatgctcggcccggaggggagggtgttcgccactgatgtcagcgaggtcgccattgacgtagctcggctcaacgttcagagatacgggatgcaggataaagttgagataaggcatggctcatggtttgagcctctagaagatctgaagggaaagctcatgggtgtgattagtaaccctccatatataccaactgaagatctacctggcctgcaacctgaagttgggtggcatgaaccaaagctggcacttgatggaggcaaagatggacttgagcatctgcttcatctttgtgaaggattgtcatcagtacttaagcctggtggtttctttgtttttgagacaaacggcaacaaacagtcagagtttcttgtcgatttcatacagactaagtgggattcttcttttcgtgatgttgaagcagttttagactttgcagacatcaaacgttttgtgacaggatatcgcagatga

SEQ ID NO: 34794 - DNA, 2022 bp, Oryza sativa
  Clone ID: PAT_MRT4530_38775C.1
atgcacccgccggccgcgcattccgtcgagcacctggcgcgcgcctccgctccccgcgacgcctccgctctcgtcctcctcctcccggcatgcgggaccctccgctccctgcgcgcgctccacgggcgcctcctcctcctcacgagcggcctcctccgcggcatccgcgcccgcaccaagctgctcagctgctacgcggcgctcggcgacctcgcctccgcgcgcggggtgctcgacgggacgccccgcccggacgcgtacgcctacagggtcatgctcgggtggctcgtcgacgcggggagccacgccgacgccgtcgcgctccaccgggacatgaggcggcggtgccccgcggcggcgcaggccgacgtcgtgctgtccctcgcgctcaaggcctgcgtcaggtcggcggacttccggtacgggaggaggctgcactgcgacgtcgtcaaagccggcggcgcggatggattcgtgatgaacagcttggtcgacatgtatgcgaaagctggagacctggagaacgcccggaaggtgttcgatagagttcctgaacggaatgtggtgtcgtggacgtcgatgctgagcggttccatccagaatggtatagctgaagaaggattggttctgtttaatgagatgagacaagacaatgtgcatccgagcgaatacactatggtgagtgttcttgcggcttgcgccatgctcggtggtttgcaccaagggaggtggatccatggatcagttatcaaatacgggttatctactaactctttcatcagtgcctctctgctagatatgtatgccaagtgcgagaaagtagaggatgctcgacgtgtgtttgatgagctcgagtttgttgacattgttttgtggacggcgatgattgttgggtacacacagaataagaggcctcttgatgcactacagctttttcttcacaagaaattcgtgagcattgttcccaattcagttaccatagccactgttatttccgcttctgctcagttacgccacttacccctgggaagatctgttcatgctataggggttaagttgggaacgatggaatctgatgtggtcaggaatgcacttgtcgatatgtatgcaaaatgtcaagctttgccagaagctaacagcatatttggaaggattttgatcaaggatgttgtcgcatggaattcaatgatggcaggctactctgagaatgggatggccaatgaatcactggtactattcaaccggatgaggatgcagggtatatcacctgatgccatctctgtggtgaatgccttgtcagcttgcgtatgcttggcagatctgcatattggtaaaggttttcatacttatgcgataaaatatgcatttatgtccaatatctatgtcaatactgctctgctgaacctgtacagcaagtgtgctgatctcccatctgctcagagggttttcaatgatatgactgaccgtaattctgtcacttggtctgcaatgattggcggttatggcatgcagggtgattcagctggttctatcgatcttttcaatgaaatgctgaaagaaaatatccacccgaatgaagtagtgttcacaagcatactttccgcttgcagccatactggaatggttactgcaggaaaggagtattttgatagcatggcacgacattttaacatcaccccttccatgaagcactatgcatgtatggttgatgtgatggcccgtgccggaaatctggaggaagcattggagttcatacagaatatgccaatcaaagcaggaattagtgtctggggatcctttctccatgggtgcaagctacattccaggttagagtttggagaagaagccatcaagaagatggcagcacttcatcctgaaacaccagatttttatgtgctgatgtccaacttgtacacctcgtatggaaggtgggataaatctcaaaccatcaggagatggatgcaggaacagggactcgtgaaactgcctggatgcagctccgtggggcatgaaaatggatga

SEQ ID NO: 34795 - DNA, 636 bp, Oryza sativa
  Clone ID: PAT_MRT4530_38776C.1
atggccacattaacttattcctccacacaatattggagcaaacgaggccatgttccatctcaggcaaaagttctggacagattgacatttaaaagagtgataaagaaggccagtgtagaagaattctcgtgcataccatatatcttagctttgttcagctgcctcacatacagttggtatggttttcctgtgaagcaagtcatgctgatggcatctctgattctagcagtcttttgcatgactgtgtttttctcaagcttttcaatacacaaccatcatatacgtaaggtatttgttggtagtgttggtctagtgtcttccatatcaatgtacggctctccgctggtagctatgaaacaagttatcaggacaaagagtgttgagttcatgcctttctatctgtcattgtttaccctcttcacaagtttaacctggatggcatatggagtcataggaagggatccttttatcgcgaccccaaactgcatcggcagcataatgggtatacttcagttggttgtatactgcatttacagcaaatgcaaggaagcacctaaggtgcttcacgatattgaacaagcaaatgtagtgaaaattccaacaagtcatgtggacacaaaagggcataacccttaa

SEQ ID NO: 34796 - DNA, 867 bp, Oryza sativa
  Clone ID: PAT_MRT4530_38777C.1
tcactccaccactgcctccgccggagccgatttcttctccagccaccttcggagccgtggtattccccattcaccgcggctggagccgaggtcgtcccttccgccaccgccgctgcactccactactgcccccaccagagcccaggtcctccccagccaccaccggacccgtggtcttccccatccttcgccgtcggagccgaggtcgtccccttccgcgcccgcacgcacattctgctgccgctgctccagtgacgcgcggccacgaccaccggtgatggcgacgtgtgggtttgcagcaacacctccttactccgcctcaagaaccgtcgtcatcactcggtgtcggctgtcatcaccaatcggtcgtcgtccgctaccccaggactcgatctgcgtcgcctccaaccggattggctgctccaagctcgagtgactgtaggggatgaagagcgtgatgccggatctggcccaccggcggcgacggatccgacaactcgatggccctaggcggcaggctggatgttaggaacccaaatgggctgcctgtgggctgtcaaccactttcaaagcaaggcccaagcaagcaaatcaggagcacatataaacagcaggagcagcaccagagaggagatcgaacagagaacaacagaaccggttgaggggcttctcggcggcgacggcggcggcggcgacctggaaccgggcttggttccttgtcgatctttactctccctcttcttctacttgtctagaagctagtagaacctactagcctttgtatccttccattttccacctcaaaacccctccactattgtaacagactcggttgttccttgtgttggatttggtactcctactcct

SEQ ID NO: 34797 - DNA, 597 bp, Oryza sativa
  Clone ID: PAT_MRT4530_38778C.1
atggcgaagggaaacccttgcccgcgtgcgtattaccggtgcaccgtggccgtcggctgcccggcggcggtggccaagtcgtcatccgccaatgccgcgaccacggagatgctcgagctcttgcgggatttcagtgactactcgagcttcaactcggatatctcaagtgagctcgagcggcttgcggcggcggtgacgcctagatctgacgcgccgcaggtggctgctgtggatctgaacggcggcagcagcagcagtagcaggctgacgacgacgacgccaccaccactgctgcaacttggatgccggcaagccctccccttcatagtccccaccggtagatgcgcttctctcgccgccgtcgtcgaggaaatcagcggccggcgtgcttctccgccatggatgtcggcagctggtgatgcggtcgcagtgataccctcatatgagaatcacgtcaccgaagtctctacttgcgtgaagcattcctcctctcacaccgatattgaccgtctcaggctaagtatcacaaccccgttccatgattatgacgttattaccctcattgataaaatcatcaatccgttattctggtgttaa

SEQ ID NO: 34798 - DNA, 576 bp, Oryza sativa
  Clone ID: PAT_MRT4530_38779C.1
atgtcactcaccgttctccttgggcagctgtcggggtcccaccgagcggactctggcttcgacgtccgcttccactgcctccccgccgaggagctactggacttctgcggcagcgaggacttcatctcccgattcatgcagcagcactcgtcgcattccagggaggccatcttcggcctggaatcccacgtcgccgctgtggttttggacttgttcagtaccacgttcctcgacgtcacctgcaacctcgacctccctgggtacgtgtacttcacttccaccgcttctctgctctcgctcgtgctgcggttgctggtgttggaccaagagatgcttgtggatttcgaggagatggaagacgtcgtcgacttactagggttgctgtcagtgccggcgactctgttgccgacgcctgtgataaagaaggattgtgtggagattatgggtaccatatgcccacacggcaaggatgatttcgtcttcctgccagggcaggcgtcccacttcggcaacctcaactttattacggacgacttcagcaagatctctctcctcgactcggattctcagatttga

SEQ ID NO: 34799 - DNA, 139 bp, Oryza sativa
  unsure (1)..(139): unsure at all n locations
  Clone ID: PAT_MRT4530_3877C.1
agctctccttcagcatctctactctcgntccatttctaagggatcgaaatgatggaggcgaaagacgggcaagcaanngatgngnncgaacggatacgncagcangnggncggaagacgncgtgtngcacgncgacaaa

SEQ ID NO: 34800 - DNA, 459 bp, Oryza sativa
  Clone ID: PAT_MRT4530_38780C.1
atgagcctcttcctgacgggctccatctctcatgctgctgacctcccgatctcaaagagaagagtggtggcaatgacggcggcagtcttcacaatggatgcggcggtggcggtggcggtggtggaggaggaggaggaggaggaggaggcgggggcggcggcggcggcggaggaggaggaggcggcggaggaagaggaggaggcgggggcggcggcggcggaggaggaggaggaggtggcggaggaggaggaggaggaggaggtggtggcggcggcggctactacccaccttggaacggtggttactacccaccaggcccaggccaccaccacaacccgcattggcacggctgccgttgggggtgctgccaccgcggctacaggggagattgccaccgctgctgctaaggcggcgccggagctagccatagctagctccaccaatccacagcgatcatga

SEQ ID NO: 34801 - DNA, 1353 bp, Oryza sativa
  Clone ID: PAT_MRT4530_38781C.1
atggcccaagacgctggggacgcggtgctcccggcgtcgcgcatcacggtggagaggcaccttagcctcatctgcaagatcatggcggaggacgccgtcgtgatgctgctgcaaggcgcagtggtgggaggatgctacttccagccccggccaggcgtggcggggcagtacattgagagtcacctccgcaggaagtgggaggattggaagaaggattggttctacaccgcgctgccggatcgtccgcgacttcggctccccgtcagccctcccgaacgatccgccgcgtggttggcggtttcggagctgggcgaggagtatgacgcagtgcgggatcgcctcaggggcctgcggagccagggcttaacggcgtcgatggtgtttggcgactacttccgccgtcacatcgcgcctctccaggagcggtcccgcagcgcgtgggaatacaccaggcacaacgatcccatgcgcacccacgtgggcaagcgctgggattggggcgaggaggacgcgaagacggtggttcggcgggtgctggccctggacaccgtcgagcaaacgctgattcccgacgggatcctctccctctgcagcgaccgcgaccgggagagtattctggttgtgatgtcggtcgtcggtgctggcaggggttggtcctgctggggcaccgctggtggcggcggtggcgacggcgcgggtagtagcggcgcgaccgcgggcggcagtcggaccggtggctccagcgggggcggcggctccaggccgcccggttcaagccatgggcccgggggagactcggccggcgacccgaaagggaagcgaaagatgtccgaatctcggccgccctctcccccgcgcggagggggcgccgagcgaatagcgggccaaccaccggcgggccacaaatgccccgccgcgtccgaggcaggacggaagaagaagcggctccggaagatagggcagacggagccatgccgggggagcttcatcgagcccctgaagtggaccttcagatgcccccctccgggattcctcccagggggtctcggcgtccgatccctcgcagggacacgcgaggagacgctggactcggtcatgcgggagacggaggaggagcggcaggcggcgctcatcgcctcaagcgccctatatgaggcgctgggcgacatccgcctgcagtacgaggcccacgccgaagatctggcgaagagggtcgaggacgcccgtcgggtccttgaggcggctgcctcggacgaggagagcgggagcgagggcggcggtggcagtgatggtgacgaggactgggacgaggtggtcagcggcgccagactcgggggctcgagcactccgtaa

SEQ ID NO: 34802 - DNA, 6395 bp, Oryza sativa
  Clone ID: PAT_MRT4530_38782C.1
atgccgctcttcatgtcggaggaggagctgcggctcttgggcggtgacgtggccgccgtcgccgagcgggccgacgccgccatccgcgagctccggcagcaggtggacaccgtccgtgccgaggccgacgcggcggccatcgcggcggagcagacgtgcgccctcctcgagcagcgctacgacactctctccgccgaggccgatcgcttccgggccgagctagccgagctcgcggctgcctccgagcgccgcgccgccgatctcgcctcttcccagtccgagatacaccagctccgcatccaagccattgcgaaggatggcgagattgaacggctgaaagtagaaatctcggaggtgcacaagtccaagtcgcagtcactggaactaattgagcagagggatgcagagataagggagaaggatggcatcatccagaactacctcgataaaatattgttgaatcggtcttcctgtcaggtaaatctggcagactcttctgctagtaaaggggcaaggatacaagaagttgaagctaagtttactcatctgcaggccacatgtaaccgaattacgcaggagaaagatctgcttgaaaagcataatctctggcttgacgaggaacttaaagaaaaagtgaagaacttagctgaactaaggaaatcaaacatggatgaggaggctaggatgtcagcaaaggttgccgagcttgaaagagagacttctgaatcatccagttccttgaggcgaagcaaagaacgggtttctgaattggagcaaagggtatcatatatggaaaaggagttgtgctcaacaaaggatgctgcagctgctaatgaacaacgcctggctgcagagctttcaactgtcatgaaacttgctgaacttcacaaagaaagttctgaggaatggtcaaaaaaagcgggggaacttgaagacacatttgaccaggttgaagatgaatacaaggaaaagcttgagaaggagacttcagccaagagggaccttgaaatggaagctacctacttaaagcaaaagcttgaaaagtgtgaatctgatctggagaatacaaggaaatctagtgaattgagcttcactccattggttgcagcagacccttgtgatctagcaggctcaccgatgaaagaaatggcattttctgatccagcaaatcagaatgatctaatgattgtaccaaaagtacctactggtgtttctggaactgcattagctgcttctcttcttcgtgatggttggagtctcgctaagatctatgagaaataccaagaagctactgatgctttgcgccatgagaggtttggacgaaggcacgcggaagcagttctggagagggtcttgcatgaaattgaagagaaagctgagcttatcttggatgaacgagctgagcataggaggatggttgaagcttatgctctaatggatcagaagttgcaacaagcattgctggagcatgacaattttgaaaataccattaggaatctaaagtcagagttaaaaaggcgggaacgtgatcatagtattgctcagaaagaaatagatgatctgcaaaaacaaattaaattgtctatctatttgacattcgcaccaacacaagcttgcatattaggagtctgcactagcaaaaactattatgatatcaatggaaaccactgtggagcagtgttgaagatagctgtccttttaaaggagtgccaagatatacagcttcgttgtggttctagccttccaaatgtaggagatggtgctctttctacaagcacaagcactggagtgcctgaagttgaaaacaatatccatgagcatatgacattcaatgatatcaatgggttagtacagcaaaatgtgcaactccggaatcaagttcatttgctctctgctgatcttgataaaagggacatggaactcagggagagcttccaaattgagttgaagaagattacagatgatgctgcgtccagggttgagaaagtgatgaaaaaatccgaagaacaagcaataatgattgaatcccttcacagatctgtagcgatgtataggaagctgtgtgaagaacaacagaagtcacgttccaatgttgaacacatacccaaaaatttggaagatgatggcagaaaagacctgatggttctatttgaaggatcacaggaggtttcaaggaaagcttatgagcaagtttcagagcgtgccaaaagccttgatgaagagctgactaagttgaggactgagcttctatctttgcgttctgagcgtgataaggcggttcttgaagcagaatttgctcgagaacgacttaatggatttacagcagagcttgaacaccagaggaaggaagctaattctatttcgctaagaaatgcggaattgatgcatttagtagttgattacgaaaaaagattgcgtgagaactcagaatctatgaaggctgtagaggagaactcacggaagctattaatggagatgtctattctaaagaatgaaaaagagatcttagcaaagtcagagaaaaaagctttggaggaagttcatgatttgaccacgagggtgcatcgcctgcaggcgaccattgacacaatacatgccaccgaggaggttcaagagaatgcaaggtctattgaaaggagaaatcaagaggagtacatcaagagactagaaagggactgggctgaagtgaaaaaagagcttcaagagcaaagggatcatgtccgcgtcctgacgcttgataagaaaaatgcctttgacggatgtctgaagcaggtagaggatatgagaaaagagttacaaaattcatggaaagctgctactgatgctgaatctagggctgctgttgcagaggcaaagtgttctgatttggagacaaaactaaaatcaagaaaggagaatgatgagcttttccagctgaaagaggagttggaaaagtacaaagaggaagctcaagcaaataaaagctacatgcttcagtacaaagaaattgcaaactcaaatgaatctgcattgaagcaaatggagtctgcacttcaggatttcaaaaccgagtctgagactatcaagaaaagcttggaagatgagattacaaagttgaggaccaagatatctgaactggagaagtgttatataatgaagtgtgaagaagctgccagtgcaattgaagctaaagagaaggataccacttctctcatgaaggaaatctcagttttgagaaatgaagtttccgagaaagtaatacagattgaaaaattagaaactgaactggcttcctcgaagagggctcttgacgagcagtataagcgttggcgtagcgctcaggacaactatgagcgtcaggttattctgcaatcggaaacaatacaggagctgacaagtgcttctaaggagctatcttctttgcagcaggaaatcatagtgcttcgtcaaacagtagaaacacagaaggctgaaaatgatggtctaagaacccttggagagcaagaaaagatagagctggtgaaaggaaaggatgaggccttgcagaaatacaatgagctaaatgatcagaataaaattctacacaatcaactagaagctttgcacattagattagctgaaaaagaacgcaatattgctggtctttcatcgcaacgcattgattcacatggtgaagatgatttgcatagcgtcattggctacctgcgcagatcgaaagaaatattggaaagtgcattgaagtccacaaaggaggcacaggacttgctccgcagtcaaactgatagtgcaagaacatcaatgctcaaggatgaagaattcaagtcactgcaattccagcttgttttcttttgtattaaaaatgctttacctcaggtgagagagcttaatttgcttcgtgaaagcaatatacagcttagagaggagaacaagcataatttcgaagaatgccagaaattccatgatgaggctcaaaaggctaaaatggaagctgaaaggttgcataatcttttactggaaaagcaggtagatgctgaaatatgtaaaaaagaaatagagatgcagaagaccgaaatagctaatctaaatcaaaagatttccgagttggttgaaaatagtagaggcgttgatttgagcacatatgagaccatgaaggatgaacttcaaaacataaaagcaaccttgagagagaattcggcagagctagagcgcacaaaaaaacttctttctgagaaggattctgtaataagaaatttggaggaaaagcttgctggatgtcagtctgaattggatgctagggaaaagaagctgaatgatgttgaggctagccttaaatctgaaattgacagacataggaagattaatatcaacataaagaggaagcttgatgcatcagcaaaagagaaggaggaactgacgaaagaaaaacaaagcctttcaaagcaattggaagatctcaaatcaaaggtcagaaaactacaacagaaaattcaaatgaacaggccatcaaagaaaaggacttcaggatacagacattggaaaaagtcttggagaaagagagagatgataataagaaagaaaaagcattccgcagaaggaatgagaaagtatttactaccgccattcaaaatatgaatcaggaaaggaaacaagtagaggaatcaattgagaagcataggcaggctgtgaaagaggtgattgagcattatactggaatatcctctcaaatcccatctggatctgcaatcgatgagcagctgcgttcatatttccttgccatcaaagctgttgaggagtctccgagtcccttccaagatggtgcagcaagccagacaccatctgttgaaagtgccgatgtggatgcatctgcagctactgcagggagacaggtagctactccaccaaggcctgctcaagttaaagtggtggaggagagagcagtttctactttgcccaaaccaagcactgaagtacgtagaccaggaggaaggagaccacttgttcgaccttcacttgaacgagttgaagaaccccaagctgatattgatacaacagtagttgaaggttccacagagaaaggcggcttgttgatggagcgtgaaactcctggtggtgtatctgcgttacagccatcaagtcgtaaacgtctaattccatcaccacaaacgagagatgatgcttcacaaggagagacaacggatgccaatccaccactgaagaaacccaaagaaggatcttcacaatgtactagtgagctaaaaactgaacagtcacctcatgaagatgtcatggcacctgttcctgtgctaccatctacagagttagatgagcaacagcctggagaagagatggacaccgatcagtcttccttgccagttgaagaggttgaggaaacaagggaggatgacttgggtgataaggatgacatggaaacacatatagacgcttcaatggacatccaaggacaagatgcagaaactggtattgataatgatgcaactactgtggaagatgtgccagtcaagtcagaagcggttatggaatcactggaggaagacctgaaaactgaggatgggaaggaagagggtcagtttactgcaaccactgatgttgaagatgagagggaggagggagagttgccagatgaaccagaacaaccagacagcactccccctgtgctggatgttggtgagcaagccggtgattctttcagggcggcatctccagcaggaccaactgaaaagagtgatgttgacatgccagaagaaactggagaaggtgatggtaccatggaatcagaccaaagccctgtaccacaatctggtggagcagatgcgtcaccgagccaaatggctgatgcgtcaccaagccctgcacgtgaaccttctcctaacccagtccaagctggtgcacctcctgaacagcagaatcccacccctcctaacccagtccaagctggtgcatcttctgaacagcagaatcccgccactgcagcagaaggtgttgaaactcgtagtaccagaacaatcaacctaactgagagagcgaggcaaaaccggcaagccaggattcttcgctcagccactcaacagaatgcaaggggccgtggcaaccagtctcttacatacaggaaagatggcggccgaggaacacggggtcgtggtgggcgtggtcagtcgtagagaatttaggtttgtctttgctcaagcgcggagactagttttttgcaaaggacatactgaatcagggcggcatcatattcattttgtagcactatcagaattgcgagcgtacatgttactctgcttagacaaattcatgtggctaagcagcgcttattaaaatgttctcattgcccgtgcggattgccagatgacctatatttaaattgaactctagttgacaaagatgatataagc

SEQ ID NO: 34803 - DNA, 424 bp, Oryza sativa
  Clone ID: PAT_MRT4530_38783C.1
cccacgcgtccgccacgcgtccgcccacgcgttcgaaaaaaaaaaaaaaaaaaaaaaaaaaaaaaaaaaaaaaaaaaaaaaaaaaaaaaaaaaaaaaaaaaaaaaaaaaaaaaaaaaaaaaaaaaaaaaaaaaaaaaaaaaaaaaaaaaaaaaaaaaaaaaaaaaaaaaaaaaaagggggggggcgttttaggggttcaaattttatttccggttgtttggaagttattattttttttttgggggaactaaaattaatttaatgggcggggttttaaaaaggtggtgatgggaaaaacttggggtttaccaaattaaatggttttgaaaaaattcctttttttccaagttggttttatagaaaagaggccggaacggtttgtcttttcaaaaatttgccaatttttaaggggaaaggggacccc

SEQ ID NO: 34804 - DNA, 1407 bp, Oryza sativa
  Clone ID: PAT_MRT4530_38785C.1
atggcatcctgcaagaaggtgtgcgtgatcggcgccggtgtgtctggcctcgccgccgcgcgcgagctgcggcgagagggcctcgacgtgacggtgctcgagcagcgcggcggcgtcggcgggcagtggctgtacgacacggcgaccgacgccggcgacccgctcggcgtggccggcgtgcacagcagcatgtacgcgtcgctccgcctcatcaccccgagggaggtgatgggcttctccgacttcccgttccgcccaggcaaggacggcgactccggcgccggcgaggtcgacgcgcggcggttccccggccacgccgagttcctcaggtacatcagggagttatgcgacgtgttcggcctcatggacgccgttcggctcaacacggcggtcacgcgcgtcgccatggcgccgccgcggcgcgacggctcgctgcggtgggcggtgaggagcaaacaccacggcgaggcggagacggaggaggtgttcgacgccgtcgtcgtggcgtccggccacttctgccagccaaggctcccgaccatcgacgggatggacaggtggaggaggaggcagctgcattcccattcctaccgcgtcccggacgccttccatggcgaggtggtggtgatcgtgggctgcggcatcagcagcaaggacatcgggctagagctccgccgcgtcgccaaggaggtgcacctgagcgcaaagtcgccggaggaggccatgacgccggcgatgtccaagattctcgccaggtacgacaaccttcacctccacccacagatcgaacacctgcgcgaggacgggacggtggtgttcgtcgacggcacatgcgtcgtcgccgacgccgtcgtctactgcaccggcaacacctactcgtacccgttcctggacacggacggcaaggtcaccgtcgacgacaaccgcgtcgggccgctgttcgaccacgtgttcccgccggcgctcgcgccgtcgctgtcgttcgtggggatcccggccatggtggtggtgccgctgttcaacgaggtgcaggcgaggtgggtggcgcaggtgctgtccgggcggagggcgctgccgtcgccggaggagatggcgcgcgccgcggaggagtacaaccgcggcagggaggccgccggcgtggcgaagcggcggacgcacgacatcctggacctggagtactgcgacgactacggcgagcgcaactgcggcttcccgcggctggaggcgtggaagaaggagctcatgtggtcttcctacctcaccatgtgcgacaacctcgagaccttccgcgacgactaccatgacagcgacctcgtcgccgacggcctgaggctgcacggctggatctcaccggcgacgacgctgacgcagcagggcgacgatgacaaacggccccatcttttatga

SEQ ID NO: 34805 - DNA, 1980 bp, Oryza sativa
  Clone ID: PAT_MRT4530_38786C.1
atgaccccaactctcatagatatcagcatgatcacgggtctggatgtcacctcatcggccaaccctatgagtttgaatacaaagaaccaatatgacttcaagaccaagagcataggcggctggtcaggctatgtagcagcatatataggccaaagtccagttacccctcgagaacatgtggctttcctgttaatgtggttagaaaagtttctcttttgtgggtctagctgcggtcctacaaccaattggcagttcgtagctgaagccttggagacaaaaagacaattttctttaggcaaaatcctcctcggctacttgtaccaaatgctaaataatgcattagctaagctaattgtcggctcagtagtcggagcgagtggaccatggtggctgctgcaatcctggctaaacttggtagtcatgaggttcgtcaatcggccatctgtaacagaaactgaattcccaagattagagccgactgttaacgatgacggagaggaactcactcatcggagattcacatcatatggagagtacgcctctaccccaactgctgcaggagcaaaactatcggccgagctgctcaaagattggttttgtagcttttatgaggggttccaaaaggatgctcgagcttggtttctctatggagactcaacacttctggaaaatccatgggacttcagattcgaagacatcaacaatgacaaatatcagaagcccagagaaatcttcttatctgcaatcaccccatgcatccttccagtcagcattcatcaagggagaaacatccaagtttcctatgagttttatcatccaatgagttctaccagacaatttggaatgggccaactcctaatcggcttattctttgccgataagatccaatgccgaggagaaatctcatcatctttaatgatggatcggctgctcaatctccaagcacctcctctaggcagcattgacaccataaagctggcaacctttaggagcaaagtatttgacagatggtggggtgaatggaagctacacttattccatgtatatgacagatctctttccagatattgtccctcaaacaacagaatcttctcccctacaccaaagcaacagcggcagggatatcgagtatgccccaggactgatcaccaaaggagagaaccagccgatgccagcaagaaaagaaagaccagatcatcggctgtaaatattttagccccagctccaaagaagaagactaagacaaagaagaccacaccagctgatgatctgcctgctctagatccatccattgaacaagctctggatgaagaaataattgaagatgacattgacgaggccgcaaccgaaaaaaagaagactgctgtgaaaaagaaatcggctgcgacaacatctaaaccagctccaccacaatcaacaagtgaccagactccatcagctgtaggaagtcaccatatagaagaagaaattcaaccaactgttcctactatcccagtagatgagttagccgatatccttactccaggagtttatcttgagcaacatcaattcaaattggagaaagccaagttaagactggccgaacggctagaacataaaggcattgaagctacaatccaagctaatcggcaacttgtgcatgaggaaaaatccaaacttgatcagctttcagaaggtccgatcaaatccaacattgatcagctcgaggctcgcaagattgagctcctggcacaacttcaggaatgcaataccgaattagatctggagcacaagaaactagccgatctcccgcggtctgtcgaagaacaaaaagcaagacttaaatcggctatcaagaatgtcgctaatctgactaagtctttgaagatcattcctagaactgatgctcaagatgcccaagctattgaggaagttgaacaaattaggcaacaaagctatttcggctatacagcaatacttgtctcaataacttttatgtaa

SEQ ID NO: 34806 - DNA, 247 bp, Oryza sativa
  Clone ID: PAT_MRT4530_38787C.1
gtcaaacatgtggggccgggtcgcggcgggagctgattggtgtgcaggcacgcgatcgatgcgcattcaccggcctggacggcctgcagctagcagcacgcgagctagggcaagcgagagggggatcgatcagccggagcagcaggtcacggtggtggtggtgggcgtccgtccgtccgtcgcgctcccggtgtcgccatccgccttgatcaagcttttgccgcgcatgaatggcgccgctagctga

SEQ ID NO: 34807 - DNA, 1503 bp, Oryza sativa
  Clone ID: PAT_MRT4530_38788C.1
atgaggttcgtcaatcggccatctataacagaaactgaattcccaagattagagccgactgtcaacgatgacggagaagaactcactcatcggagatgcacatcatatggagagtacgcctctacaccaactgatgcaggagcaaaactatcggctgagctgctcaaagactggttttgcaacttttatgaggggttccaaaaggatgctcgagtttggtttctctatggagactcaacacttctggaaaatccatgggacttcagatttgaagacatcaacaatgacagatatcaaaagcccagaaaaatcttcttatctgcaatcaccccatgcatccttccagtcggcattcatcaagggagaaacatccaagtttcctacgagttttatcatccaatgagttctgccagacaatttggaatgggcaacctcctaatcggcttattctttgccgataagatccaatgccgaggagaaatctcatcatctttaatgatggatcggctgctcaatctccaaggacctcctctaggcagcattgacaccacaaagctggcaacctttaggagcaaagcatttgacagatggtggactgaatggaagctacacttattccatcaatcggcttccatgtatatgacagatctctttccagatattcttcctcaaacaacagaatcctctccccctcaccaaagcaacagcggcagggatatcgagtatgccccaggactgatccccaacagagatccatccatcgaaaaagctctggatgaagaaaatattgaggatgatgttgatcaggctgcagccgaacttcctcctcctccttcttcccctgtacaacaatcattgagtgaccgaactccatcggctgtagggagtcatcatattgtggaagaagaacaaccagctgctcctgctatcccagcctcttctctagatagcttagtggtggactgtggatcgattagggcacaattgcacgaagttcaagctctaattcccgaagaactggccgatgtcctaactccagctgcttatcttgagcagcatcaatttaaactggagaaagccaagctaagattatccgaatgccgtgagcacaaggagattgaagccgcaatccaggtcaatcggcagcttgtgcatgaagaaaaagtcaaactcgatcagctatccgaaggtccgatcaaatccaatattgatcggcttgaagcccgcaagatcaatctcttggcacaacttgaagaatgcaatgctgaactagatatggagcacaaaaagctagccgatctcccaaaatctgtagaacagcaaaaagcaaggctcaaatcggctatcaagaatgttgctgacctaaccaagtccctgaaggtcatttctagaactgatgctcaagatgcccaagctattgaagaagtagaacaaattaggcaaagggctattttggctatccagtggtacttgtctcaatatcttttgtgtaataggacttag

SEQ ID NO: 34808 - DNA, 3674 bp, Oryza sativa
  Clone ID: PAT_MRT4530_38789C.1
atggcggccgacggcggcgcgctgggaagaagcaatagagggcggagaagaggagagagacaccaccgcagccgcaaccgccggccggcgcaatcgcgccggggaggcccacggcatgagggccgaccccagcaccatcttccctcccttcctcgcgttcctcaccccccaccgccgggagcaggacccacgcggcgctgctcgggtcaacggcagagcgggcattgggccgtggccgaacgtaggctgccggaggcggctaaactttcgggcttgcgccatgcgcttgacaccaaagaaggaattcctaaggtgcaggatagcagaaaaaaagttgtgcatatctggcttgaccagggcgaacggataacaatggcaacgcctcccttctaggctgcatgatgctacggcagagtgtgtcgttatggcgtggtttgcgctccgcgtcgctgggggggccagggcaagtttgtgctcttcccatggaagtccctgggtgactgcaaaattttcacacggcttacagcgatgatggatgactcgtagaacaacgagccgtcgacgccggggtcgccggggttcagcacagacaggctgccgccgaacaccaccaccagccgcggcgccaccgacccgtcctcctactcggacgacgacgacgacgacgtggttggcgcggaggaggcggaggtcgaccccaacgtgctccccgaggacgacggcgtcgtcgccgccgaggaggaggaggacggggaggacctcttcaacgacaactacctcgatgattaccggaggatggatgagcaggaccagtatgaatcggttgggttagatgactcgatagaggatgaaaggaacctggatgagatcatggcagatagaagggctgctgaagcagaacttgatgcaagggatgtgaggactggtgcagcacctgataggaaattgccacggatgctacatgatcaagacacagatgaggatatgagcttcaggcgtcctaaaaggcacagagctaattttagaccaccaagggaaccaagaacaccaagaagtgatgatgacggtgatggtgccacgcctagttcacctggaagatctcagcgtggaatgtattctggaggggatgtacctatgactgaccagactgatgatgatccatatgaggatgaatttgatgaagaagatgagatgaacatgtaccgtgtacaaggaactcttagagagtgggtcacaagagatgaagtccgccgctttatcgcaaagaagttcaaagaattccttctaacatatgtaaacccaaagaatgaacaaggagagtttgagtatgttcgactaatcaatgagatggttctagctaacaaatgcagcttagagatagattacaagcaatttatttatatacatccaaacattgctatatggttggctgatgcacctcaatcggtgctagaagttatggaggaagttgccaaaaatgttgtttttgatctccataagaactataggaacattcatcaaaaaatctatgtccgaataaccaatcttcctgtctacgaccaaatacgcaatatcaggcaaatccatctgaacacaatgattcgaattggtggtgttgttactcggagatcaggtgtttttcctcagctacaacaggtcaagtttgactgcagcaaatgtgggactgtcctgggccccttcttccagaactcttacactgaagtcaaggttggatcctgccctgagtgccaatccaaagggccattcaccatcaatgttgagcaaaccatatataggaactaccagaaactcactcttcaggaaagcccaggaattgttcctgctggcaggcttccaagatacaaggaagtgatacttctgaatgatttgattgactgtgctcgaccaggagaggaaattgaggtcactgggatatacaccaacaattttgacttgtctttgaatacaaagaatggtttcccagtttttgccacagtagtggaggcaaactatgtggcaaaaaaacaggatctgttctctgcttacaaattaactgatgaggacatgtcggagattgagaagttggcaaaagatccacggattggtgaaaggattgtcaaatcaattgcaccatccatatatggtcatgaagatatcaagactgccattgcactagctatgtttggggggcaagagaagaatgtcaagggaaagcatcgcttgagaggagatatcaatgtactcctcttaggtgatccaggcactgcaaaatcccaatttctcaagtatgttgagaaaactggacacagagcagtgtacacaactggaaaaggagcttctgctgttggactcaccgcagcagttcacaaggatccagtaacacgggaatggacacttgagggtggtgcactagtgcttgctgatagaggcatatgccttattgatgaatttgataagatgaacgatcaagatagggtgagtattcatgaggccatggagcaacaaagtatcagtatatcaaaggccggaattgtcacatcccttcaagctcggtgcagtgttattgctgcagcaaacccaataggaggaagatatgattcatcgaagacattcacccagaatgttgaactgacggatccaattatttcacgttttgatgtcctttgtgttgtgaaggacattgttgacccatttacagatgaaatgcttgcaaggtttgttgtagatagtcatgcaagatctcaacccaagggtgctaaccttgaagatagggttccaactgatgttgaggatgatccattggctgctgccagacaagctgacccagatatcctttctcaagacatgctgaagaagtacataacttatgccaagttgaacgtgtttcccaaaattcatgatgctgacctggacaagattagccatgtttacgcagaacttcgtcgtgagtcatctcatggtcaaggagtccctattgccgtaaggcatatcgaatccattattcggatgtcagaggcacatgcaaggatgcatttgaggagctacgtgtctcaggaagatgtcgacatggctatccgcgtcctgcttgactcatttatttcaactcagaagtttggtgtacagaaagcacttcaaaagaatttcaggaaatacatgacctataagaaggattacaatgagctgctcttgcttcttctgcgcaccctggtcaaggatgtgctgcacttcgaagaaatcgtttcaggaccaacgacgcgcctgactcacatcgaggttaaagtagaggacctgaagaacaaggcccaggagtacgaaatctatgacctgagaccgttcttctccagcgcccacttcagggacaacaacttcgtcctcgacgaagggcgggggatcatcaggcaccctcttgctgcctaactacagaagatcatctgtgacccatctgacaatgaacaatttgagctacctcatgggattatcagacatagtgtaatcatcaaatggcaactcctttgtgctttttagagactgttgcatgttatccagctgcatttggatagggtgtaccgtgtgtactttcttaacattgtaattctgcaagtatggtagaaaatgataaatctgtgtcaatcaatgtatcattgttttgcattaatgttttcatttttttcctc

SEQ ID NO: 34809 - DNA, 528 bp, Oryza sativa
  Clone ID: PAT_MRT4530_3878C.1
aggtttttattcgtgcctccttttttaggggaaatcgtggtacccccttcaggtacccggttcccggaattcccggggtcgacaccacgcggtccggcgctggtcgttgaagaaagccacgtagcgttgataggatccccatatttccgcaatcaagacacataacgctttaccccttcgtcacccccttgcagggaaaaactcaagtattccgtggccctgccaagttgatgtagtggctaatgcgtatcgcatctcaagggagcaagcccgaagcctcatagtaaccacactggggagaagagcccggtcccttcactcctagatgttgcaacaacacacaatactacccaggattatcgaatgagtcccgaaagcagagacttcagagtaatgtaattgagaactagtatcggcgtagagtaaaataaaaccccaccagtatgacccttggtgggtgattctattcgatatcagtactaaataaaggttacacaatttctttaataaaaaaaaaaaaaaaaaaaa

SEQ ID NO: 34810 - DNA, 2376 bp, Oryza sativa
  Clone ID: PAT_MRT4530_38790C.1
atgtcgtcctctgccagcccatctgccgcaccatcagccgagtacgctgagcatctttccaatctagttgcaattcccagcctgtcacatgaaaattactactttctcggcccagtcggcaaccctgatcccaccgagttcatcattggtgaaaccaataggattcctttcagattaaccaacccagacctaggtcactggaagaataccttcaaatcctggccgtctctagagaaaacttcacccgagaaaagttggacagcatggttcaagcgcatgtcggctggtaaaagagttcactgggacgaaatcggaatcggccaagcactcgaccttaccatagccaactcagctaaggacgaacccctaatagcagctgcctcttatttctggtccaacaccatcaacgccttcttgttcaaccaagagccgatgaccccaactctcatagatatcatcatgatcacaggcctggatgtcacctcatcggctaaccctatgagcctgaacacgaaaaaccaatacgacttcaagaccaagagcataggcggctggtcaggctatgtagcagcatatatgggccaagaaaaattcctcttctgtggatcaagctgtggccctacaactaattggcaatttgtagctgaggccttagaaacaaagaagcaatttcctttaggaaaaatcctcctcggctacttgtatcaaatgctaaataatgcatcggctaaattagctgtcggctcagtagttggggcaggtggaccatggtggctattgcagacttggctaaatctggtagtcatgaaagttgtcaatcggccatccgtaacagaagcagaattcccaagattagagccgattgtaaacaatgacggagaagaactcactcatcggagatgcacatcctatgaagagtatgcctctacaccaactgatgcaggagcaaaactatcggctgagctgctcaaagattggttttgcagcttttatgagggattccaaaaggatgctcgagtttggtttctctatgaagactcaacacttctagaaaatccattggacttcagatttgaagacatcaacaatgacagatatcaaaagcccagagaaatcttctcatctgcaatcactccatgcatccttcccgtcgacattcatcaagggagaaacatccaagtttcctatgagttttatcatccaatgagttctgccaggcaatttggaatgggccaactcccaatcggcttattctttgacgataagatccagtgccgaggagaaatctcatcaaccttaatgatggatcggctgctcaatctccaaggacctcctctaggcagcattgacaacataaagctggcaaccttcaggagcaaagcatttgacagatggtggggcgaatggaagctgcacttattccatcaatcggcttctatgtatatgacagacctctttccaaatgttgtccctcaaacaacagaatcctctccccctcgccaaagcaacagtggcaaggatattgagtatgccctaggattgatccctaacggaggtgggccatctccccccgtcatcggctataatgcccccaagacttcagctcttcttcaagagctcatcagagatccagccgatgccggcaagaagaggaaaaccagatcatcggccgtaaatatttcagccccagctccaaataagaaaactaagacaaagaaaaccacaccagctgatgatctgcctgctctagatccatccattgaacaaactctagatgaagaagtaattgaagacgacgttgatgaggccgcagccgaaaaaaagaagactgctgtgaagaagaaattgactgcaacaacatccaaaccagctccactaccagaaacaagcaatcgtactccatcggctgcagacagtcataatgttgaagaagaaatacaaccaactgctcctgctatcccgctggagaaagccaagcaaagattagccgatcgccgggagcgcaaggatattgaagctacaatccaagtcaatcggcaaattgtgcatgaagagaaggctaagcttgatcagctatctgaaggccggatcaaatctaatattgatcggctcgaagctcgcaagattgagctcttggctcaacttcaagaatgcaatgctgaactggatctagagcacaagaagctagccgatcttcctcagtctattgaagaacaaaaagcaaagctgaaatcagctatcaagaatgtcgctgatatgactaaatctctgaaaaccatccctggaaccgatgctcaagatgctcaagccattgaagaagtagaacaaattaggcaaagagctatatcagctatccagcgttacttgtctcaatga

SEQ ID NO: 34811 - DNA, 714 bp, Oryza sativa
  Clone ID: PAT_MRT4530_38791C.1
cccacgcgtccgccattcatttcgcaatggaagatcagagcctgaagcccatccgttgcaaagcggcggtctgtagagcggccagtgagccactgatcgtcgaggagatcgtcgtcgatcctccgaaagcctacgagatccgcatcaagatcatctgcacctccctgtgccacaccgatgtcaccctctggcacaaggtagaccctgcctttccaagaatcttgggccacgaggcctacggggtggtggagagcgtgggggagaacgtggaggggctcgcggcgggggacacggtggtgccgacgttcatggggcagtgcgactcgtgcgccagctgcgcggcggagtggacgaaccagtgcaccgccgtgccgttcaccatgggccccgggatgcggcgcgacggcacaaccaggttctgggacggcgaagggaagccgctcagcgacacggtggccgtcaccagcttcagccagtacaccgtcgtcgacgtcaaccaggtcgtcaaggtcgaccccgccgtgccgcccaaaatcgcctgcctcctcggctgctgcggcggcaccggggtaggagcagcatggaggttggccaaagtgcaacccggttcgtcggtggttgtcttcgggctgtgatccgtcggattggcggtagtgcaaggagcaaaaatgtgtggagcaacgaagattatcggtgttgatttgaatcctaaca

SEQ ID NO: 34812 - DNA, 2120 bp, Oryza sativa
  Clone ID: PAT_MRT4530_38792C.1
tcactgagacaaatatcgctggatagccgatatagcttttcgcctaatttgttctacttcttctatggctagggcgtcttgagcatcggttccagggatgacttttaaacacttggtcagatcaacaacattttttatggccgattttagtcttgccttctgctcttcaacagattttgggacatcggctagttttttattttctatgtctagctcggcattgcattcttgatgttgtgccaggagctcaatcttccgagcttcaagccaatcaatattagacctgatcggaccttcagataattgatcaagttttgctttttcttcatgcaccagttgccgattgacttgaattgtagcttcaatatctttgtgcttctgccgttcagccagtcttaacttggttttctccagtttgaattgatgttgctcaagataaacggctggagtgaggatatcagctagctcatctgggatcagagcttgaatctcatgaagccgagtcctaattgagccacaatcaactagcaagctatccagcgatgatgcttctagccgatgagaaatatcttctagaatttttgggatagcaggagcagttggttgaacttcttcttccacatggtgactcactacagccgatggagtctggtcacttgatgattgttgtacagaaagagaaggaggagaaggaggtggtggagctggtttagatgttgttgcagccgatttcttcttcacagcagtcttctttttttcggctgcgacctgatcaacatcgtcttcaattacttcttcatccagagcttgttcaatggatggatctagagcaggcagatcatcagctggcgtggttttcttcgtcttagttttcttctttggagctggggctgaagtatctacagccgatgatctagttttcctctttttgccggcatcggctagttctctgatgagcccttgaagaagagctgaagtcttgggggcattatagccgatgacggggggagatggcccacctccattgggaatcaatcctggggcaaactcaatatccttgccactgttgctctggataggaggagaggattctgttgtttgagggacaacatctggaaagaggtctgtcatatacatagaagccgattgatggaataagtgcggcttccattcgccccaccatctgtcaaatgctttgcttctgaaggttgccagctttatgttgtcaatgctgcctagaggaggttcttggagattaagcagccgatccatcattaaggttgatgagatttctcctcggcactggatttggatgtttctcccttgatggatgccgacaggaaggatacacggactgattgcagatgagaaaatttctctgggcttttgatatatgtcattgttgatgtcttcaaatctgaagtccaatggattttccagaagtgttgaatcttcatagagaaaccagactcgagcatccttttggaacccctcaaaaaagctgcaaaaccaatctttgagtagctcagccgatagctttgctcctgcatcagttggtgtagaagcatactctccataggatgtgcatctccgatgagtgagttcttctccgtcattgttcacaatcggctctaatcttgggaattcagcttcttggcccttgtatgctgctacatagcctgaccagccacctatgctcttggtcttgaagtcgtattggttcttcgtattcgaactcatagggttggccgatgaggtgacatccaggcccgtgatcatgctgatatctatgagagttggggtcatcggcccttgattaaacaagaaggcattgatggtgtttgaccagaaataagaggcagctgccatcaggggttcatctttggtcgagtttgctatggtgaggtcgagtgcttggccgattccaatttcgtcccagtgaactcttttgcttgccgacatacgcttgaactcagcatactcggctgatggcgcgacagatgggctggtggaggacgacatcgctgcgggcggagatctcgccggagatgaagtcgcctggaaatcgctttttgcgtcggaggaatcgccggagagagagaaggcagtgtttcgcttaa

SEQ ID NO: 34813 - DNA, 452 bp, Oryza sativa
  Clone ID: PAT_MRT4530_38793C.1
tttgccggctatgtaataaagtgatggcagatgcggtgttgacaagcaagtgctgcttcgacagtttctgtgataaatgtgagtaaattctgtatttctccttaactctttgctgtggatatgaacaatgtcattactttgatattcgaaatgtggctagtcatgcttcaaattagtcacagaagcatgttgttttggacattgacgtggtatttgacaggaaaaattacgaatagttattgttgtacgacctccatccttcaatatatgatgttggttagttcaaaattgaactaaacaacatcatacataaaagaacagagggagtactatatttgtaaaactcgataaaattatagcactgttaagtactttccaagacaaatataaacatttagtaatttaccaatactcaaaactttgtctaaatacattgctaaacatgttttcac

SEQ ID NO: 34814 - DNA, 1397 bp, Oryza sativa
  Clone ID: PAT_MRT4530_38794C.1
gcccatccgttgcaaaggtacacaattcacttacagagatcagatctgcatagctccttggtactactactactactactcaattcctcacgcatgatatatgattgatacatatcgacgacgacgatgcagcggcggtctgtagagcggccagtgagccactgatcgtcgaggagatcgtcgtcgatcctccgaaagcctacgagatccgcatcaagatcatctgcacctccctgtgccacaccgatgtcaccctctggcacaaggtagaccctgcctttccaagaatcttgggccacgaggcctacggggtggtggagagcgtgggggagaacgtggaggggctcgcggcgggggacacggtggtgccgacgttcatggggcagtgcgactcgtgcgccagctgcgcggcggagtggacgaaccagtgcaccgccgtgccgttcaccatgggccccgggatgcggcgcgacggcacaaccaggttctgggacggcgaagggaagccgctcagcgacacggtggccgtcaccagcttcagccagtacaccgtcgtcgacgtcaaccaggtcgtcaaggtcgaccccgccgtgccgcccaaaatcgcctgcctcctcggctgctgcggcggcaccggtgagcctgagattcgcagatatattgaacctgcttggggtaggagcagcatggaggttggccaaagtgcaacccggttcgtcggtggttgtcttcgggctgggatccgtcggattggcggaaaagagttcggtgtgactgatttcgtcaatccatcccaactcggcgacaaatccgtcagtgaggtgatcaatgcgatgacagacggtggcgctgactacagcttcgagtgcatcggtatctcgtcggtgatgactgaggcaggacggggcaagacgatcattctgggggtcgagaaggacagccagccgttgtgcctgccgtccttcgagtttctgttcggcaagtgcgtcatgggatcgctcttcggtggggccaaacccaaaactgacatcccaatcctcgccgagaaatgcatgaacaaggagctggaactggagaagctggtcactcatgaggtaggcctgacggagataaacacagccttcgatttgcttctgcagggaaagagcctgagatgcatcatatggatggacaagtgatggccacaacttggggtggggatgcttttcctgttcaggttctgaatttggttgattgatgtgttcaataagtatgctgtttatttcgctggtgttgctgaaacaaggagtaatacactaatacgtccatcagccatcacgaataactgatgtacacttaatttcatgggcggttagcagcatcctcctttctgaatcaatgcagaatattttcattcc

SEQ ID NO: 34815 - DNA, 1974 bp, Oryza sativa
  Clone ID: PAT_MRT4530_38795C.1
atgtcgtcttccaccaatccatctgatgcgtcatcagccgagtatgctgagcatctctccaaccgaatcgcgattccaggcttatcacacgaaaactactactttctcggcctagtcggcaatcctgatcccactgagtttatcattggtgaaaccaataggattcccttcagattaaccaacccagatctaggtcattggaagaacacctttaaatcttggccatctctagagaaagttccacccgagaaaagttggaccacatggttcaaacctgcggtcttacaaataaattggcagttcgtagccgaagccttggagacaaaaagacaatttcctttaggcaaaatcctcctcggctacttgtaccaaatgctaaataatgcatcggctaagctaattgtcggctcagtagtcggagcgggtggaccatggtggctgctgcaatcctggctaaacttggtagtcatgaggtttgtcaatcggccatctgtaacagaaactgaattcccaagattagagccgactgttaacgatgatggagaggaactcactcatcggagatgcacatcatatggagagtacgcctctacaccaactgatgcaagagcaaaactatcggccgagctactcaaagattggttttgtagcttttatgaggggttccaaaaggatgctcgagtttggtttctctatggagactcaacacttctggaaaatccatgggacttcagattcgaagacatcaacaatgacatatatcaaaagcccagagaaatcttcttatctgcaatcaccccatgcatccttccagtcggcattcatcaagggagaaacacccaagtttcctatgagttttatcatccaatgagttctgctagacaatttggaatgggccaactctcaatcggcttattctttgccgataagatccaatgccgaggagaaatctcatcatctttaatgatggatcggctgctcaatctccaaggacctcctctaggcagcattgacaccataaagctggcaacctttaggagcaaagtatttgacagatggtggggtgaatggaagctacacttattccatcaatcggcttccatgtatatgacagatctctttctagatattgtccctcaaacaacagaatcttctccccctcaccaaagcaatagcggcagggatatcgagtatgccccaggactgatccccaacggaggtgggccatctccccccgtcatcggctataatgcccccaagtcttcagctcttctccaagggcttatcagagaaccagccgatgccgacaagaaaagaaagaccagatcatcggctaaaaagaagactgctgtgaaaaagaaatcggctgcgacaacatctaaaccagctccaccagtcttagccgatctttttccttttgacatcaaagattatcttgatgagggagaagaagacaccacaagcaaagccttagcccctttatccgatgacgtgaagaaaactctggaaaatatttctcattggctagaggcatcatcactagatagcttggtagttgattgcggctcaattaggactcagctacatgaaattcaagctctgatcccagatgagttagccgatatccttactccagccgtttatcctgagcaacatcaattcaaattggagaaagccaagttaagactggccgaacggcgagaacctttcagaaggtccgatcaatccaacattgatcggctcgaggctcgcaagattgagctcctggcacaacttcaggaatgcaatgccgaattagatctggagcacaagaaactagccgatcttccgcggtctgtagaagaacaaaaagcaagacttaaatcggctatcaagaatgttgctgatctgactaagtctttgaagatcattcctggaactgacgctcaagatgcccaagctatttctgctatccagcaatacttgtctcaataa

SEQ ID NO: 34816 - DNA, 718 bp, Oryza sativa
  Clone ID: PAT_MRT4530_38796C.1
aagaaagaagaagagcaatggcttcatctcaggggactcaacacttctggaaaatccatgggacttcagattcgaagacatcaacaatgacagatatcagaagcccagagaaatcttcttatctgcaatcaccccatgcatccttccagtcggcattcatcaagggagaaacatccaagtttcctacgagttttatcatccaatgagttctgcgagacaatttggaatgggccaactcccaatcggcttattctttgccgataagatccaatgccgaggagaaatctcatcatctttaatgatggatcggctgctcaatctccaaggacctcctctaggcagcattgacaccataaagctggcaacctttaggagcaaagtatttgacagatggtggggtgaatggaagctacacttattccatcaattggcttctatgtatatgatagatctctttccagatattgtcccccaaacaacagaatcttctccccctcaccaaagcaacagcggcagggatatcaagtatgccccaggactgatccccaacggaggtgggccatctccccccgtcatcggctataatgctatcaaacatgatgtacagcgtaatcaacccgatcttggaagttattgaaaaagtcctgtgccacgtcactattaagatttcctcgctacagcccctgagcaccgtcaccttgaactccatgcaccccgt

SEQ ID NO: 34817 - DNA, 918 bp, Oryza sativa
  Clone ID: PAT_MRT4530_38797C.1
atgcccctaagacttcagctcttctccaagggcttatcagagaaccagccgatgctggcaagaaaagaaaggaccagatcatcggctgtaaatatttcagccctagctccaaagaagaagactaagacaaagaagaccacatcagctgatgatctgcctgctctagatccatccattgaacaagctctggatgaagaaataattgaagatgacgttgatgaggctgcagccaaagtcttagccgatcttttttctttcgacatcaaagattatcttaatgaaggagaagaagacaccacaagcaaagccttagcccctttatccgatgacgtgaaaaaaactctggaaaatatttctcatcggctagaggcatcatcactagatagcttggtagttgattgcgggtcaattaggactcggctacatgagattcaagctctgatcccagacgagttagctgatatccttactctagctgtttatcttgagcaacatcaatttaaattggagaaagccaagttaaaactggccaaacggcgagaacgcaaagacactgaagctaaaatccaagctaatcggcaacttgtgcatgaggaaaaatccaaacttgatcagctttcagaaggtccgatcaaatccaacattgatcggctcgaggctcgcaagattgagctcctggcacaacttcaggaatgcaatgccgaattagatctggagcacaagaaactagccgatctcccgcggtctgtcgaagagcaaaaagcaagacttaaatcggctatcaagaatgttgctgatctgactaagtctttgaagatcattcctggaactgatgctcaagatgcccaagctattaaagaagttgaacaaattaggcaaagagctatttcagctatccagcaatacttgtctcaataa

SEQ ID NO: 34818 - DNA, 440 bp, Oryza sativa
  Clone ID: PAT_MRT4530_38798C.1
acaacagaatcctctccccctcaccaaagcaacagcggcagggatatcgagtatgccccaggactgatccccaacagagccccagctccaagaagaagactaagacaaagaagaccgcaccagctgatgatctgtctgctctagatccatccatcgaaaaagctctggatgaagaaaatattgaggatgatgttgatcaggctgcagccgaacttcctcctcctccttcttcccctgtacaacaatcattgagtgaccgaactccatcggctgtagggagtcatcatattgtggaagaagaacaaccagctgctcctgctatcccagttctagccgatctcttctattttgatatcagagattatcttgatgaggcagaaaaagatacttcaagcaaagctctagctcccttatctgataatgcaaagaaaacactttaa

SEQ ID NO: 34819 - DNA, 291 bp, Oryza sativa
  Clone ID: PAT_MRT4530_38799C.1
gtggcccacatctcactatcaggactaacttgttcagccatagccagcagctaaactccacagtttggtgatctctactttggatcggaatctgctcaagctcaagctctatgctttacgtccatctagatatgtatctaccctagtactatgtgcacccgtacttacacctgcgttctttatgatttcgtatatgttcggaattaaaataagctcagatatcatcataatgtgaccattgtgaaaacctttttggggtggattataaattagaaatcaagttgtctttca

SEQ ID NO: 34820 - DNA, 1923 bp, Oryza sativa
  unsure (1)..(1923): unsure at all n locations
  Clone ID: PAT_MRT4530_3879C.1
atgctcctcgagcatcgatcgctgatgtttcctgcagcgctgacaattcgaagaagaaagagaaatcaaagaagtatggcagagttcttgaaccagatgagcctttcaagctgttcctaagagatcgggagacgacggaattcctgacagcaaaagaggagagacatttgttcagtaaaatacagattcttatgaaaatagaggaggctcaccggaaactagaagttcaatgcggccgtgagccgacattggcagagtgggctgaggctgtagggatgagcagcaaggagctgcagtcctctattcgcaccggaagacggtgccgggagaagatggctcgatcgaacttcaggcttgtgattcatgtagctaggaagtatgaaggatatggtcttgacatccaggaccttgttcaggatggatgcagtgggttgatgaagacctttgagaagttcaatcccagcaaggggtgtcgattcccgacctacgcatattggtggatacgccaatcaattaagaagtcaatcttcaagaactcaagactaatccggttaccggagagtgtgtatgcgcttctgagaaaggtgggcaaggcaaggatggaatgcatcatggaaggggagcaacccaccaacgcgaacgtagcgaggcgcgccggcatcaccatcgagaagcttgcgaagctccgagcgaaaacccggaaaccccggtcgatgcaggatcatgtctggtcagatgagggtgtcaccttccaggagatcacagaagacccaaatgtggagccacctgacctgagtgtggacaggatgatgatgaggcagcaggtgagggacttcctggggatcctgagccccagggagaaggagatcatcgagcaccggttcgggatccacgatggcgagccgaagacgctacatgtcatcggggacatgtttgggctgtccaaggagaggatcaggcagctgcagaaccgggcgctggagaagctcaagaggagtgcatccttgcaggggtttgatgtctactttgatttgctaacctgaagaagaaaggccaagcagctcatttggtttcagaaactttcagtcaagttgtccatacaaaacagcagaaacacatacacactgtagctttctagacctattatacatatatactacacacccagtgacacgtactgtacaagtatagtgctagatctgcagaaagaaatgtggtacacggattcagagtttcagatggcatccttttttgcttatgtaagtaaatttcccagcaagctgctgttggtgcttatactgatactgcaagtctgcaatgcaaagcaaccctcattgtaattaaggataatcatgtacatttttttacccttaatttgagctgatcaggcgctgtaattataacggaacaggtcctggatacatacttgtagcattaatacctttcacttggcactatgacaaattgcgcccaatgaagcttgccacaggtgaaaattacagcatttcatcacaaaaattcgaatgccagaggtcaacagccacaactagctccacatttgaaagaagggaataacaattctgtaagtaaggtattgatgcctatttcgtaggccataatagctacattgatctgttctccctaacagtagaagtgcgatacatgtaacagtcagaggcaggcagttagcaacagcggaggagatgctcctgcacataatactacacagagaacgcctagaagtcatgctaccatggcaacaacaggtttaccaaggaggaagcttggtggttactaaacacatgagacctcgatgaaaggttggcatcgnggacgtgccttggatagctgaagcctgtggaggtcgacacaaacataatttacacctcctgagctgcaaccgccttacgcctaagatccaat

SEQ ID NO: 34821 - DNA, 177 bp, Oryza sativa
  Clone ID: PAT_MRT4530_387C.1
atggacctggacctggacctgggcctgacttgcttggatgttcttcattctgcaacatgtttggaaactggaacgacaccagatcagagaagagcagagaggatccgagagctcaatgattgggagctcaaggaggagcatgggataggactggagcaatcaacgatcaagagatga

SEQ ID NO: 34822 - DNA, 205 bp, Oryza sativa
  Clone ID: PAT_MRT4530_38800C.1
agccgcctaccacctgctccgcctgccccaccgagccacgcagcttccccacacggagccgcgctccctctccctccgtcgcattcgcaccaccgcctccctcgactccgatcacttgcccgccacgctccgcctccctcgactccagcgactagcccgccactccacctccctcaactctagcaacttgcccgcctcgctctag

SEQ ID NO: 34823 - DNA, 3437 bp, Oryza sativa
  Clone ID: PAT_MRT4530_38801C.1
atgtctgtcaacaaaacggtgaaactgaccatgcccgttctattggcattgttgctgttgtcctatggaactggaagcattcgttgcacgacgatcgctgggaacagcacggacgtgctctcgttgctcgatttcaaagccaccaccaacgatccaagaggagccttgagctcctggaacaccagcatccactactgttggtggagcggcgtcaagtgtaagccgaatacccgagggcgagtcacggctctgaaactcgcgggacaaggtttatcaggccaaatcacctcctttcttgggaacttaacggaccttcacacacttgacttgtccagcaataatttctctggccaaataccccctttaaccaatcttcagaagttgaaataccttcgtttgggccagaattctttggatggtataattccagattcactcacaaattgctccaatctattttatttagacctctctaataacatgctagagggcacaatccccccgaaaataggtttcttaaataatctctctgtattggccttccctttgaattttctcaccgggaacatcccctcaacccttggcaatcttacaaacttgaatataatgctcctcgcaaataataagattgacggaaacattcctcaagaactggggcaactgtcaaacttggggtggttgtccctaagtgaaaacaacctatcaggtggttttccgcagggattcttcaaaaatctatcttctcttcaaatattaagcattcagacgaccttgcttggtggcacattgccatttgacattggcaatacactccctaatctcacaaaacttttcttggctgataacatgtttgaaggtcatatcccagcttctttaggcaatgcatcattgctacgagggatagatctatccttaaataattctactggccatattcccaactcttttggacggctttcaggtttgtctacattaaaccttgagacaaacaagcttgaagctagggacaaccaaggttgggaattcttagaagcgctcagaggctgcaacaatttaaatgtgctctcactagctgacaacctgttatttggggacgtaccaaattcaattggtggcctatccatcaacctgacaattttattgttgggcggaaacaacctaacagggatagttcctctaagcattgggaaccttcaaggcttaatttcattggggctagataataatggtttcagtggtacgattgagtggattggaaaactgaaaaacttgcaatctttatgccttcgaaataacaatttcactgggcctattccatactccattggcaagcttacacagctgacagagctctatctgcgaaacaatgcatttgaaggtcacataccgccctccttgggaaaccctcaactactgttaaagctggatcttagctacaacaaacttcaaggtaccatacctctagagattagtaaccttagacaactcatctacctacaacttgcatcaaacaagcttaatggggaaatacctgatgcattggggatgtgccaaaacttagtaaccatccaaatggaccaaaactttctcagaggagacatgccaatttcttttggcaatctaaatagcctaaccatactaaatatatctcataacaacttatcaggcaccatcccagtagcactaggctatctacccctactaagcaagctggacctttcttacaacaacctccaaggagaagtaccaacagtgggagtattcagaaatgtgacatctgcttatctcgatggcaattcaagactttgtggaggagtgacagatctccatatgctctcatgccctcaagtttctaatagaataaaaagggattctgatataacaaagagggactacaatctggtcagattattagtaccgatatttggctttgtgtcactcacagtgctgatataccttacatgcctagcaaagaggacatcaagaagaacagacctattgttgctttcttttggaaagcagttccctagggtttcttacaaggatctagcccaagctacagggaaattctcagagtcaaacttaattggaagaggaagttacagttcagtatatagagcgaagttagctccgactaaactacaagttgctcttaaggtttttgaccttgaagtgagatgtgcagataaaagtttcttatcagaatgtgaggtcttgagaagcattcgacatagaaaccttcttcctgtcctaactgcatgttcaacgatagacaatagtggcaatgctttcaaagctctgatttatgaatacatgcctaatgggaatttgaatatgtggttgcataaacaatttgcaagtgttgcttcaaaatgtttgagtttagctcaaagagtgaatatagctgtggacattgctaatgcattgtcctatttacaccacgaatgtgaaaggtctattgtccattgtgatttgaagccaactaatattcttcttgatgatgatatgaatgcatatttgggagacttcggcatcccacgcgtccgcccacgcgtccggttattgagtctagagtcacctcacttggacattctagtccaaatagctcaattggattgaagggaactatagggtatatagctccagagtatgctcagtgtggccatgcatcaacatatggggatgtttatagttttggaatagtacttctagagatgctgacaggtaaaagaccaacagaccctatgtttgagaatgagctcaacattgtcaactttgtggagaagaacttcccagagcagataccacagataattgatgctcaactccaagaagaacgcaagagatttcaagcaacagccaagcaagaaaatggtttctatatatgcttgttgtctgtattgcaagtggctctttcttgcactcgtctgatcccaagagaacgaatgaacactagagaaatagctattaagttgcatgcaattaaaacttcctatgcagaagcgaccaagcgagaaattgtaggctttgaatgcgatgtggatgaactgccaaacaggccatcagcatacacagatacactggatgtgagaaactactcttctgtacagcaacatggctgtgtgcctgtggtggatggtgtattattggtgtattatttgggtttcgcaaacttggggaacgtcttttacagtttgtctaactgggataatgggattgcgaaggatctaagctttgattctctttctgaacagcttgtcatgttggtaatcactagaggtcagattgaggaaaccctcggcctcgggtacctgaaccctgcagcgcgaagtgcgccgccgctgcagcgcctgcgcgcgagacgtggactgtggagtggtcgggtgctacggtgctacctccgcgtccgccgcaacgtcgtggagtcgcgctgttaa

SEQ ID NO: 34824 - DNA, 222 bp, Oryza sativa
  Clone ID: PAT_MRT4530_38802C.1
atgtcagccgccctctcctcttttcctctcctcttctcttctctcttctctcttctcttcttcggtgaggggaggccagcggcgagcagcaaaagagcacggcaagcgggcggcacagagcaggatgccacattagcgaaaccaccaatgtatactgctaagggacctccggtgaacggtttgaatgagtttaggggcgaacatttctggttttgtggttga

SEQ ID NO: 34825 - DNA, 309 bp, Oryza sativa
  Clone ID: PAT_MRT4530_38803C.1
atggcagatccagcagccatcgtcgcgctgtgccggacctgtactgggtcgaggtacgaagtgacgacgacgcactacacacgcagggtgctcgtcgaaatgccacggccgtctcctctcctcgccgtgcaatgtgccgagctgatcacgcgcgctgtaagtgtttcacgggattctggatgcttcaccctgcaggagagacatagcgctgtctttgatctcgccagatgcggattcgaggaggaaggctaccctgttgtccactacgagtcagcacttcagaccgccaagtcgacaacagttagatag

SEQ ID NO: 34826 - DNA, 2238 bp, Oryza sativa
  Clone ID: PAT_MRT4530_38804C.1
cgagtgtctggactggtctcggtccaaacccgagcagtgcccccccccgcccacaccctatcccctcctgaccttgagcgcccgccatgggtaactgctgccggtcgccggcggccgccgcgagggaggatgtgaagacatcgcacttccccgcctctaccggaggcgggaagaagaagccgcaccaggcgcggaacgggggaggcggaggtggtggtggaggagggggaggctgggagaagaagcggctgtcggtgctcggggaggaagggagcgaggtgaacggcgggatcgaggagaagtacgcgctggacagggagctggggcgcggcgagttcggggtgacgtacctgtgcatggaccggtgctcgcgggagctcctcgcgtgcaagtcgatctcgaagcggaagctgcgcaagcccgtgcacgtggaggacgtggagcgggaggtcgcgatcaggcaggacgtgctcatgagcgccatcatcatgtgcccgcgggaggcgtgcgaggacgagggctccgtgcacctggtcatggagctgtgcgtgggaggggacttgttagacggcgtggtcgccaagggccactactcggtgagcgcctcaacggtgatcactttctccagtgtcgtttacgcctttgtgctcgccaaccagaaccccttcctccgtgtccttatccccatgaacttccgctgcgaaaacagaatagggtaggaccctcccgagttcgcttacctctgtaactacctcttctgccaagcacgcgccgaattttctgaaaatgtgtgtactccatattagatggctcctgatttgctgaatagagactatggacctgaaatagacatatggagtgctggtgtcatcttgtatattttgttatgtggagttcctcctttttgggctgctttgctcttctgcaaattcttaccaagcaaaattgcagagactgaacaaggagtggcacaagctatacttcgtggaaatatagattttaagcgagaaccatggcccaatgtttctgataatgctaaagatctagttcgtcagatgcttcagcctgacccaaaactcaggctaacagcaaagcaagttcttgtaagaaactggctgttgatgaatgtcgagaatagtatgagatgtttaattgttgctataaattcaagatggaaacaacttagaagatatactcagacagtgatatacaggcttggtactcaagatagctgtttcacttctgttgtcgcagagcatacctggcttcaaaatgctaagaaagctccaaatgttccacttggagatattgtaaagtcaaggctgaaacagttttcaaggatgaatagattcaaaagaagagctctaagggttattgctgatcacttatcagccgaagaggttgaggacataaaggacatgttcaaggtgatggatacagataatgatggtatagtctcttatgaagagttaaagagtggaatcgcaaaatttggttcccatcttgcagaatctgaagtgcaaatgcttattgaagctgtggatacaaatggtaggggagcactagattatggtgaatttttggccgtttctcttcatttacaaaggatggcaaatgatgagcacctccggcgagccttcctattttttgacaaggatggcaatggctacattgagcccgaagagcttcaggaggctctagtggacgatggggcaactgacatcatggaagtggtgaaggacatattgcaagaagttgacactgataaggatggcaagattagctatgacgaatttgtagcaatgatgaagacgggcacagattggagaaaggcgtcccggcattactctagaggaagattcaacagccttagcatgaagcttataaaggatgggtccgtaaaactggtcaatgagtgaaggcctaagggtgataattttatgcgtgtagtttaggcctttgggctcgctaagcagaaaccctttctccttttcttctcatgattattttgcgtggaaatttagataggtggaacctcccgattggcttacctgtgtaattagctcatctgacaagcacgcgccgaatgatataccaaatgctgtgcgcctgcttagccctcgtggccttgttcctatggggtacctgatgccaagtgttgtacaatgttttgtcgtgttcaaatgcaatttgttcatctggggtgcatctgaaggggtaaaaaaaaaaaaaaaaaaa

SEQ ID NO: 34827 - DNA, 440 bp, Oryza sativa
  Clone ID: PAT_MRT4530_38805C.1
caacggcgagcttcccccggacagctgcggtattagtacccacactatcagttgtaaagaaggcacataagagaaggatgtgcttacactgtgcattcaagaccatcctaactctatggtaaccacattgcaggaaagagtgtgcccaagctgtgccgtggctcctcccaaatggatggttgctgacaaatgcatgatccgcatctcaagagaagaggctcagaggctcatagcatgaacagaggagatggaagttcggtcattcactgccaaatccaatacaagagctgaccaagacgtttataatgccgccagaatcctcttgagtcggcttccggataaagaataactaaataaatgaatgcaacaatggttcctgctatgtgacggccatcttcgactaaggatggataaccctctgctttaccctgaaaaaaaaa

SEQ ID NO: 34828 - DNA, 246 bp, Oryza sativa
  Clone ID: PAT_MRT4530_38806C.1
atggcgagccgcgccatcgtcacggtcgggttcacgagcccgagggccacgccgtccgcctctccgtcgccgttttccgccgcaggaaccccgttcgcaccgcacgccggtgagcttcgccatggccggcaccctagccatccatgccgccgcgccgccgccctccaccgccagccggtcgccgccttgcgccaccgctgcgtcaatgccacgtcgccgcgcgccgtggccgccgggccggcttga

SEQ ID NO: 34829 - DNA, 1072 bp, Oryza sativa
  Clone ID: PAT_MRT4530_38807C.1
atgaagttaagcatgaaacgacccccgtacaaccgtacttctcgaatggacttctctttcccgggagcgccagaactcctctcactgctagaaacatggacgcccctccccctccccactgggccggccgaaggccacggcccagctaagccggctgccccacgcccctctcccctagggtcaccgacaggtgggccccacctgtcgggcccgtctcccacctctggctggcgccgctgcgtcccgcaaccgccgctctcgcctcccggagccacgtcgcccacgtcgccgccttcccctcgtctcctgtacccactccctctctctcccgcccgcgtccgcgcatcaccgccctcccctctctctttttctccatttcgccgagctccccgtgccctccatcgccctagcgccatcgccctccactccgccgccgccgccgctactccgctagccgccatggcgagccgcgccatcgtcacggtcgggttcacgagcccgagggccacgccgtccgcctctccgtcgccgttttccgccgcaggaaccccgttcgcaccgcacgccggtgagcttcgccatggccggcaccctagccatccatggtttctctccccctctctaactcctccctttttgttcccttaggtgatcccggagctcgtcccgccgtcgccatcgccctccgtcgctcgccgtcgtcaatattcttcggtgaggcccatcctcctctccatctctctctctcgcgcgccgcttagccgccgcgccgccgccctccaccgccagccggtcgccgccttgcgccaccgctgcgtcaatgccacgtcgccgcgcgccgtggccgccgggccggcttgagccacccgtgtgcgccggccacgtgccacccctctgccgtccgatccaccccgggtcgatcggggccgtccgttcggccgcccgcgtggctgccgcgtggcccctgcatcggtgccacgttagctccacgtggtgcgccgcccctttcccggtccgtcgaaccggtccaccgcggaccgccacccgagtcactgccatgtggggcccgcat

SEQ ID NO: 34830 - DNA, 924 bp, Oryza sativa
  Clone ID: PAT_MRT4530_38808C.1
atgtcacccctctctctctctctttcccctctactctccttcctctctcatttttcgcctggatgtggatggcgctgcgtcttcgacgcgacagggaggagggccggtgtggccggcggctggcaggggaggagcgctgcggagaggagggccgatgcgacgggcgccgccgccgatggctgctgtcgcgcggatggccgcggcggtcgtccccctcaaccgtcggcctatacgcggcccagcaatccactcccgtccacgctcctctccgtgcacctccgcgccggggacaagcggcgcgggtatgcggagctgtggtggtgccccggggagatgtgcggccatgtctggcttgacgagcaaccggtggggccctggctcgccggcgtcgtcgttgtgcgcggcggcgccgaacttggcccagccgcggcgctcgacggcgcacttggtgacgcgcgtgtgcgcgacctcacggacacgggtggtggtggtcaccttcaccactttcccctcctcgttgaagcgatggatggattggcgccggcggcgatgtcggaggcgctgctggtcttcgcgagcgggagatccatcggcggcgccggtccaggacgacgacctcatcttcgccgcggcgagagccgggagttcgcgtggatctacgactacgaggatgcgccgatgagtgcgccggtgtggacaatgctcagggatttctccaaggtgagggtgcaggagactgaagaaaaacagggtttgggaattggttattgggttgatgcactgcaacagaagctgcatttctcgattccgctggtgagggaaggggatgggtcgatagaggttgttgcagacaacaatggatggagcttcatgggtgaggatgtggttgcgcgatcagggatatcgaggaagagtaggatgtag

SEQ ID NO: 34831 - DNA, 318 bp, Oryza sativa
  Clone ID: PAT_MRT4530_38809C.1
atgcgatctgacccctcctcccatcgtcgctggcgacgagccgccggaaacccggggaagagaggttgggggagaaatggcgacaccgagctaaccgtggcagaggccaaggaggaagaggaagccacccacgacggcggtggcatgcacttccagtggctgcgcgccgcggtgctaggcgctagcgacgatcttgtctccactgcgtcgctcatgctcggcatcggcgcggcgtgccccgccgacgagcatgccgtactcctgtccgggctggccggcctcgtcgccgtcgactggccatcggcaagccgtcttcct

SEQ ID NO: 34832 - DNA, 1426 bp, Oryza sativa
  Clone ID: PAT_MRT4530_3880C.1
gcacgaggcgccatctctgcatcttcttcttcttccctcttctcctgatcatctctcctcttcgaagctttcgtttctctcatctgtcaatcatgtcggcctactgcggcaagtacaaggatgagttgatcaggaacgcggcgtacattgggacgccggggaagggcatcctcgccgccgacgagtcgacgggcacgatcgggaagcggctggcgagcatcggcgtggagaatgtcgaggagaaccgccgcgcgctccgggagctcctgttcacggcgcccggcgcgctggactgcctcagcggcgtcatcctgttcgaggagacgctctaccagagcacccgcgacgggacgccgttcgtcgacgtgctcgccgccgccggcgttctggccgggatcaaggtcgacaagggcaccgtcgagctcgccggcaccgaccgcgagacgacgacacaggggcacgacggcctcggcgagcgctgcaggcggtactacgccgccggcgcgcggttcgccaagtggcgcgccgtgctcagcatcggcagggcgtcgtccaggccgtcgcagctcgccgtcgacgccaacgcgcagggcctcgcgcggtacgccatcatctgccaggagaacgggctggtccccatcgtcgagccggagatcctcgtcgacggcgagcacggcatcgaggcttgcgccgaggtgacggagcgcgtcctcgccgcgtgctacaaggcgctgagcgaccaccacgtcctcctcgagggcaccctcctcaagcccaacatggtgacgccgggctccgacgccgccagggcgccgccggaggtggtcgccgagcacaccgtccgcgcgctcctccgcaccgtgccgccggcggtgccggccatcgtgttcctgtccggcgggcagagcgaggaggaggcgacgaggaacctgaacgccatgaaccaggtggcgagcaggggcaagaagccatggtcgctgaccttctccttcggccgcgcgctgcagcagagcacgctcaaggcgtgggccggcaaggcggagaacgtcggcaaggcgcaggcggcgctgctcgcccgctgcagggccaactcccaggcgacgctcggcgcgtacgccggcgacgccgccgccggcgagggcgtctccgagaacctccacgtcaaggactacaagtactgaggctttatgacgaattgatatttttgttttataatgtagtgtaacaataagctgcgattgcttctatgctctcgcaatgtcgcgtatttgattttgatttttgcttggtcttgtttagcgagtgttttgttttggttctgaattttgaaatgaattcaaagtgattttgtctgctgtttaacagtgaattaaaaagtggagtactacctgatgattccaggacaaaaaaaaaaaaaaaaaaaaaa

SEQ ID NO: 34833 - DNA, 236 bp, Oryza sativa
  Clone ID: PAT_MRT4530_38810C.1
ctacatgatatgggaaatgtggaaatgtgggacttatcaggcaatttcttcctatctgaagatgatattggaaagaatagggctgttgcttgcactgcaaagctgcaagaactcaacaatgctgttcttatatctactctgacagaagatctgaccaatgaacacctctcaaaatttcaggctgttgttttcactgacataagtctagacaaggcgtttgaatttgatgattattg

SEQ ID NO: 34834 - DNA, 568 bp, Oryza sativa
  Clone ID: PAT_MRT4530_38811C.1
aaaaaaaaaaaaactttttttttaaaaaaaaaaaaaaaccaaaaaaaaaaaaatccggaaaaaccaaaaaaagggtttgggaaaaaaaaatttttgaacgggaccccaaaaaaaaaagggccaaaaaaaaaaaggttaaaaggaaaaaaattttaattaataaaaggggcggggaaaaaaaatgggaggccaagccaaaaaaaagaaaattcaaaaaacccccccttaaaaccatgacccaaatgaaagggaagggggggaaacccccaaaggggagccccctaaaaaaaaaagcgggtttaaaaacccggggggggccttttcggggggaaaaccaaacaaaaagcttgggaattggcttgaactgggccggttggaacctcccaagggggaaactcctaaggccacggggaggggggaaaaggccccaaagggaagggggccctttccaaaaaaggggggtccccaacccgctggggaaccccaaccccaagggccccctggggaacttccaaaagggggcgaggggggccgggaaaaaattggggcggaaccccttggggcaggg

SEQ ID NO: 34835 - DNA, 3066 bp, Oryza sativa
  Clone ID: PAT_MRT4530_38812C.1
atggcggaagctgcactacttgctctttcaaagattggttcctatgcagcaattgaagcggccatggttgctaaatccaaaatttctaatctaatggagctctcagctactgtgcaacggatacggaggcaatttttgatgatgaacttctttatacggaaaatgggtgcctcttacctcagcgatgagctcctgaagggatggatcgcagaggtgcgaatgctggcgtaccgtgttgaggatgtattggacagctttttctaccattctattcaattcaagaaagataagttcctgaataagattgttaagggatcacactatgctgttgtttttaatgcaattgctgatgagttggttcagatagagaaggatattgagcatgtttcaaagttgaaggacatgtgggtttaccctgtcagtcagcttattcctactcaagtcaccatctctgaacaccgatttcctcagtacagttttccccgactaatgaaagatgaggatcttgtggggatggagaataacagacaacacttaaagcaattattcagtcatggaatttcagctctcagggtgatatctgtgtggggtatgggtggcatggggaagaccacattggtccttaatgtatatgagcaacataaggagaaatttgacattaatgtgtggcttactgtgtctcaagcattttctgtggaggctttgctgaggaagctattatgggagataaggcgtagatgtgagctcacaacaccaggtgatggtgatagtgtcaacaaggagcagcaggcttcagatgagactgacaaactggaggtttcacaattgaaagaactgaaggatgagttaaagaaagcattaatgcgaaagagatttatggttgtacttgatgatgtatgggaccgtcaagtatttgacatgatgcatgatgtgtttgaggattttaggaatggaagtcgcgttgtgatcaccacaaggagaggggatgtggctgctcttgctcacgagggttgccacctcaaacttaatccgttagaattgaacgatgccctcctcctgttcagtaaaaaggcatttcctaatagcaatgaccttgagtgccccttaaagctcaaggacctagccacagacattgctaagaaaagcaatgactcatcactgacagagtgccgattggagctaaatgggctagctactgatattgcagagaaatgcaactgtttgcctttggcaaatagcccagcacaggttcaagagctagttgcttatattgtaaagaactgccaggacttattacagatggaaaataatccatctgggcttcagaagcttgctactgatattttaaagaaatgtgagctcttgcctttggtgaaatgctcagcagagttgcagaagctcgccattgagattgtaaagaaatgtgggggcttgccgcttgcaattgcttcagtaggcagcttgctgtctgcaaggatgcaaatagagtgtgtgtggaagcagattcatgatcagcttccatgtgagctggagaaggatgatcaggtccgaggagttctaactctgagctactatgacttgcctggagagctcagaaattgctttctgtactgcagcatgttcccagaagattacctcttgtcaagggaggttcttgtgagacagtggattgcggaaggttttgtggaaaagaaaggggacagcactctggaggaggtggcagagggatatctcatggagctggttcatcgaaacatgcttcaactcgtgtataatgatgagcttggcagggttagtacatgcagcatgcatgacattctgagagagctggctctttctatctccaaagcagagttgtttggcaccgcaaacaattttagtgagatggcacagatgaacacaaatgtgcgtcgcctgtcagcatgtcgatggacacacacagaacatgatttatcaaagataaaattcccacatcttcgaaccgtaattgcactccagtcaagtatggattttgtaccatcaatattatctgaatctaagcaccttactgtccttgagctgcaagactcaggaatcaaccaagtcccagcatcgataggggatctttttaacttacggtacattggcctaaggaacacagcagtaaaatctctaccggactctatagagaagctcgtgaatcttcaaactcttgatgctaagtcaaccaagatagaaaaattacctagtgggatagtgaagctctataagttaagacacttgctgattgacagattaagtgatggtacaagaacggaattccggtatttcgaaggagtggtagcaccaaaagggttatcgaggttggaagaactgcagacacttgagactgtagaagctagcaaggacttgggggaacatcttgaaaaaatgatccaattaagaaatctctggatcggcaatataaaagctgggcactgtgcacagctgcttgcttcattgtctaagatgccgcttctttatagcttgcttctgtgtgcaagtgatgaggaggagaaacttaacatcgaaaaactcgtaccgacatccacaatgctccaaaagctaattatcagaggatgcaccagtgagagcacacttgagtgcccggtgtttcaggaccatggacgacgcctgaagtatctagctctaagccggtgtcaccttgggcatgatgcatttgagaggctcgaaaagtgtgtgccgaacctgacatatttgagtcttaacaaggtgcataccaatggtgcacacactttggttcttcctgcaaagtcgtttccgctgctgaagacactcgtcttgaggaacatgtccaatgtcaatcttctgaaaattggagctgacgcccttaaatgtatcgaaggtttatacattgtgtcattgtcaaatctaaagagcgtccctgaaggcattgaatcccttagctcccttaagaaactcacccttctaggcttgcacaatgacttcaaagctgagtggaacaagaaacgaatgcacgagaagatgaaacatgtcactaagcttcgtgtgtacgagtggtcctaa

SEQ ID NO: 34836 - DNA, 315 bp, Oryza sativa
  Clone ID: PAT_MRT4530_38813C.1
acccaccccattttttactccacacccactaacccctgattcgattggatccaatccaatccaaggggaggggaaacaatggcgacaaagaagaccctccggacgctgggggaggcggatctgagggggaagaaagagaacgtgcgggccgacctcaacgagccgctcgacgacgcccagaacatcaccgacgacacccgaatccgcgcgtacatgcccactgtcaagatcctcctcgagaagaacgccaaaattaaaacgaacagcaaacaggccgtccgaacgaaatcacccccaagtacaacctgaaaccaa

SEQ ID NO: 34837 - DNA, 498 bp, Oryza sativa
  unsure (1)..(498): unsure at all n locations
  Clone ID: PAT_MRT4530_38814C.1
agaagggtcctgtatgccctgtnacgggatactgggacactacccactgggtatanatagcgttgtcggccatatangaatgnaccccantgggataaactgcctgattaaatgggactagactggtgtggtggctgctagccctggggtgtgtggaaagggaccatataatgcgtggcctggaccggatgatggatgtggatggatggctggatggaggaggatatgatggaggcgggcattgaggaaagatgttgcaggattgtgctggagtgatgatgaggatgaggatggagggatggaagggggaagatggaagaagtgggagcncttttgggcttgatgaaggtgattgaaaatgatgtggctgccgctgggaatgctggaagttggccctgaatggtgactgcacttgcaggagctgctgatgtgaaatgtgtgattgaatgctgggagtgatgggtggttgtgctgctggttgcccaaaaaaaaaaaaaa

SEQ ID NO: 34838 - DNA, 1194 bp, Oryza sativa
  Clone ID: PAT_MRT4530_38815C.1
atgccggcggcggcggcggcggaggggaaggcggcgcgcgcccgatcgacggcggcgacagcggacgccgcggccgacgacgtcctgtacgtcttcgctctccttcgtcgacgtcgtccttgcattgggagtttaggtactaggaaacggttttctgcgtttagattgcttgctagtttcgatgtgtgttgggaaaaagagctcggaagcgagctgcatgctagcggtccatcatattcagtctctctctcacttctctgggcaagtcggccgcggggagaggcaggagaggaggagggcgtcggtggccggcgacaggcgatgcagcggcgacgcggaagaaagggagacatcggttgcagaggccgtaggcatggaggagggtgtcggcggccggcgacggcaatacggcggtggcaacaacttgggagaagggtcgacgatgtcgtggtccaagatggctctagcatgggcggtggtgtccccgggacggcaagtcggtggggagccatgagcctctcctccgaccttaccttcttgcctcttccggcggtcatggcggtgtcagcggcagggatagggctgacgggaggggccctgagtcgttgtcgtgcagcagcggcaggggtagggccgggcggcgtgcagagttgtcgtcgcagtggcgcttcgggtcccagtcccctctcctccacgaatcccgccgccgccaccatgaatcgcaccgctgatggcatggagatacccaagttccatcaagccatagtcaccgatcagcgctgctccaccctcgacttgctccacgtgatcctccgcccctcccctatccaaccctcctcgcgaatcgtgactcctcctcccaccacagggactcctcggaagttgactgcgatcaggagtgccgccgcgacgaagactctgcacgaggcgcctgctcccgcgctgccgccgctacgaaggttacaaccctactcctgttggccgaagccggtgttactctatattcatcagaatcatacaatgatatgtaaaatatgtgtcaaacgcataaacgactggctgcatcagcgcgaccaaagaaaaaggctaaattccacctgtgaaggtatgaccggaaagaactgtgaagatgcagaagatatgactggaaaggactgtgaaaaaggtgcaggcaaaaaaagacagcgaaagaat

SEQ ID NO: 34839 - DNA, 416 bp, Oryza sativa
  Clone ID: PAT_MRT4530_38816C.1
aactcttttttttacggggttttttttttatcttatttttattctttctatttttacctataatgtgttctctctaatcttccagtattcttacccacacccgtacctcaccccaaaaattatcgcctcacaattccacacaacacacattcccaaaaataaaagaaaaaacaacgtgctaataattgagcacctccctttctttgaaaaacactaactccccaaaaccaaccaaaaaactatcctgcaaaaaaattaataaacccccaaccctcaaacagaggccctcccttatttttcgccttggccatcttccccttatcagagagacaaacctcagctcactgtccttaaacaaaagccccaaacacacttggaacacgcgtttcactcttggccccccaaacggtttaaat

SEQ ID NO: 34840 - DNA, 5148 bp, Oryza sativa
  Clone ID: PAT_MRT4530_38817C.1
atgtcgggccaaacgggggaaggaaaacatggtgataagggagctacgtttccttatgactatccacctacatctacatcttatgtgagtacctatagcggcaaagctccgtacttcaatggtacggactatgccgcttggaagcataatatgaagatgcatttaaagtctattaacccatctatttggagaatagtcgaaaaaggctatgttttgcagaatcccgaaaatcccaccaaggaggacgacgagaacgagcacaagaacgctcaagccgctaatgcaatacttagcgccttgagtggaagtgagttcaaccgtgtggatggcattgagagtgccaaagtgatttgggacacgcttcggaacttgcatgaaggcacggatagtgttcgtgagtccaaggtggagatcctcaaggggcaatttgagagatttgtgatgttggatggtgagagcccaagtgacatgtatgaccggttgagcaagatcgtcaatgagatcaagggacttggctccaagggcatgaccgatgaggttgtggtcaagaagatggttcgagcaatcactccaaggaactctaccttggtgactatcattcgtgagcgtccggacttcaagactctcacacctcatatttgctcggactccaaggatgtcatccaatacatcaatcaaagttcaaccacaaacatcaagaaagaagacttggcgttgaaggcgaaggaagaagaagaagagaatcgcaagagcaagagcaaggcggagatcgatgatgaagagatggctctcttcgtcaagaagttcggcaagttcatgaggcgaagcggcttcttcaagggaggttcttccaagcactactccatcaagtcaagtggaagacactccgcaagagtgtgctacgtgtgcaaagagcccgggcacttcattgcggattgccctcacctcaaggatggttcccacatcaaggaagataagaagaagggtgagaagaaggatgagaagaaggagaagcacaagcatagcaagcgggaacattatggccaagctcaccttgggatgatcttcggctccgactccgagtcaagctcaagtgatgaagaaggagtcgccacatttgccgtcaagccttcatcaccaccgagactcttcgactactcaagtgatgaggatgctcccatttgcctcatggcaaaggagcctaaggaatatgtctccggtggaagaagttgggtgattgatagtggatgcaccaatcacatgaccggagaagaatcaatgttttcatctcttgatccaaatggctcttcacaagataacatagacttcgaggacgatggaaagggaaaggttataggattgggtaagattgcaatctctaatgatctttccattgccaacgttctcttggtaaaatctctaaactacaatcttttgtctgtttctcaattatgttctatgggttacaattgtctttttaccgatgttgatgtgaccgtctatagaaggaatgattcctcgatagtctttaagggtgttctcaagggaaagctttaccttgtggatttttcctcaagtaaagccaaacatgagacatgcttagtggctaagtccaacacggggtggctttggcatcggaggctagcccatgttggtatgaggaatcttcacaagcttctaaagcacgatcacatccttggtctaacaaatgttcaatttgagaaagataatgtgtgtagcgcgtatcaagccggcaaacaaattggagcacatcaccccgtcaagaatgtgatgaccactacaagaccattggagcttctccatatagacctcttcgggccaattgcttatctaagcattggaggtaacaaatatggtcttgttattgttgatgacttttcacgcttcacgtgggtattctttttgcatgacaagagtgagacacaagctatcttcaagaagtttgcaagaagagcacaaaacgagtttgacctcaagatcaagaacattcgaagtgacaatggcaaggagttcaagaacacgtgcatcgagagtttccttgatgaagaaggcatcaagcacaagttctcggctccatattcacctcaacaaaatggagtgaccaagaggaagaataggactctcattgagatggcgaggaccatgttggatgagtacaagacatcggaccgcttttgggccgaagccaagactccctatgagcttcttaccggtaacaaaccaaatgtctcttactttcgtgttttcggtagtaagtgttacattcttaataagaaggctagatcctctaagttcgctcctaaagtggatgagggattcttgcttgggtatgggtcaaatgaatgcgcataccgtgttttcaacaaaacctccggtattgttgagatcgcgcgtgatgtgacatttgacgaaactaatggctctcaagtagagcaagttgactcacatgtgttaggtgaagaggaggatccgagcgaggcaatcaaaacattggctcttggggacgtacgtcctagggagccacaacaaggagcctcttcctcaacacaagtggagccacttacatcaacccaagccgacgatccctctatctcaagcttggatcaaggtgaagaaggcgagcaagtgccaccctcaccgatcatcttagctcgcccaagaatccatcaaagtatccaaagagatcatcccaccgacaacatcttaggagacatcaacaagggagtatccactcgttctcgtattgcaaatttttgtgagcattactcgtttgtgtcttctcttgaacctctaagggtggaagaagctctaaatgatccggattgggtgatggcgatgcaagaggagttgaacaatttcacccggcaaaatgtgattggcacaaagtggatcttccgcaacaagcaagacgaggccggggtcgtaataaggaacaaggcaaggttagtggcgcaagggttcacccaaatcgaaggattagatttcggtgaaacttttgcgccggtagctagacttgagtcgattcgcatattgcttgcttttgctactaacctcaattttaagctatatcaaatggatgtcaaaagcgcctttctcaacgggcccatcaacgagttggtatacgtagagcaaccaccgggcttcgaggatccgaagtatcccaaccacgtgtacaagctccacaaggcactctacgggcttaagcaagcccctagagcttggtatgagtgtcttcgcaactttctcgtgaaaaacggctttgaaatcgggaaagccgattcaaccctctttactaaaagacatgataataatatttttgtgtgccaaatatatgtcgatgacattatatttggttctactaacaagtcttttagtgaagagtttagtaggatgatgaccaaacgttttgagatgtccatgatgggtgaattgaagttcttcctcggccttcaaatcaagcaactcaaggaaggaaccttcatttgccaaacaaagtatttgaaggacatgctcaagaagtttgggatggagaacgccaagccaattcacactcccatgccatcaaatggccacctcgacctcagcgagcaaggtaacaacgtcgatcaaaaggtatactgttccatcattggctcacttctttacctttgtgcatctaggcccaatattatgcttagtgtgtgcatgtgtgcaagatttcaagccgctccgaaggagtgtcaccttgtggccgtgaagagaattcttagatatttagtgcacacccctaaccttggtctttggtatcctaagggagcgaggtttgatctcattggctatgccgatgcggattatgccgggtgcaaagtggataggaaaagcacattgggtacttgccaattcttgggtaggatgcctctccacaagcaaacctcccacaagtccaagcgcccgagggatcgctctcccactccatcttctcatgatgattcggacagtgattggtccggtggagaggatgcggttcctcaggttgcgcgggtggctcgacggtctactcatgctcatgatggtggtggtgatggtgagggctcctctcgtcaaccgcaaacgccgccgcaccaacccaatgtccccattgggcctctccgcattcatacccccgagagggatccggcggtgattcgccaagtgtatgattggcggcgcaagtctgaggttgttgctcctcgtcgggatgaggatccgcgctcccttcgccgcaccgccacggatccgcggttttggactctctttcaacaagacttttatgagtctgtaattaagtccaaagctcatcccactgttcccatgcaatggatcaattgggaggagctgcaggcacataatgatctggtgatcaactctgtgattgccaattgtgatctcatggatatccgctccttcatgacgttgcagcaaaattggtgcaacgagatcattgctcagttttacgccaccgtatactggatgactcaggggtcctggtactctgtttcttatcagcagttgtctgagatctggggcttccgtcttcgttctttgctaaaccttgatgaccttcataatcttcaaattcctgccaacacagacttgcttcccctttacactcaaaatgatccaaatgtggtgttgggcaaggtcgacggcctcaagctgtactttgcctacttgaaccggatgtttcaccggtcttttgtgcctaaggatggtgatgctagcagcattaaccatctctctaggaccgtgcttctccggtttgatccccctcctcatcgcttccatgtctatcactttgtgtgggaggagatccgcatggcttcaattcagtacaagaaggggttggtctatgcccctcacattatgcggatgatcgagactgtgactcagctccagtttcgccatgatgtgactcattctcagcttcacttgcgccttcttaaggccccctgctcctcagctgctcgggacataccctcctcttctacccagccgcctcctgctcctgagcgccctgcctctgtggctcgtcgtgagccgtctcccttattccgcattttgcggagtctttttggtctttgctccgaggaggccaaaaagaaccgctga

SEQ ID NO: 34841 - DNA, 1404 bp, Oryza sativa
  Clone ID: PAT_MRT4530_38818C.1
atggcgaggaccatgttggatgagtacaagacatcggaccatttttgggccgaagccgtcaacaccgcatgccacgctatcaaccgcatttatcttcaccgccttcttaagagactccctatgagcttcttaccggctagatcctctaagttcgctcctaaagtggatgagggattcttgcttgggtatgggtcaaatgaatgcgcataccgcgttttcaacaaatcctccggtgaagaggaggacccgagtgaagcaatcaaaaggttggctcttagggacgtacgccctagggagccacaacaaggagcctcttcctcaacacaagtggagccacctacatcaacccaagccgacaatccctctacctcaagcttggatcaaggtgaagaaggcgtgcaagtgccaccctcactgatcaacttagctcgcccaagaatccaccaaagtatccaaagagatcatcccactgacaacatcttaggagacatcaacaagggagtatccactcgttctcgtattgcaaatttttgtgagcattactcgtttgtgtcttctcttgaacctctaagggtggaagaagctcttaatgatccgaattgggtgatggcgatgcaagaggagttgaacaatttcacccggaatgaactatatcaaatggatgtcaaaagcgcctttctcaacgggcctatgaacgagttggtatacgtggagcaaccaccgggcttcgaggatccaaaatatcccaaccacgtgtacaagctccataaggcactctacgggcttaagcaagcccctagagcttggaaagccgattcaactctttttactaaaaggcataataatgatatttttgtgtgccaaatatatgtcgatgacattatatttggttctactaacaagtcttttagtgaagagtttagtaggatgatgaccaagcgttttgagatgtccatgatgggtgaattgaagttcttcctcggccttcaaatcaagcaactcaaggaaggaactttcatttgccaaacaaagtatttgaaggacatgctcaagaagtttggaatggagaatgcgaagccaatccacactcccatgccatcaaatggccacctcgaccttaacgagcaaggtaaagacgtcgaccaaaaggtataccgttccatcattggctcactcctttatctttgtgcatctaggcccgatattatgcttagtgtgtgcatgtgtgcaagatttcaagccgctccgaaggagtgtcaccttgtggccgtgaagagaattcttagatacttagtgcacactcctaacattggtctttggtatcctaagggagcgaggtttgatctcattggctatgccgatgcggattatgccaggtgcaaagtggataggaaaagcacatga

SEQ ID NO: 34842 - DNA, 5208 bp, Oryza sativa
  Clone ID: PAT_MRT4530_38819C.1
atgtcgggccaagcgggggatgggaacgatggtgataagggagctaagatcccttatgactatccctctacatctacatcttatgtgagtacctatagcggcaaagctccgtacttcaatggtacggactatgccgcttggaagcataagatgaagatgcatttgaagtctattaacccatctatttggagaatagtcaaaaaaggctatgttttgcagaatcccgaagatcccaccaaggaggacgacgagaacgagcacaagaacgctcaagccgctaatgcaatacttagcgccttgagtggaagtgagttcaaccgtgtggatggcattgagagtgccaaagtgatttgggacacgcttcggaacttgcatgaaggcacggatagtgttcgtgagtccaaggtggagatcctcaaggggcaatttgagagatctgtgatgttagatggtgagagcccaagcgacatgtacgaccggttgagcaagatcatcaatgagatcaagggacttggctccaaggacatgaccgatgaggttgtggtcaagaagatgactctcacacctcatgatttgctcggatgcatccttgcccttgacatgctcgtgcaagagtccaaggatgtcatccaatacatcaaccaaagctcaaccgcaagcatcaagaaggaagacttagctttgaaggcaaaggaagaagaagaagagaatcgcaagagcaagagcaaggcggagatcgatgatgaagagatggctcccttcgtcaagaagttcggcaagttcatgaggcgaagcggcttcttcaagggaggatcttccaagcactactccaacaagtcaagtggaagacactccgcaagagtgtgctacgtgtgcaaagagcccgggcacttcattgcggattgcccccacctcaaggatggttcccacatcaaggaagataagaagaaggatgagaagaaggagaagcacaagcatagcaagagggaacattatggccaagctcaccttgggatgatcttcggctccgactccgagtcaagctcaagtgatgaagaaggagtcgccacgtttgccgtcaagccctcatcaccaccgagactcttcgactactcaagtgatgaggatgctccggtttgtctcatggcaaaggagcctaaggtaccttctcttcttaagtcatttaatgttgatcttgttagtgatgaggaggatgaggttgaggatgaggttatagatgacgaattgttcaagtccataactaaggaatccctaccacacttgagtgagttgcttgagagaattgaggaccaatatgcaactcttgagaggcaagagactttgctcattcgtgagaaagagcggtctcatgaactcaagagtgagcttgctaaggagagagagaaaaatgaggcattggaatatgtctccggtggaagaagttgggtaattgatagtggatgcacaaatcacatgaccagagaagaatcaatgttttcaactcttgatccaaatggcacttcacaagataacatagttttcggggacgatggaaagggaaaggttatgggattgggtaagattgcaatttctaatgatctttccattgccaacattctcttggtaaaatctctaaactacaatcttttgtccgtttctcaattatgttctatgggttataattgtctttttaccgatgttgatgtgaccgtctatagaaggaatgattcctcggtagtctttaagggtgtcctcaagggaaagctttaccttgtggatttttcctcaagtaaagccaaacatgagacatgcttagtggctaagtccaacacggggtggctttggcatcagaggctagcccatgttggtatgaggaatcttcacaagcttctaaagcacgatcacatccttggactaacaaatgttcaatttgagaaagatagggtgtgtagcgcatgtcaagccggcaaacaaattggagcacatcaccccgtcaagaatgtgatgaccactacaagaccattggtgcttctccacatggacctcttcggaccaattgcttatctaagcattggaggtaacaaatatggtcttgttattgttgatgacttttcacgcttcacgtgggtgttctttttgcatgacaagagtgagacacaagctatcttcaagaagtttgcaagaagagcacaaaacgagttcgacctcaagatcaagaacattcgaagtgacaacagcaaggagtttaagaacacgtgcatcgagagtttccttgatgaagaaggcatcaagcacgagttctcggctgcatattcacctcaacaaaatggagtagctgagaggaagaataggactctcaatgagatggcgaggaccatgttggatgagtacaagacatcggacaatttttgggccgaagccgtcaacaccgcatgccataccatcaactgcctttatcttcaccgccttcttaagaagactccctatgagcttcttaccggtaataaaccaaatgtctcttactttcgtgttttcggtagtaagtgttacattcttaataagaaggctagatcctctaagttcgctcctaaagtggatgagggattcttgcttgggtatgggtcaaatgaatgcgcataccgcgttttcaacaaaacctctagtattgttgagattgcgcgtgatgtgacatttgacaaaattaatggctctcaagtatccgagcgaagcaatcaaaagattggctcttggggacgtgaagaaggcgagcaagtgccaccctcaccgatcaacttagctcgcccaagaatccaccaaagtatccaaagagatcatcctaccgacaacatcttaggagacatcaacaagggagtatccactcgttctcgtattgcaaatttttgtgagcattactcgtttgtgtcttctcttgaacctctaagggtggaagaagctcttaatgatccggattgggtgatagcgatgcaagaggagttgaacaatttcacccggaatgaagtgtggactttggtggagcgacctcggcaaaatgtgattggcacaaagtggatcttctgcaacaagcaagacgaggccggggtcgtaataaggaacaaggcgaggttagtggcgcaagggttcacccaaatcgaaggattagatttcggtcaaacttttgcgccggtggctagacttgagtcgattcgcatattgcttgcttttgctactaacctcaattttaagctatatcaaatggatgtcaaaagcgccttcctcaacgggcctatcaacgagttggtatacgtggagcaaccaccgggcttcgaggatccgaagtatcccaaccacgtgtacaagctccacaaggcactatacgggcttaagcaagcccctagagcttggtatgagtgtcttcgcaattttcttgtgaaaagaggctttaaaatcgggaaagccgattcaaccctttttactaaaagacataataatgatatttttgtgtgccaaatatatgtcgatgacattatatttggttctactaacaagtcttttagtgaagagtttagtaggatgatgaccaaacgttttgagatgtccatgatgggtgaattgaagttcttcctcggccttcaaattaagcaactcaaggaaggaactttcatttgccaatcaaagtatttgaagaacatgcttaagaagtttgggatggagaacgccaagccaatccacactcccatgccatcaaatggccacctcgacctcaacgagcaaggtaaagacgtcgatcaaaaggtataccgttccatcattggctcacttctttacctttgtgcatctaagcctgatattatacttagtgtgtgcatgtgtgcaagatttcaagtcgctctgaaggagtgtcaccttgtggccgtgaagagaattcttagatatttagtgcacacacctaaccttggtctttggtatcctaagggagcgaggtttgatctcattggttatgccgatgaggattatgccgggtgcaaagtggataagaaaagcacattgggtacttgccaattcttgggtaggtcccttgtttcttggtcttccaagaagcaaaactccgtcgccctatccaccgccgaagcggaatatgtttcgatcaattgggaggagttgcaggcacacaacgatccggtgattgactctatgattgccaattgtgatctcatgggtatccgctccttcatgacgttgcagcaaaattggtgcaacgaggtcattgctcagttttatgccaccgtctactttgatcgttatcgtgccatgcactgcatgactcaggggtcctggtattctgtttcttatcagcagttggctgagatctggggcttccgtcttcgttctttgctcaaccttgatgaccttcataatcttcaaattcctgccaacacagaattgcttcccctttacactccaaatgatccaaatgtggtgttgggcaaggtcgacggcctcaagccgtactttgcctacttgaaccggatgtttcgccggtcttttgtgtctatggatagtgatgctaacagcattaaccacctctctaggaccgtgcttctccgttttgatccccctcctcatcgcttccatgtctatcactttgtgtgggaggagatccgcatggcttcaattcagtacaagaaggggttggtctatgcccttcacattatgcggatgatcgagactgtgactcagctccagtttcgccatgatgtgactcattctcagcttcacttgcgccttcttaaggccccccgctcctcggctgcttgggacataccctcctcttccactctgccgcctcctgctcctgagcgccctgcctctgtggctcgtcgtgagccgtctcccttattccacaatttacggagtctttttggtctttgctccacggaggccaaaaagaaccgccgattgcggaattcggcgaagaaaacggctcgtgatgtcaagttcctcaaggcaaggtattatgaggaccaccacattgatatccctccttctcctccgggtttcgaggccgagcccgatgagccacaggatgaagcgattgaggatccttttgctgggttgccttacgacttcgacttctttggatatggccatggctatggctatcctcctccaccacctccagaggatccttctcaggcgcccttcgcttga

SEQ ID NO: 34843 - DNA, 488 bp, Oryza sativa
  Clone ID: PAT_MRT4530_3881C.1
aatttttttcccccccaaatttttttttccccaccaaccattatgctgtcttgaagaaagcacgagcgtgaaggatgccaatactatcgcaatcaagacacaacccggctaacgcccccccttttttccccgggttcagcccaccctctgcagggaaaaactcagtattccgtgccctgccagttgatgtagtggctaactgcgtatcgcatctcaagggatgcaagcccgaagcctcaagaaccaacaggggacgaagagcacggtgccttcacctcctagatttcaacaacaatactacccaggattatcgaatgagtccgaaagcgagacttcagagtaatgtaattgagaactagtatcggccgtagagtaaaataaaacacccaccaagtatgacacttggtggtgattctattcgaatcagtagtaataaggctacaattaaagcgcttagagatccagctacgtacgcgtgcatgcacgtc

SEQ ID NO: 34844 - DNA, 2550 bp, Oryza sativa
  Clone ID: PAT_MRT4530_38820C.1
atggcgaggacaatgttggatgaatacaagacatcggaccgcttttgggccgaagccgtcaacaccgcatgccacgccatcaaccgactatatcttcaccatcttcttaagaagactccctatgagcttcttaccagtaacaaaccaaatgtctcttactttcgtgttttcggtagtaagtgttacattcttaataagaaggctagatcctctaagtttgcccctaaagtggatgaggggttcttgcttgggtatgggtcaaatgaatgcgcataccccgttttcaacaaaacctccggcattgttgagatcgcgcgtgatgtgacatttgacgaaactaatggctctcaagtagagcaagttgactcacatgtgttaggtgaagaggaggacccgagtgaagcaatcaagaggttggctcttggggacgtacgtcctagggagccacaacaaggggcctcttcctccacacaagtggagccaactacatcaacccaagccgacgatccctctacttcaaacgtggatcaaggtgaagatggcgagcaagtgccaccctcaccgatcaatctagctcacccaagaatccaccaaagtatccaaagagatcaccccaccgacaacatcttaggagccatcaacaagggagtatccactcgttctcgtattgcaaatttttgtgagcattactcgtttttgtcttctcttgagcctctaagggtggaagaaactcttaatcatccggattgggtgatggcgcagcaagaggagttgaacaatttcacccagaatgaagtgtggactttgatggagcgacctcggcaaaatgtgattggaacgaagtggatcttccgcaacaagcaagacgagaccggggtcataataaggaacaaggcaagccttcctcaacgggccgggcctatcaacgagttggtatacgtggagcaaccaccgggcttcgagaatccgaagtatcccaaccacgtgtacaagctccacaaggcactctacgggcttaagcaagcccctagagcttggtatgagtgtcttcaaaattttcttgtgaaaaacggctttgaaatcgggaaagccgattcaactctttttactaaaagacatgataatgatatttttgtgtgccaaatatatgtcgatgacattatatttggttgtactaacaagtcttttagtgaagagtttagtaggatgatgaccaaacgttttgagatgtccatgataggtgaattgaagttcttccttggccttcaaatcaagcaactcaaggaaggaaccttcatttgccaaacaaagtatttgaaggacatgctcaagaaatttgggatggagaatgccaagctaatccacactcccatgccatcaaatggccacctcgacctcaacgagcaaggtaaagacgtcgaccaaaagggagcgaggtttgatctcattggctatgccgatgcggattatgccgggtgcaaagtggataggaaaagcacatcgggtacttgccaattcttgggtaggatgcctccccgcaagcgaacttcccgcaaatccaagcgccaaagggaccgctctcccaccccatcctctcatgatgattcggacagtgattggtccgggagagaggatgcggctcctcagtatgcgtgggtggctcgaggcggcactctccctcctcggcggtccactcaagctcttggtggtggtggtgatggtgagggctcctctcgtcaaccgcaaacgccgccgcaccaacccaatgtccctattgctcctcttcacattcatacccccgagagggatccggcggattggtgcaacgaagtcatcgctcaattctatgccaccgttttctttgatccatatcatgccatgcaatggatgacccaaggatcctggttttctgtctcctatccgcgattggctgagatttggggttttgatttgcatgacttgctcaaccttcctgatctgcataatcttccaattcctgccaacgctgatttactccctctttacattcctaatgatcctaatgtggtgttgggtaaggtcgacagtctcaaaccgtactttgcctacttgaaccggatgtttcaccggtcctttgtgcctaaggatggtgatgctagcagcattaaccacctctccaggaccgtgcttgtcagtctttttggtctttgctccgcggaggcaaaaaataaccgccgattgcggaattcggcgaagaaaacggctcgcgacgtcaaatacctcaaggcgcgatataatgaggaccaccacatcgatatccctccttcccctccgggttttgaagccgagcccgatgagccagaggaagagctcgaggatccatttgctgggttgcctcctgacttcgacttcattattgttactactttttattgtattttgagaagaaaacacatccgtcaagcgacaaactgcacctccgcgcattcaggacacatttacacggattggaggccccataagtcaattaaacaactccaaatgggcccaactatcatgccaatgggctga

SEQ ID NO: 34845 - DNA, 3342 bp, Oryza sativa
  Clone ID: PAT_MRT4530_38821C.1
atggcgaggacaatgttggacgaatacaagacatcgcaccgcttttgggccgaagccatcaacaccgcatgtcacgtcatcaaccgcctctgtcttcaccgtcttcttaagaagagtccctatgagcttcttaccggtaacaaaccaaatgtctcttactttcgtgttttcggtagtaagtgctacattcttaataagaaggctagatcctcaaagtttgctcctaaagtggatgaagggttcttgcttgggtatgggttaaatgagtgtgcataccacgttttcaacaaaacctccggtattgttgagatcacgcgtgatgtgacatttgacgaaactaacggctctcaagtagatcaagttgactcgcatgtgttaggtgaagaggaggtccctagcgaagcaatcaagaggttggctcttggagacgtacgtcctagggagccacaacaaggggcctcttcctcaacacaagtggagccacctacatcgacccaagccgacgatccctctacttcaagcttggatcaaggtgaagaaggcgagcaagtgccaccctctccgataaatctagctcacccaagaatctaccaaagtatccaacgagatcaccccaccgacaatatcttaggagacatcaataagggagtatccactcgctctcgtattgcaaatttttgtgagcattactcgcttgtgtcttctcttgagcctctaagggtggaagaagctctaaatgatccagattgggtgatggtgatgcaagaggagttgaacaatttcacccggaatgaagtgtggactttggtggagcgaccttggcaaaatgtgattggcacgaagtggatcttccgcaacaagcaagacgaggccggggtcatgataaggaacaaggcgaggttagtggcgcaagggttcacccaaattgaaggattagatttcggtgaaacttttgagccagtagctagacttgagtcaattcgcatattgcttgcttttgctactagcctcaattttaagttatatcaaatggatgtcaaaagcgccttcctcaacaggcctatcaacgagttggtatacgtggagcaaccaccaagcttcgaggatacaaaatatcccaaccacatgtacaagctccacaaggcactctgcgggttaagcaagcccctagagcttgcaactcaaggtaggaagtttcatttgccaaacaaagtatttgaaggacatgctcaagaagtttggaatggagaatgcgaagccaatccacactcccatgccatcaaatggccattaaaagacgtcgaccaaaaggtctttggtatcctaagggagcgaggtttgatctcattggctatgccgatgcggattatgtcgggtgcaaagtggataggaaaagcacatcagtgtatcctcatgatcaagggtcagttcaagaatcaagtttactctcgccgtgttccaatgagttctcgaggtcgttctcccacttccaaagctcgccatgctatacgtcgaatgtccgaatcccgcaaagatgctattgacacgcaagctcaagcctctgaagatatagcagctcaagtggcaaatgtggagcgagatagtggttctcatgctccatcctttgaggaagagattcagttagaagaggacattgccgctcagcaagccgctcatgaagaagggcctttctttgtcactgctccctctagagatcctaattatcatcggagagtcacaaggtggaaccgcaagtggactgaagtggagaaagagcgtaagaaagatccctacaaatatcaacagttgtccactgatcctcggttttggaacctttttcagcaggactactatgagacagtgattgcacctaagaagggggcgattctcatgcagtgggttgattggaagtatatggaggagttgcatgatccaattattaatgaagtcattgaagcttgtgctcggcaaaacttgaaggaactaatgggcttgcaatacccatggtgcaaagagatcatcgcacaattctatgctaccgtttactttgagccaaacaaagaaaagattatccattggatgacagatggcatcatatactcagtgacatatgccaagtttgctgccattttggggtttccggctcgctctcgcaccaatcgtgtcaagattcatgatgagaagcccatggacacaaattctcttcacttcttgtaccaagatgtggactatgagttaggcaccatcaaaggtctccttcctttctatgcctatctcaacaagctcttgcgcaaaactcttaatcctaaggaaggtgatgctagcaatgtccttgcctatacaagaaatttgctccacaagatgaaggcacacccacagctctttgatgcttttgacttcatctttgaaaaaatctggcttatctccatgatacctaagcgaggacatggctatgggccttacattatgaagatgattgagattgtgtccaagaagaagtttcacaaggaagtggctcacaccggttaccaagttcgtcccatcaaggctgtttccgtgccggctggtcgaaccactcgtgcttcttctcgtgctggtccctccgctactgtcacctcgtcggactccaactcttctttgcggttcttcaagtccatctttaacatgtgcaaaaccatctcagttcatcaagccaaggaacgcagagcaaggaagaaggacactcggcggatcaagaacctccttcacaacgcccatttgctgttgacggagcgtggggctcctcaccgggagaccgcgcaggcccccctttgccggcctgggcctcctttttatctggtccggggtcaccacacgggcctcctgctgcctaagaaaagaaacatgctttttacaatgagggctagtctacatccggaagtgacctctgacaagcagagcacacgcctcctgccccgctcgcccgcttttccggtggacgcccatttcaaccttcatttaatggccagcgacttccttgccatacttgcgctgaagcctggaatggatctgaccgggactgacataccaactccaggagttagcacgccggctccggctagggaagagagccaggaagctctcatcattccgacgggacggggcgagctgtgttctcccgatgggtttgaggttgaggacagtggggaggatgtatttgaggacccctttgcagctgaggcaagctcctctcgtgcagatcgtggcaaggctcctatggaagaagaagaagaagaagaggaggaagatgacaatgatgaggagtcaagtgaggaggacaaggattttgatgaggatgagtga

SEQ ID NO: 34846 - DNA, 560 bp, Oryza sativa
  Clone ID: PAT_MRT4530_38822C.1
aagtaatcaaggaataaaatccttttctcatatgataaaaattgtatgttacagatataaccaatatttttatggtacactttggtgtgcttctcctttgccaaacggatgctcttcagatacaacatacgagtgctcagtgaggccaacttcagacaagactatttttcctagagcacaatgagttcatgttatggtaaactaccacaacttgtgcacaagaaatttgatgtttttgctgcacaagcaaggcgaactctggagtcaagaacgcgatgctgcggtttgatcctctagaatttcggcctattgctctgaaacggcctattcagatcagttggtttgttgctctgcaatggcctattttgaccagttggtttgttactctggaatggcctattctgaccagttggtttattgctctcaaacggcctattcagaccagtttgtttgtcgctctgtaatggcttattcggaccagttggcttagtgatggtaatggttgaattgggtctatgaaatagtcggtgtcttcattggctgtacatgatttgagttat

SEQ ID NO: 34847 - DNA, 4608 bp, Oryza sativa
  Clone ID: PAT_MRT4530_38823C.1
atgcaacacttgagaggcaagaggaattgctcattcatgagaaagagcgatctcatgaactcaagtgcgaacttgctaaggagagagaaaaatgaggctttggtacggctttacaagcaaaccaaagagtctcatgctaatcttgaggtggcaaacgctcaacttcaagagagagtggatggcttggataaagcttacctctctcttgaagagaagtttgaaaccttaaagaatagtgtctctctccctagcaaggcatcatgctccaaaattgccccaagcaatgaaccttgtgcaagatgcaaagatattgatattgaagcttgtgctactaactctatttccttgagtgctttgcaaaagcaaaatgagaagcttatgggactccttcacaatggcctacttaagtgccatatgggtagtaaggccctaaaagagtacctaggctatcaaagggacaacttcaaccatgagggtcttgggtatgttcctccaccaaaaggaaaggtggacaagagtgtgatgatcaagaggccccaaggtcttagcaactttgttagggccaaaagtatccttcctaatgattgtgcttcacattgttcttttgatgcatcttatgttcttaggaagaatgctagtggtcgtgttgttgctaagtatgtaggcccaaggggcaagaatatttctatcaagagagttctttgggtgcctaaggcacttgttactaacatgagaggacccaagcaagaatatgtcactggtggaagaagttgggtgattgatagtggatgcaccaatcacatgaccggagaagaatcaatgttttcatctcttgatccaaatggcacttcacaagataacatagtcttcggggacgatggaaagggaaacgttatgggattggggaaagctttaccttgtgaattttcctcaagtaaagccaaacatgagacatgcttagtggctaagtccaacacggggtggctttggcatcggaggctagcccatgttggtatgaggaatcttcacaagcttctaaagcacaatcacatccttggactaacaaatgttcaatttgagaaagatagggtgtatagcgcatgtcaagccggcaaacaaattggagcacatcaccccgtcaagaatgtgatgaccactacaagaccattggagcttctccacatggacctcttcggaccaattgcttatctaagcattggaggtaacaaatatggtcttgttattgttgatgactttttacgcttcacgtgggtgttctttttgcatgacaagagtgagacacaagctatcttcaagaagtttgcaagaagagcacaaaacgagttcgacctcaagatcaagaacattcgaagcgacaatggcaaggagttcaagaacacgtgcatcgagagtttccttgatgaagaaggcatcaagcatgagttctcggctccatattcacctcaacaaaatggagtggctgagaggaagaataggactctcattgagatggcgaggaccatgttggatgagtacaagacatcggaccgtttttgggccgaagccgccaacaccgcatgccacgccatcaaccgcctttatcttcaccgccttcttaagaagactccctatgagcttcttaccggtaataaaccaaatgtctcttactttcgtgttatcggtagtaagtgttacattcttaataagaaggctagatcctctaagttcgctcccaaagtggatgagggattcttgcttgggtatgggtcaaatgaatgcgcataccgtgttttcaacaaaacctccggtattgttgaaatcgcgcgtgatgtgacatttgacgaaactaatggctctcaagtagagcaagttgactcacatgtgttaggtgaagaggaggatccaagcgaagcaatcaaaagattggctcttgggaacgtgcgtcctagggagccaagcctcttcctcaacacaagtggagccacctacatcaacccaagccgacgttccctctacctcaagcatggatcaagggtggaagaagctctaaatgatccggattgggtgatggcaatgcaagaggagttgaacaatttcacccgtaatgaagtgtggactttggtggagcgacctcggcaaaatgtgattggcacaaagtggatcttccgcaacaagcaagacgaggccggggtcataataaggaacaaggcgaggttagtggcgcaagggttcacccaaatcgaaggattagatttcggtgaaacttttgcgccggtagctagacttgagtcgattcgcatattgcttgcttttgctactaacctcaattttaagctatatcaaatggatgtcaaaagcgccttcctcaacgggcctatcaacgagttggtatacgtggagcaaccacctggcttcgaggatccgaagtatcccaaccacgtgtacaaactccacaaggcactctacgtgcttaagcaagcccctagagcttggtatgagtgtcttcgcaattttcttgtgaagaacggctttgaaatcgggaaagccgattcaactctttttactaaaagacatgataatgatatttttgtgtgccaaatatatgtcgatgacattatatttggttctactaacaagtcttttagtgaagagtttagtaggatgatgaccaaacgttttgagatgtccatgatgggtgaattgaagttcttcctcggccttcaaatcaagcaactcaaggaaggaactttcatttgccaaacaaagtatttgaaggacatgctcaagaagtttggaatggagaatgcgaagccaattcacactcccatgccatcaaatggccacctcgacctcaacgagcaaggtaaagacgtcgaccaaaaggtataccgttccatcattggctcactcctttacctttgtgcatctaggcccgatattatgcttagtgtgtgcatgtgtgcaagatttcaagccgctccgaaggatgtcggactgtctgacatcaagtcagactatccggccacaatcggacagtccgatttcaaatcggactatccgacgtggggccaagggcaaggggacttaacctccccggggtgtatcctcatgatcaaggatcagttcaagaatcaagtttactctcgccgtgggtcaatgagttctcgaggtcgctctccctcttccaaggctcgtcatgctatacggcgtatgtctgaatcccgcaaagataccattgacgcgcaagctcaagcctctgaccaagcagctcaagtggctaatgtggagcgtggtgctcctcttcctcctcgccgcagccgagttagtggagaaggatcaagtgcacctgctagcaaagtaaggagaggcaatcctacggattcttctgagcctggtcaaggtagtggttctcatgcaccatcctttgaggaagagattcagttagaagaggacattgccgctcagcaagccgctcaggaagaagggcctttctttatcactgctccctctagagatcctaattatcatcggagagtcataaggtggaaccgcaagtggactgaattggagaaagagcgtaagaaagatccctacaaatttcaacagttgtccaccgatcctcggttttggaacctttttcagcaggattactatgagacagtgattgcacctaagaagggggctattcttatgcagtgggttgattggaagtatatggaggagttgcatgatccaattattgatgaagtcattgaagcttgtgctcggcaaaacttgaaggaattcatgggcttgcaatacccatggtgcaaagaaatcattgcacaattctatgccatagtttactttgagcccaacaaagaaaagactattcattggatgacagatggcactatatacttagtgacatatgccaagtttgctgccattttggggtttccggctcgctctcgcaccaatcgtgtcaagattaatgctgagaagcccatggacacaaattctcttcacttcttgtaccaagatgtggactatgagttaggcaccatcaaaggtctccttcccttctatgcctatctcaacaagctcttgcgcaaaactctcaatcccaaggaaggtgatgctagcaacatgattgagattatgtccaagaagaagtttcacaaggaggtggcacataccggttaccatgtccgtcccatcaaggctgctgctgtgccggctggacaaaccactcgtgcttcttctcgtgccggtccctccgctaccgtcaccaagccggattccaactcgtccttgaggttcttcaagtccatcttcaacttatgcaagaccatcttagcttggcaagccaaggaacgcagagcaaggaagaaggacactcgacggatcaagaacctccttcgcaacgcccatttgccgtgttcccccgatggttctgaggttgaggacagtggggaggatgtgattgaggacccgtttgcagctgaggcaagctcctctcgtgcggatcgtggcaaggctcctatggaggaagaagaagaggaggaggaaggtgactatgctaaggagtcaagtgaggagggcgaggattctaatgaggatgagtga

SEQ ID NO: 34848 - DNA, 1926 bp, Oryza sativa
  Clone ID: PAT_MRT4530_38824C.1
ggtggaagaatcttttgggaggccgattgggtgaaggccaatccagaagaacttgaccatttcaccccgaatggaagtgggacttttgtggagcgaccttcgcaaaacctgattggccttaaatggatctttcccaaccagccagaccaaggccgggtcgtaataaagaacaaggccagtaacctcaattttaagctatatcaaatggatgtcaaaagcgccttcctcaacgggcctatcaacgagttggtatacgtggagcaaccaccgggcttcgaggatccgaactatcccaaccacgtgtacaagctccacaaggcactctacgggcttaagcaagcccctagagcttgtgaagagtttagtaggatgatgaccatacgatttgagatgtccatgatgggtgaattgaagttcttcctcgaccttcaaatcaagcaactcaaggaaggaaccttcatttgccaaacaaagtatttgaaggacatgctcaagaagtttgggatggaaaatgccaagccaatccacactcccatgccatcaaatggccacctcgacctcaacgagcaaggtaaagacgtcgaccaaaaggtataccgttccatcattggctcacttctttacctttgtgcatctaggcccgatattatgcttagtgtgtgcatgtgtgcaagatttcaagccgctccgaaggagtgtcaccttgtggccgtgaagagaattcttagatatttagtgcacacacctaaccatggtctttggtatcctaagggagcgaggcttgatctcattggctataccgatgcggattatgccgggtgcaaagtggatagtaaaagcatatcgggtacttgccaattcttgggtaggatgcctccacgcaagcaaacctcccacaagtccaagcaccaaagggaccgctctcccaccccatcctctcatgatgatttggacagtgattggtccgggagagaggatgcggttcctcaggttgcgcgtgtggcttgggccgacactctccctcctcggcggtccactcaagctcttggtggtggtggtgatggtgagggctcctctcatcaaccgcaaacaccaccgcaccaacccaatgtccccacaggtccttttcgcattcatacacccaagagggatccggcggtgattcgccaagtgtatgattggaagcggaagactgaggaggagctgcaggcgcatgatgatccggtgctaaactttgtgattgcaaattgtgagctcatgggaattcgctctttcgtgactttgcagcagaattggtgcagcgaagtcatcgctcaattatatgccaccgttttctttgatccttattgtgccatgcattggatgacccaaggctcttactattatgtctcctgtccgcgatttgttgagatttggggttttgacgtctgttccttgctaaaccttcctgatatgcatgatcttcccattcctgccaacactaatctcctccctctttacactccaaatgatcctaatgtggtgttgggtaaagtcgacggtctcaaaccgtactttgcctgcttgaaccggatgttttgccggtcctttgtgcctaaggatggtgatgccagcagcattaaccacctctccaggaccgagatccgcatggcctccattcagtacaagaaggggttggtctatgctcctcacattatgcggatgatcgagactgtcactcagcttcagtttcatcatgatgtgactcattcccagcttcacttgcgccttgttaaggcagtaaccccgacaaataaattcttcaaacacccgaacggaaatattattgaaggatttgggattgtacaagatgtacctgtctgctttgaagacaaggaggcagtcttggatttccacgtctttgtgaaagtgcgactaggcccctag

SEQ ID NO: 34849 - DNA, 249 bp, Oryza sativa
  Clone ID: PAT_MRT4530_38825C.1
atgatgggccacccataccttcgggccgatacggcacggcccgacaattggtgggccgtgcctgggcctgaggtgcggcacgtggaccgacacggcacacccgaagtgccaatcgtgctgtgccggcccgacgaccgtgggccgtgccgggcgagtcttatggccatgaggatgttgggattggagttggttcattttggttgttgttacgacgatgagccacatggacatccaagtggcacatccatc

SEQ ID NO: 34850 - DNA, 2877 bp, Oryza sativa
  Clone ID: PAT_MRT4530_38826C.1
atgaccactacaagaccattggagcttctccacatggacctcttcaggccaattgcttatctaagcattggaggtaacaaatatggtcttgttattgttgatgacttttcacgcttcacatgggtgttctttttgcatgacaagagtgagacacaagccatcttcaagaagtttgcaagaatagtacaaaacgagttcgacctcaagatcaagatcattcgaagcgacaacggcaaggagttcaagaacacgtgcatcgagagtttccttgatgaagaaggcatcaagcacgagttctcggctccatatttacctcaacaaaatggagtacccgagagaaagaataggactctcattgagatggcgaggaccatgttggatgagtacaagacatcggaccgtttttgggccgaagccgtcaacaccgcatgccacgccatcaaccgcctttatcttcactaccatcttaagaggactccctatgagctttataccggtaacaaaccaaatgtctcttactttcatgttttcggtagtaagtgttacattcttaataagaaggctagatcctctaacttcgctcctcaagtggatgagggattcttgtttgggtatgggtcaaatgaatgcgcataccgcgttttcaacaaaacctccggtattgttgagatcgcgcgtgatgtgacatttgacgaaactaatggctctcaagtagagcaaattgactcacatgtgttaggtgaagaggaggacccgagtgaagcaatcaaaaggttggctcttggggaccgacctcggcaaaatatgattggcacaaagtggatcttccgcaacaagcaagatgaggccaggctcgtaataaggaacaaggcgaggttagtggcgcaagggttcacccaaatcgaaggattagattttggtgaaactattgcgccggtagctagacttgagtcgattcgcatattgcttgcttttgctactaacctcaattttaagctatatcaaatggatgtcaaaagcgccttcctcaacgagcctatccatgagttggtatacatggagcaaccactgggcttagaggatccgaagtatcccaaccacgtgtacaagctccacaaggcactctacgggcttaagcaaacccctagagcttgtgaagagtttagtaggatgatgaccaaacgttttgagatgtccatgatgggtgaattgaagctcttcctcggccttcaaattaagcaactcaaggaaggaactttcatttgccaaacaaagtatttgaaggacatgctcaagaagtttgggatggagaatgccaagccaatccagactcccatgccatcaaatggccacctcgacctcaatgagcaaggtaaagatgtcgatcaaaagggagcgaggtttgatctcattggctatgccgatgcggattatgccggatgcaaagtggataggaaaagcacatcgggtacttgccaattcttgggtaggatgcctcccagcaagcaaacctcccacaagtccaagcgcccgagggatcgctctcccactccatcctctcatgatgattcggacagtgattggtctggtggagaggatgcggttcctcaggttgccctggtggctcggggtggcaacctccctcctcggcgatctactcaagctcttggtgctggtggtggtggtgaggactcctctcgtcaactgcaaacgccgccgcatcaacccaatgtccccattggtcctctccgcattcatacccccgagagggatccagcggtgattcgccaagtgtatgattggaggcggaagactgaggttgttgctccctggtgggatgaggatccgcgccctcttcaccactccgccacgaatccgcggttttggactctctttcaacaagacttttatgagtcagtgatcaagtccaaagctcatcccaccgttcccatgcaatggatcaactgggaggagttgcaggcgcataatgatccggtgctaaactctgtgattgcaaattgtgagcgcatggggattcgctctttcatgactttgcagcaggattggtgcaacgaagtcatcgctcaattctatgccaccgttttctttgatccacaccgtgccatgcattggatgacccaaggatcttggtattctgtctcctatcctcctttggctgagatttggggtttcgacttgcatgacttactcaaccttcctgatctgcataatctacccattcctaccaacactgatctcctccctctttacattccaaatgatcctaatgtggtgttgggtaaggtcgacggtctcaaaccgtactttgcctacttgaaccggatgtttcgccggtcctttgtgccaaaggatggtgatgctagcagcattaaccgcctctccaggactgtgcttctcaggcgccccgctcctcagccgctcgggacatcccctcctcttccactcagccgcctcctgctcctgagcgcccttcctctgtggctcgtcagtctttttggtctttgctccgcggaggccaaaaagaactgccgattgcggaattcaacgaagaaaacggctcgcgacgtcaaattcctcaaggcaaggtattatgaggatcatcacatcgatatccctccttctcctccgggtttcgaggccgagcccgatgagctagaggaggaagagattgaggatccatttgctgggtcgcctcctgacttcgacttctttgtttatgcccatggctatggctatcctcctccaccacctccagaggatcctcctcaggccccccttcgcttgagtcgtcgtctcatcgtcctctctttttggtgtcttgatgccaaagggagagattatctatcatgtctttag

SEQ ID NO: 34851 - DNA, 666 bp, Oryza sativa
  Clone ID: PAT_MRT4530_38827C.1
atggggtttaaggggtcggcccacataggaggggcgcgcctgccatgctggcgccgtggtatgaggggcggcgccagtgtggctggcgcccccattctgctcagtcagcacctccacgacagccctagtgccacggtggcacgagcacggcgccaggattccatcaggacgggacgggatccctttcacccccttgcctatcaaagaggagagagagctaagcgccttagccgtgaggaggaggtggctgccggcgagggccggggaagaggacccgctcggcgagatgtggacacggccatcggcgatgagccctgcgcattaagctcccgcggcatcgaggacctcgtctgcgtcgtgtcgaggcagcggcgcatcgcggccaagccggcggcaggggagacatcgacgaagagaggaggggcagcggtggccggagccaggggacggaggggcggcgatagcggtggccggaccccggggagggagagacggcgatggctggagccaggaaagggagcgatggtggtggctggagccaagggagggagggcggcccagccgccaaggctagggcgcgccggcgaggggcggagagggcgcgagcgcgcgaagccagcggcgccatggcggggcgcgcacatcgggtgggaggtcgccggctag

SEQ ID NO: 34852 - DNA, 4851 bp, Oryza sativa
  Clone ID: PAT_MRT4530_38828C.1
atgtcgggtcaaacggggaatggcaaggatggtgataagggagctacgtttccttatgactatccctccacatctacatcttatgtgagcacctatagcggcaaagctccgtacttcaatgatacggactatgccacttggaaacataagatgaagatgcatttgaaatctattaaccctttgatttggagaatagtcgaaaaaggctatgttttgcagaatcccgaggaacccaccaaagaggacgacgagaacgagcacaagaacgctcaagccgctaatgcaattcttagcgccttgagtggaagtgagttcaaccgtgtggacggcattgagagtgccaaagtgatttgggacacgcttcggaatttgcatgaaggcacggatagtgttcgcgagtccaaggtggagattctcaaggggcaatttgagcggtttgtgatgttggatggtgagagtccaagcgacatgtatgatcgattgagcaagatcgttaatgagatcaagggacttggctccaaggacatgaccgatgaggttgtggtcaagaagatggttcgggcaatcactccaaggaactctaccttggtgaccatcattcgtgagcgtccggactacaaaactctcacacctcatgacttgctcgggcgtatccttgcccatgacatgctcgagcaagagtccaaggaggtcatccaatacatcaaccaaacctcaatcacaagcatcaagaaggaagacttggcattgaaggcgaaggaagaagaagaagagagtcgcaagagcaagagcaaggcggagatcgatgatgaagagatggctctcttcgtgaagaagttcggcaagttcatgaagcaaagcggcttcttcaagggaagttcgtccaagtattcctccaacaagtcaagtggaagacactccgcaagggtgtgctatgtgtgcaaagagcccaggcacttcattgcggattgcccccacatcaaggattgcctccacttcaaggaagacaagaagcttgagaagaaggagaagcacaagcatagcaagcatgatcgctatggccaagctcaccttgggatgatcttcggctccgactccgagtcaagctcaagtgatgaagaaggagttgccacgttcgccgtcaagccttcatcaccaccgagattcttcaactactcaagtgatgaggacgctcccatttgcctcatggcaaaggagtctaaggtaccctctcccctcaactcatttaatgttgatcttgttagtgatgaggaggaagatgttgaggatgaggttatggatgacgagttgttcaaatccataaccaaggaatctataccacacttgagtgagttgcttgggagacttgaggaccaatatgcaactcttgagaggcaagaggctttgctcattcgtgagaaaaagcgatctcatgaactcaagagtgagcttgctaaggagagagagaaaaatgaggctttggtacggctctacaagcaaaccaaagagtctcatgctaatcttgaggtggcgaacgctcaacttcaagagagagtggatggcttggacaaagcatacctctctcttgaagaaaagttcgaaaccttaaagaatagtgtctctctccctatgctttgcaaaagcaaaatgagaagcttatgtgactctttcacaatggcactacttaagtgccatatgggtagtaaggccctaaaggagtacctaggctatcaaagggacaacttcaaccatgagggtcttgggtatgttcctccaccaaaaggaaaggtggacaagagtgtgatgatcaagaggccccaaggtcttagcaattttattaaggccaaaagtatccttcctaatgattatgcttcacattgttcttttgatgcatcttatgttcttaggaagaatgctagtggtcgtgttgttgctaagtatgtaggcccgaggggcaaaaatgtttccattaagagagttctttgggtgcctaaggcacttgtcactaacatgagaggacccaagcaagaatctctctccggtggaagaagttgggtgattgatagtggatgcacaaatcacatgaccggagaagaatcaatgttttgctcccttgatctaaatggcacttcgcaagagaacatagtctttggggacaatggaaagggaaaagtaatgggattggatagggtgtgtagcgcgtgtcaagccggaaaacaaattggagctcatcacccggtcaagaacgtaatgacaactacaagaccgttggaacttctacacatggacctcttcgggccaattgcttatctaagcattggaggtaacaaatatggtctcgttattgttgatgacttttcacgcttcacgtgggtgttcttcttgcatgacaagagtgagacacaagcaatcttcaagaagtttgcaaaaagagcccaaaatgagttcgacctcaagatcaagaacattcgaagcgacaacggcaaggagttcaagaacatgtgcatcgagagtttccttgatgaagaaggcatcaagcacgagttctcggctccatattcacctcaacaaaatggagtagccgagaggaagaataggactctcatcgagatggcgaggaccatgttggatgagtacaagacatcggactgtttttgggccgaagccgtcaacaccgcatgccacgccattaaccgcctctatcttcaccgccttcttaagaagactcccgatgagcttcttaccggtaacaaaccaaatgtctcttactttcgtgttttcggtagtaagtgcgacattcttaataagaaggctaggtcctcaaagtttgctcctaaagttgatgaggggttcttgcttgggtatgggtcaaatgaatgcgcataccgcgttttcaacaaaacctccaatattgttgagatcgcgcgtgatgtgacatttgacgaaactaatggctctcaagtagagcaagttgactcacatgtgttaggtgaagaggaggaccctagcgaagcaatcaaaagattggctcttggagacgtgcgtcctagggagccacaacaaggggcctcttcctcaacacaagtggagccacctacatcaacccaagccgacaatccctccacttcaagcttggatcaaggtgaagaaggcgagcaagtgccaccctctccgataaatctagctcacccaagaatccaccaaagtatccaacgagatcaccccaccgacaacatcttaggagacatcaacaagggagtatccactcgttctcgtattgcaaatttttgtgagcattactcgtttgtgtcttctattgaacctctaagggtggaagaagctcttaatgatccagattgggtgatggcgatgcaagaggagttgaacaatttcacccagaatgaagtgtggactttggtggagcgacctcggcaaaatgtgattggcacaaagtggatctttcgcaataagcaagatgaggccggggtcgtaataaggaacaaggcgaggttagtggcgcaagggttcacccaaatcgaaggattagattttggtgaaacttttgcgccggtagctagacttgagtcaattcgcatattgcttgcttttgctactaacctcaattttaagctatatcaaatggatgttaaaagcgccttcctcaacgggcccatcaacgagttggtatacgtggagcaaccaccgggcttcgaggatccgaagtatcccaaccacgtgtacaagctccacaaggcactctacgggcttaagcaagcccctagagcttggtatgagtgttttcacaattttcttgtgaaaaacggctttgagatcgggaaagccgattcaactctttttactaaaagacatgataatgatatttttgtgtgccaaatatatgtcgatgacattatatttggttctactaacaagtcttttagtgaagagtttagtaggatgatgaccaaatgttttgagatgtccatgatgggtgaattaaagtttttcctcggccttcaaatcaagcaactcaaggaaggaaccttcatttgccaaacaaagtatttgaaggacatgctcaagaagtttggaatggagaatgcgaagccaatccacactcccatgccatcaaatggccacctcgacctcaacgagcaaggtaaagacgtcgaccaaaaggtataccgttccatcattggctcactcctttacctttgtgcatctaggcccgatattatgcttagtgtgtgcatgtgtgcaagatttcaagccgctccgaaggagtgtcaccttgtggccgtgaagagaattcttagatatttagtgcacacatctaatcttggtctttggtatcctaagggagcgaggtttgatctcatttgttatgctgatgcggattatgccgggtgcaaagtggataggaaaagcacatcgggtacttgccaattcttgggtaggtcccttgtttcttggtcttccaagaagcaaaactccgtcgccctatccaccgccgaagcggaatacatttcggcggggagttgttgtgctcaacttctttggatgaagcaaaccttgagagactatggcctcaatgtgtccaaaatcctactcctatgcgacaatgagagcgccattaagatagccaataatcccgtacaacattcccgaaccaaacatatagatattcgccaccatttcttgagagaccattccacaagaggcgacatagacatccaacatgtgagaaccgacaaacaattggcggatatcttcaccaagcctctagatgaagctaggttttgtgagttgagaagtgaactaaatatcttggattctcggaatgtggcttga

SEQ ID NO: 34853 - DNA, 473 bp, Oryza sativa
  Clone ID: PAT_MRT4530_38829C.1
acccaccccccccccccccccccccacccgcccatccccaacggaccattttggacaaaaaaacatgggcaacatattttcaaacctttttttatgcttacaaataaccattgactgactggcagttatcaaaaaatgtttacagctcccttttttttttctcaaatattaaaaattttaaccggatcacaaaactaaattccaaggagcaaaaaccgcctttttgattggtaactacccttggagtttttggacaacgttcacatcagggtgactttagttgacctttctacaggttaaacgcgacctcggttgggagcccaccccccggccggagggtgcccatattcaccattgccttggagaaatccgtggcgaacatcccggggttggcggagttttttctcaccaacgcgatcttggacccgccgttgaacagcttctggtgggagaggaacagaccctgttttttt

SEQ ID NO: 34854 - DNA, 3750 bp, Oryza sativa
  Clone ID: PAT_MRT4530_3882C.1
atggtgcacgacaccggcggcgggcgagcgtcgtcgacggcgtgccactactcgccgtcgctggtggcggcggagccggaggagcacgtccacggccgctccaaggacgacgacgacgacgccgccgtgtcgctcatgggcgagaaggccttgctggagctgctcctcgacatggctttggaacaacacgcaccagggaagaagctaccagctgaagagagggaagagagtgagttcgacatctatctgagagatgataaaagccatgtcctttaccatccagaattcagctctacatctgtgagttcttcaccattgtccgtaaaatctagcgaaagatcggatcttggtacagcttcagcggttctgacgaaggacgtggcattattagcagaagaaacagacattttagcaacccaactgaaagcatcgcaactttacagtgtggattcgagcaagtcaaatgaagaactgcagagcaagggtcaggtgttcgttagatcgacgaggttactcgagaggagatccaagcggcgttatgctcctcgagcatcgatcgctgatgtttcctgcagcgctgacaattcgaagaagaaagagaaatcaaagaagtatggcagagttcttgaaccagatgagcctttcaagctgttcctaagagatcgggagacgacggaattcctgacagcaaaagaggagagacatttgttcagtaaaatacaggcaaagccttacttttaccctgtcatctttattttcagaactgctcagattcttatgaaaatagaggaggctcaccggaaactagaagttcaatgcggccgtgagccgacattggcagagtgggctgaggctgtagggatgagcagcaaggagctgcagtcctctattcgcaccggaagacggtgccgggagaagatggctcgatcgaacttcaggcttgtgattcatgtagctaggaagtatgaaggatatggtcttgacatccaggaccttgttcaggatggatgcagtgggttgatgaagacctttgagaagttcaatcccagcaaggggtgtcgattcccgacctacgcatattggtggatacgccaatcaattaagaagtcaatcttcaagaactcaagactaatccggttaccggagagtgtgtatgcgcttctgagaaaggtgggcaaggcaaggatggaatgcatcatggaaggggagcaacccaccaacgcgaacgtagcgaggcgcgccggcatcaccatcgagaagcttgcgaagctccgagcgaaaacccggaaaccccggtcgatgcaggatcatgtctggtcagatgagggtgtcaccttccaggagatcacagaagacccaaatgtggagccacctgacctgagtgtggacaggatgatgatgaggcagcaggtgagggacttcctggggatcctgagccccagggagaaggagatcatcgagcaccggttcgggatccacgatggcgagccgaagacgctacatgtcatcggggacatgtttgggctgtccaaggagaggatcaggcagctgcagaaccgggcgctggagaagctcaagaggagtgcatccttgcaggggtttgatgtctactttgatttgctaacctgaagaagaaaggccaagcagctcatttggtttcagaaactttcagtcaagttgtccatacaaaacagcagaaacacatacacactgtagctttctagacctattatacatatatactacacacccagtgacacgtactgtacaagtatagtgctagatttgcagaaagaaatgtggtacacggattcagagtttcagatggcatccttttttgcttatgtaagtaaatttcccagcaagctgctgttggtgcttatactgatactgcaagtctgcaatgcaaagcaaccctcattgtaattaaggataatcatgtacatttttttaccctcaattcgagctgaccaggcgctgtaattattgcggaacaggtcctggatacatacttgtagcattaatacctttcacttggcactatgacaaattccccccgctgcagcctcccgccgcggggtttttctgcttttttttttttttttttttttgccagaggtcaacagccacaactagctccacatttgaaagaagggaataacaattctgtaagtaaggtattgatgcctatttcgtaggccataatagctacattgatctgttctccctaacagtagaagtgcgatacatgtaacagtcagaggcaggcagttagcaacagcggaggagatgctcctgcacataatactacacagagaacgcctagaagtcatgctaccatggcaacaacaggtttaccaaggaggaagcttggtggttactaaacacatgagacccgatgacgaaggttgacatcgtgacgtgccttggatagctgaagcctgtgaaggtctacacaaacataatttacacctcctgagctgcaaccgcctcacgctcagcatccaatccactcaacctccttggtttatcagacttcgtaaagtgcttggacatgagggatgcctgctcctggataatgcttctagcttcaactagttgagcttcaagttcaagttcccgctcggtagcttctgatgtcacttctgcacccttttgggcatcttgaagttgtgtcattcgggcctttatggaagccattttagtgcgcaaactctcttcaatctggtctctagccatgtgaaagggcaaatcaaagacatccgtcttgccaccaagtggagactgaggagatcctgcctcctgtcgtccattgcccacaacagctggctgtggaactccatttggagcattgaggaactcgcgcatatccatctgcatcgaacgcaatagtgctcgcaaatcagcattttcttgcatcaactcttgcttctttacctcataggcatcaacaatcattttgtaataatcattgtcattcttttttccactccaagttccacgctgccgtccttctttctgcaacaagttcattatttccattcctgaacgtgatgattccttctttttctccattaatacctggtttaacttctcctgcaatttgatgtattctttctcttttttcttcatttcatgaatttgctgggtacgtacttgctgattgccaataaccattttttggaactcatcgcgttcctgttgcagcttgtcaatctgagccttcaaagttgcagtgtttttggcctccgttctagtcaatgtggccagctcgcgatcttttgcagctaattgagcatccattctttcaatcttggcttctaatctagaaatatcagactgcatacgctgacgcagatcattggtagactcccggaactcaatatcacgctgccgctgctgaagaagagcatagatgcagttgcacgttctcgcaatcgatacggggtcggtggcgaagagatcgagcgaggccgggaagccgaaggtgacgagcgtctggttgaggtacctggcgcagtgctcgaggttccccgcgtccgcgaacgccgccgccgcgccaccgccaccgtcactcatgcctccgcctccgcctccgcctccgatggcgtgctggtgcgggtgcgacgaggcctgcattgccaagggggaggaagtcacaggccgatcgttagcgggtgcagcgcgcggatctgcgaggaggctagggttagggtttacccggagatcgaagcgcgaggaggcggacat

SEQ ID NO: 34855 - DNA, 159 bp, Oryza sativa
  Clone ID: PAT_MRT4530_38830C.1
cccacgcgtccgtagcgagcttccgaacctgaggatgaagcatcacatctcactggatgaatggacgcggacatgatgtaccttttgtcgcatgtgatctcccgtgcggcgtcgtctacctcctccgtgctgttgggggaggcgcggatcaccatgcgc

SEQ ID NO: 34856 - DNA, 441 bp, Oryza sativa
  Clone ID: PAT_MRT4530_38831C.1
atgactttttttttcctattagcactagaagtgaaagcattgagtatttgcaatgtattggagttgaaagatgcaccttctgttgtagcaggagtaaaaaaatgctggaatgtatgttgtgatgatcccagagtccaaggttggatgcttcatatcataaaggagttgtccatgctgcaatttatttcagtaagatacaatgtttctgctttgaggatcaaacccttcttccaatgcaaagaagaaaaagggaaattcagccaatgtgcagtgtatattctgcaagttataagcaaggattttgatgctccttatttcttccctgaaaatttcaagaagatgcttgatgctaatgtcttctcgagctttcagattcttcacaagaaaaagagtgtggctgtggactccaggattacattgaatcttgaaaagaccacatga

SEQ ID NO: 34857 - DNA, 171 bp, Oryza sativa
  Clone ID: PAT_MRT4530_38832C.1
aaggaccattgataaataggaaaaatccagcatcattaaattacagatccatgaactgcaaaactgggaaatttaacaacagaatggaccgggtttataggagcactttttattccactttgtttaaccccacaaacaaacggaatatccttttgggggaacaagccaaag

SEQ ID NO: 34858 - DNA, 304 bp, Oryza sativa
  Clone ID: PAT_MRT4530_38833C.1
atttcaatgaatgtttaactgcagcactattctagatgtctttggtccaagtcaaaatatccttgcatcacacttggatcatggtcaatgtcagtacagtctttacgagttgtggacttgtggtcccatgtcatggtggttggtcgtgatttgatgccgacatggttgcgcttgcgcatcgcattcttgatttgttaaaaaaaaaaaaaaataaaatataaatttataaaaataaaaatataataaaaataattttaataataatatataaatattatatattattttaaatataaaaataatg

SEQ ID NO: 34859 - DNA, 2731 bp, Oryza sativa
  Clone ID: PAT_MRT4530_38834C.1
aaaaaaagaaaaagaaaaaagaaaattcccctctgacctgattctatctctcgagcgggctcggctcctcctcgtcggcgttcctccgcctccgccgtcttctccgccatctcctctctcgagctctctccctccccgatccgctccggcatctccggcctccgctccgttcggccggcgcgccagtgtcctgtgtgtcccccacatcttctgccgcaacttgcaaccctagccgcggatggcggcgcagccttcttcgtcggcgtcgacgggcgctaccaagtttgatgcatcgcagtatgctttctttgggaacaacgcggtggaagaggttgagctaggtggattggaggatgatgatggtgtcgatgctggttttgttggccctggtgatgaagaatacccttctgcttatggaagggatatgtttgaggatgaaggtggaggttcatttactggtgttgatgatcttgctggagcattctcaaagttgaccagaagcatcaatgaaccaacacaatcgggcataattagtcatgggggttcaatttctagacaaagttctactccggattgggcacaagattcatattggcctacgcagcctatatttggagctgaacaagggctggataatgaaagccggtggtctcaaccaccccatttagcccgctttgctgattctagactgcacagaacatcctcatcgccgcagcaagatgctcaatacaatcctaatgaacatattcttggagcaatgccatatctgttgcatagaacttcatcatacccacaacaagagcctcaatacaatcacacagaaccaattccggtacctaaatcatcattcatttcgtaccctccatctggtgcagtatcccattcttcaccaggtcaaccacatcacatgaacatgccatctcctcccacttcattccaaatgcctgtatctgcacaaaatgagttacaccatccccagtttcctcgtggtggtatgcctccagggccacttggtcggagcatggctcatttggattcagcaggtttatcaactaataatttgcaacagaatgctctaaacagtgggccagttcgtccaaatggtgccatgcttacaccaggtttggtgcagcacaatctgcagcgtccaaatggattggtcccacctcaaatgctgtcacgccgtccacaacatggaatggccccaattcaacactctccgccacaattctcacagttccatgctcagatgcttggtcctcggcatcctccaccacaaggtcgtcagatgtacaatcctcagcattcatcacaaatgatgagtggatttgatgcaaatttggcaatgcctgacttgagtgatccgagagcaagagcaatgctgcaccatggagtgcatggccagcattatctcccccaaggttttgagcttgccggtatgaggatggataatgggtggccgcggttcagatccaagtacatgtccacgcctgaaattgagaacattgcaaggatgcagcaagctgctactcagatcaatgatccgtacattgatgattactatcatcaagcctgtttagctaaaaagtcagcaggaggtcaactcaagcaccacttctgtccgaccttgattagagatccatcatcctgtgcacggagtaaagatgagccacatgcatatctccaggttgatgctcttggaaggttaccattttcttccatccgcaggcctcgtccgctcctcgatgttgaacaaacctctgaatcaagtgatgacgttactgaaaaatctgcttcaaaaacacttgaccaagaaccaatgctggctgctaggatcacaattgaagatggcctctgcctactgcttgatgtagatgatattgatcgcttgctgcaatttagccagcagcaagatggtggcttgcaactgagaaacaggagacaggccctccttgagcagctggcagaatccctgcaactagttgatccacttacacctagtaacaatgcacctctctcaccaaatgatgatctggtgtttctccgaatagtctctcttccgaagggccgcaagctactttctcgttaccttgaacttgtgagttctggcagtgagcttgctagaattgcttgcatggcagtcttccggcatctaagattcatatttggaaatttgccatctgatagtagtgctgttgagacaacgacaaaacttgctactgctgtatcaacctgtgttgttcggttggagttgagtggactaagtgcttgccttgcagctattgtgtgttcttcgctgcaaccccctctgcgaccccttggacatgctgcaggtgatggggcttctttcatcataaagtctgtactggacacagcaacagagcttctcactgatcagcatgtggcctctacctacagcatgcaaaacagagctctatggcaagcatcatttgatgccttctttgggctgcttacagagtactgcatgagtaaattcgatagtgtgattcatgcattgcaaacacaacctgctgtggcagcagttataggcagggaaatgccagttgaattgttgcgtgccagccttccccacacaaatgagtatcagcggaagcagttgctcggttttgctcagcgcacggtgcctgttaacaaccatagttctcatgggtccagtaatggacccatgacatcagaatctatcccaagttcagaaagccggaaaatatga

SEQ ID NO: 34860 - DNA, 342 bp, Oryza sativa
  Clone ID: PAT_MRT4530_38835C.1
ctagacctccatctggtgcagtatcccattcttcgccaggtcaaccacataacatgaacatgccatctcctcccacttcattccaaatgcctgtatctgcacaaaatgagttacaccatccccagtttcctcgtggtggtatgcctccagggccacttggtcggagcatggctcatttggattcagcaggtttatcaactcaaatgctgtcacgccatccacaacatggaatggccccaattcaacactctccgccacaattctcacagttccatgctcagatgcttggtcctcggcatcctccaccaaaaggttgtcagatgtacaatcctcagcgtccat

SEQ ID NO: 34861 - DNA, 192 bp, Oryza sativa
  Clone ID: PAT_MRT4530_38836C.1
atggccacagcaaaggcgggcgaggatggcgggatggacgcgggcaacaacggcggccgtggaggacatacgaggactatggtggccgcgggtgagggcagcgggatgagcccagtgaggagcagcgtgaatgtcgccgccgccgccgacaaaatggccgacacgccggcgacagacgagccgctggagtaa

SEQ ID NO: 34862 - DNA, 290 bp, Oryza sativa
  Clone ID: PAT_MRT4530_38837C.1
tgcttgatgtagatgatattgatcgcttgctgcaatttagccagcagcaagatggtggcttgcaactgagaaacaggagacaggccctccttgagcagctggcagaatcgctgcaactagttgatccacttacacctagtaacaatgcacctctctcaccaaatgatgatctggtgtttctccgaatagtctctcttccgaagggccgcaagctactttctcgttaccttgaacttctattgtgtgttcttcgctgcaaccccctctgcgaccccttggacatgctgcag

SEQ ID NO: 34863 - DNA, 2331 bp, Oryza sativa
  Clone ID: PAT_MRT4530_38838C.1
atggcgatctcgttgctgctgctcctcctcctccttggcgccggccacatgacccagccgacggcggcggcgctcaaccaggacggcgtgctgctcctctccttcaagttctcgctcttggctgacccgctcgcctccctcgccggctggggctactccgacgacacgccctgcgcctggaacggcgtcgtctgcatggccttcccgtcgtcgtcggcgtcggaggcggcgagggtggtgagcgtcgtcctgcccaacgcgcagctggtcggccccattgccagggagctcggcctcatcgagcacctccgccacctcgacctctccggcaacgcgctcaacggcaccgtccccgtcgagctgctgcgcgcgccggagctccgcgtgctctcgctcgccggcaacggcatcaacggcgccctgcccgaccaggtcggccagctccgcagcctccgcgcgctcaacctcgccgggaacgccctctccggccccatcccggcgaacctcaccctgctccccaacctcaccgccgtctccttggccaacaacttcttctccggcgcgctccccgtcgggggcttcccggcgctgcaggtgctcgacgtcagctccaacctcctcaacggcacgctcccgccggacttcggcggcgccgcgctgcgctacgtcaacctctcctccaaccgcctcgccggcgccatcccgccggagatggcgtcgcgcctgccgcccaacgtcaccatcgacctctcctacaacaacctcaccggcgccattcccacgctggcgcccttcaccgtgcagaggcccacggcgttcgcgggcaacgccgagctgtgcgggaggccgctcgacagcctctgcgcctccgccgcggatccacccatcaatggcacggcacgctcgccgccggccatcgcggcgatacccaagaaccccaccgaggcgctgcccggcgatgacaccggagcgccggcgtcaggatcaggccagcagggcaggatgaggatggccaccatcatcgccatcgccgccggcgacgtggccggcatcgccgtcctggtggtggtgttcatgtacgtgtaccaggtgaggaagaagaggcagcgggaggaggcggcgaagcagaggatgggcgtcgtgttcaagaagccggagcccgacgagtcgccggacggcatcggccggagcctgtcgtgctgcctgcggaagaaggccggagacgagagcgacagcacggaggaggtgactgacacgtcggcgtccaaggagggcgtcgtcgccgccaaggccaagacggacgacaagaagggcaaggacggcggcggcggcgcggtgctggtgacggtggacggagaggtggagctggagatggagacgctgctgaaggcgtcggcgtacatcctgggcgcggcgggcagcagcatcgtgtacaaggcggtgctggccgacggcgccgtgctggcggtgcgcaggatcggcagcgacgacgccggcgtgaggcggttcagcgagttcgacgcccacatgcgcgccatcgccaggctccgccacgccaacatcctccgcctccgcggcttctactggggacccgacgagatgctcctcatccacgacttcgccgccaatggcagcctcgccaacatctccgtcaagaggaagacggggtcgtcgccgatcagcctgagttggagctcgcggctgcgcatcgcgcgcggcgtggcgagagggctggccttcctccacgacaagaagttcgtgcacggcaacgttcgccccagcaacatcctgctcgacgccgacatggagccgctattggcggacctcgggatccaccggctcatccgcggcggggacacgctcaagccggcggctgcggcgggggcggggcggttcgggagcaagcggtcggcgaagagcttgccggacctgtcgccgccgccgggcgcgagcccgctggcggggccgtccgggtccggcgacacagcggtggcgcagtaccaggcgccggagggcgtgaagaaccccaaggcgaacgccaagtgggacgtctactccttgggcatggtgctcctcgagctggtcgccgggcgcgcgctgacgagcctggagctctgccagtggagctccgcggaggagagcgggcagcaggtgttccggctggccgacgcggcgctgcgcggggagatggccgggagggaggaggcgctggcgagctgcctccggctggggttcgcgtgctgcgccatggcgccgcacaagaggccgtccatgaaggaggtggtggcggcgatggacaggataccgtcgccgtcgtcgtcggctcagtga

SEQ ID NO: 34864 - DNA, 2744 bp, Oryza sativa
  Clone ID: PAT_MRT4530_38839C.1
atggcggcgcagccttcttcgtcggcgtcgacgggcgataccaagtttgatgcgtcgcagtatgctttctttggcaacaacgcggtggaagaagttgagctaggtggattggaggatgatgatggtatcgatgctggttttgttggtcctggtgatgaagaatacccttctgcttatggaagggatatgtttgagaattacaagaaaacagatgcaatacggcagcggcatgggactggaacaatacacacagatacagcaggcccaaatacccagagaccagaggtactgctgctgttctcaacacctatcgccaccactgcacctttcccctgccatcagctcatggtttgctggctggcttacagcatgcaggaagcagtggggccttatgtgcatgatgaaggtggaggttcatttactggcgttgatgatcttgctggagcattctcaaagttgaccagaagcatcaatgaaccaacacaatcgggaataattagtcgtgggggttcaatttctagacaaagttctactctggactgggcacaagattcatattggcctacacagcctatatttggagctgaaccagggctgaataatgaaagccggtggtctcaaccacctcatttagcccgctttgctgattctagactgcacagaacatcctcatcgccgcagcaagatgctcaatacaatcctaatgaacatattcttggagcaatgccatctctgttgcatagaacttcatcatacccacaacaagagcctcaatacagtcacacagaaccaattccggtacctaaatcatcattcattccgtaccctccatctggtgcagtatcccattcttcgccaggtcaaccacataacatgaacatgccatctcctcccacttcattccaaatgcctgtatctgcacaaaatgagttacaccatccccagtttcctcgtggtggtatgcctccagggccacttggtcggagcatggctcatttggattcagcaggtttatcaactaataatttgcaacagaatgctctaaacagtgggccagttcgtccaaatggtgccatgcttacaccaggtttggtgcagcacaatctgcagcgtccaaatggattggtcccacctcaaatgctgtcacgccatccacaacatggaatggccccaattcaacactctccgccacaattctcacagttccatgctcagatgcttggtcctcggcatcctccaccaaaaggttgtcagatgtacaatcctcagcgtccatcacaaatgatgagtggatttgatgcaaatttggcaatgcctgacttgagtgatccgagagcaagagcaatgctgcaccatggagtgcatggccagcattatctcccccaaggttttgagcttgccggtatgaggatggataatgggtggccgcggttcagatccaagtacatgtccacgcctgaaattgagaacattgcaaggatgcagcaagctgctactcagatcaatgatccgtacattgatgattactatcatcaagcctgtttagctaaaaagtcagcaggaggtcaactcaagcaccacttctgtccgaccttgattagagatccatcatcccgtgcacggagtaaagatgagccacatgcgtatctccaggttgatgctcttggaaggttaccattttcttccatccgcaggcctcgtccgctcctcgatgttgaacaaacctctgaatcaagtgatgacgttactgaaaaatctgcttcaaaaacacttgaccaagaaccaatgctggctgctagaatcacaattgaagatggcctctgcctactgcttgatgtagatgatattgatcgcttgctgcaatttagccagcagcaagatggtggcttgcaactgagaaacaggagacaggccctccttgagcagctggcagaatccctgcaactagttgatccacttacacctagtaacaatgcacctctctcaccaaatgatgatctggtgtttctccgaatagtctctcttccgaagggccgcaagctactttctcgttaccttgaacttgtgagttctggcagtgagcttgctagaattgcttgcatggcagtcttccggcatctaagatttatatttggaaatttgccatctgatagtagtgctgttgagacaacgacaaaacttgctactgctgtatcaacctgtgttgttcggttggagttgagtggactaagtgcttgccttgcagctattgtgtgttcttcgctgcaaccccctctgcgaccccttggacatgctgcaggtgatggggcttctttcatcataaagtctgtactggacacagcaacagagcttctcactgatcagcatgtggcctctacctacagcatgcaaaacagagctctatggcaagcatcatttgatgccttctttgggctgcttacagagtactgcatgagtaaattcgatagtgtgattcatgcattgcaaacacaacctgctgtggcagcagttataggcagggaaatgccagttgaattgttgcgtgctagccttccccacacaaatgagtatcagcggaagcagttgctcggttttgctcagcgcacggtgcctgttaacaaccatagttctcatgggtccagtaatggacccatgacatcagaatctatcccaagttcagaaagctggaaaatatgagtgaaagcatagtgtttttgcttctttgggtaatcagtatactagat

SEQ ID NO: 34865 - DNA, 393 bp, Oryza sativa
  Clone ID: PAT_MRT4530_3883C.1
cgatctatacccccacgcgttcggccacgcgtgcgttttctctacctacccacctgagccggttcctggtacaggtaccccttagttgaaggtcgttcgaactgttgctgggagtatggcacgggttacatactttagcggcgtagctcctggtatagatcctcaacagaaaagcaatggctggtgcacggagctcatacttcagcgctgcaacgcttggtactcgtacctcagatcgaggcattttctgtaccccttattaccctgaaaaagcaaggtcaccttgtgtgcttaaacctataaccatgtttcggctaacctagcctgctgcgtccttgcgttccaacaaggggtgattcatgaatattgacctgttgtccatcgacttcacct

SEQ ID NO: 34866 - DNA, 2594 bp, Oryza sativa
  Clone ID: PAT_MRT4530_38840C.1
atgaaggccgacgccaagtggccggcgatggtgctcggcggcgacggcggcggcgggaggcgtgcctcgccagggtctgcgcctccgccggccgcgcccgctgccgtggcgtgcagcctcctcgccacctccccgcccgccagcatcggcaacggtggcggctcggcgcactgcgacgtcggcgacgcgtcccgcgggctcggcgtggcggactggctgcggctgcagcggcactcgagcgggagcagcgccggcgacgacggggatggcttctcctccgtctccaccctcgccactgccgacaagggcggcgaccccgccgatcgcccggccggcagcagcggcggcgttggcagcaatagcccggcgcatcaggagtctgaggcgtaccacctccagcttgccctatcgctcggtcttgactccgagaccaccactggcgtagatcgaatcctgcctgaggtcgtagcagggggttcggttttaatggacctacgggtgcaaattcctggctgcgtcgcttctctaatgtgggcgaatatcaggtagtcctgctgggcaaaagacctccttgcgctgaacctgattcccgccagtatcagctaaccccctgaacacttctatcacgatcgcgccatcaactttaagacgccgatagtttcggttacatctgcaaatccaacaccactgaagatacgagtgcttgacaacttacagatggtgacttgctatcttaggcatcagcttcttaggtttgaattcagatatttttctttcttttggcttacgattattgccagtaatatttttgccacgaaagctttataagcttatagttatatctcttccctggacggctaaataatttatttcacttgtaaagattattctcatttacaggagtttacttgaggttttctattccgtacaaattgaatgttataattctttatttgccgacaatgattatttctttgtcacatcgtatcaaactctatcagtctcccatgtcgagttgtgaggggatgcaggtactgcaaatctgctggtgctgcttcatgcctggtgcactttggtaatgacagggaatatctgattgatttgatagggaacccaggcttcttatctgaacctgactccctcttaaatgggctctcatccatttcagtttcttcaccattgcgcccaccaaaatacaattcagctgatattgttaataacttcaagtcattggcgaagcaatatttccttgattgccaatcgctaaatatgatgttcaatgatccagcagcagtttcagggacggttgttgacttagatgaggccatgggatcaaatattggtccaaacttatcgcctgcaacaaacagtgattttcaagctaacttttcacatcgtagtcgtggtgcccagtccagtggtcaagatggcaattttcttattcagaagagttctcctgaggatacacaatctgcacaaagtgaccccttcagtgatatatctctcgacattgaagacttgattattccttggagtgaacttgttttgaaagagaaaattggagctggctcatttggaaccgtgcaccgtgcggattggaatggctcggatgttgctgtaaagattttgatggagcaagacttccacccagagcgtctcaaagaatttcttagggaggttgcaattatgaaaagtctgcgccatccaaacattgtcctttttatgggtgctgttactcagccaccaaaactttcgattgtgacagaatatctatcaagaggtagcctatacaggattttgcacaagcatggtgcaagggaaaatctagatgagaagcggcgattgagtatggcttttgacgtggctaaggggatgaattaccttcacaagcgcaatcctcctatagtccaccgggatctaaagtcaccaaatctgttggttgataaaaagtacactgtgaaggtctgtgactttggtctctccagattgaaggcaaacacatttttgtcttccaagactgcagcagggactcctgagtggatggcaccagaagttatacgagatgagccatcaaatgagaagtctgatgtctacagctttggtgttatcctatgggagctcatgacattgcaacaaccatggagtactttgaatccagctcagagaaccctggcgacgaccgtcttttgccagtatcatggaatccctgaaacctctaatcagaactccccatcaacttcaagaggatatcagttaacggttcatgggcaccttcaaaaccctgaagatacgagcccttgacaacttacaaaggtgactagctatcttagtcgttaacttcttaggtttgaattcagacatttttctttcttttggcttccgattattgtcagtaatatttttgctccgaaagctatttaagcttatagttatagctcttccctggacggctaaattagttatttcactggtaaagttcattttcatgataatgtatatattcataccatgctataccgtacatacaaaatgaacagactccttaaataaagcccatcattttttttttgcctcaaaaaaaaaaaaaaaaacaa

SEQ ID NO: 34867 - DNA, 4517 bp, Oryza sativa
  Clone ID: PAT_MRT4530_38841C.1
ggtaaggattcctaggccgctttttttttttttttttttaacatagaaaaagaataatataccataaactcagaacatttgagtaaataatgttgtacattaagtgccaatacaagctagcagatatcgaacagactatatatctacacaaaaaaagcatcggtattaagttgctacatttgctttacactccaaaaacgtgacctcggattgacatcctgctggacaccggcctcctaccgtttctggaagttcaagcacttgatgccgtatccaaagaggaagaagaagatgatgacgtagccgaaatgggccagcacaacgtagccgaggaagtcgtgcttaaagcccatgttcttctccaagaaatccttcaccaccatggtggtagcttggccaggaacggtgacaacacggtcgctgtccgcaaactgcgatgcaatcactccatagatggtccaggagaccgggttggcccaatagaaccatctccaccaaacaggaatcagtggacggggtataatgaatccggcaaaattgttccacgaggagagcacaaatgaaacaagaacggccgcaagcatttccgaagcagtgcacgcaaccagcatcatgctaaacaatgtgaagtaggcgaaggccgcaatcataaagaacaggaagtagaagaacttgtccgccttccactcatagccaatcatggaatagatgaggatagtgtaaagaacaccttgaactgcactgtagcagaactcgacaaatccttgtgcaaacgcataagacagtggagagtacatccctgctgccttttcacggtaaaagactgtcctctcaactgacaccacaggcaaaagtgtgagcaaatttgctgctccaaggaagaaaacagcagcataggtggctccaagtagattgttcagatcattcacggactctatattctttcccctccgccaaaagacagtaccaaacacaagaccatagagaagcgtcataacataacgcatagcattgtagggtggatccttccaataagattgaaattgcttccatgtatttgccacacactgatttaggaaattctgggaatatttggtaggaaatgagagatcctggaagcctggaggtggaacactcagctgcttaataagttcttgattgctccggtaaagtgcagaattggcataaacttcagcaaagtctatgtccagacgagcctcagctagagaagagctaacttcaagcatccatgttgctgggttatatccttctgtgatttttgggacccctggaattgcctcgaaatattcgactagtatttgtgaatggagaccaagctggccagcatatataacccgtcctcccctctttagcaacagaagagtacgcataacaattgctgcagctctagcatcaagacctgaagttggttcatccatgaagataattgaaggatttgccactagttctactgcgattgtcagcctcttcctttgttcagttgacaacccactaacaccagggagaccaaccagagcatcacgcaatacatcaagctcaactagtgacatcacttcctccacaaacaccttcctggtgttcttatcaacttctgaggaaaggcgcagccaagcagaataaacaatggattcatatacagtaagatttggtgaatgtatatcagtttgttcacaatagccactgatgcgagcaaaggtttcttgttttttagggtaaccagaaagcttgatatctccctcaatcgttccactagtctttcttcctgccagtacatccattagagtggtttttccagctccactgacaccaactagtgctgttagaacacctggtcggaatgcaccactaatatcagatagtagttggaggcggctttctgtgaatccttgtgctttcatttcagcaggcatgtcaacgtagtagttcatatggttgaaagaaagggaaagaggctggaatggcaagaccattcctctctggcttcttctgttttctgttccattcgtaccattaataacctctgacatttgttcctgattagattctgcttcgagctcacttttggtgtcatcatcagaaacaacagtgcttgcactgccaataggtcttaggaatgtaagagcacaaaggtagagaatgttaaaaacaatcataaatcctatcatggctccaatggaaagccaatacccccattctcctgtgaagtagcctttggattgaagaaaagccttccctattgttggtgcactgatacttgagtcattgtttggaatggcccacctactggcaaggaattcattaactgataaggcattattgctatacatcatgggagatgtccagtagccccatatccaccacggtttaatgtcctttctggaaacgagaaatcctccaaagaggaaaataagtagcagcacaaacatgccaaatgtattagctaccaccattgatcttaaaattgcacctagcaaccggaacaaggccaaggccatctggtgtgtccaaaagtatgcaagaaactgcttgaagaaccttcctgcagcaggtgcaaaacccacaacataatatgtcaaaactatccaaagagatgattccataagggataaaggcaccttcagaatgatgtttgcaagtccataggtccatgctggaaagaacaggaagtctctttgtttgtagaatatcgggagtttatctatagtcaattgaagttcaccaaaaccattgaacatgattgtaatcaaagaagcagttaaagcaccaacatatttagaggtatcagaaaatttctcgtggggcatctttgttctcaaaaacagagtcatggttataaatccaaggacaaacagttgaaaggccttgaatatgaagaggaatgaattccgcttcattagcaaccactctcttgacatcactgccttaagggactctagactagataacccatacttcttggtagtcaatgcagcaggatgtgtcttagatttgtcatagggaacttgaagctctttctgcagcttttgcccaacatgaaatttcttgaaattctgagcaaactcttcgactgacacataacgataatgatcctgctcaaggaaccagtattgctgttgatctttcctagaagtcacctcttgaagaaagtcggccactcctttccgttcaggacaccgaaaaccagcactctcaaagaattcaagtatgttctcccgtggtccatggtagactatgtaaccttctgctataagaacgatgtcatcgaataaagcataggtctcaggtggaggctgtaggagagacatcatcactgtagcattcatcacatgggtcacctgtctgatgtatttgacaatctgaaatgtgctagaactatcaagcccagtagatatttcatccatgaacaaagctgttgctggtccagtgagcatctccccagtagtcacacgtttcttttgaccaccagaaatgcctcttatcatagcaccaccaacaatagtatcggcacaaatgtccagtccaagcgccttcagaacaagatctgtgacaatattgttctgttttccttctactacagttgccttcatcaaagcatcaatctcagggtcaggtttaatgcctgcattacgttcccgtcttgttaattctgacagcatatcatatctggcaccacttccaaggcatcgtctcgagaaatccagtgtctctcttactgtcatctcaggattgtgcagatcatgctgactgacgtaagcactagtcctctcaggatagaactctttaaacgtatgaccacagtatgtgatctcgccagacaccttgagatttttatcaggcttgccggttagtgctcgcataagtgtgctttttccagacgatggaggcccgagaagaagagtcatccttgatggcttgataatgccattaacatcgttgagtatcttaagcttcctcttgttcgacgagataaataggctaacgagaccctctagcgtgttgatggtggcgttgagcagcgtgggcagcgcgcgcttgccgacgtgcacgtccgcctcgatgtccagatgctggtacctcacctcgatcttcggcagctcaatcccaacctggtcgaggcggtcgcggaagcggcggaggaagcgctcgttgtcgtcctcgacggccttgaagacgcgctccatgagctcgcggccctcgcgcgggtcgaggttggcgatgtccacctcgtcggccttgaacagcgacccggccccctcgccgtcgccgccgccgtccaccgccttgcggaggatgccgcggcgcatgcggtcgtacgtcggcagcttctccagcgccgcccaccgcaggttctcctcgtcgtccccggcgtcgcgccggctcgccgccgccgaccgccggaacgggtcgtccccgtcgcgcagcgaccgcgccagcgacgccgcccccgacgacagccagctccgccggctccccgacggggttatctcccccgccat

SEQ ID NO: 34868 - DNA, 336 bp, Oryza sativa
  Clone ID: PAT_MRT4530_38842C.1
atggcttgtggctgtggagaagcaagccaagctgtcggtggcggcgggaacccgagacccccatatggatatggcgctgcctgcgacgaatttcttgcgggggcgggagagattatacaaggtggaagaggagcgggtaggcaatttcgcgagcgggagagggagaggagaagcgcgggaaccgcgcgggagggaggggagaagcgcgggagccggggggatagattgcgtcgcgcgctgagaatcgaggaggcggcggcgatcgagagagaggaaggggatctggagaggagggcgatgcggacggggagggcgatacggatggaaagcgaatag

SEQ ID NO: 34869 - DNA, 323 bp, Oryza sativa
  unsure (1)..(323): unsure at all n locations
  Clone ID: PAT_MRT4530_38843C.1
cccgggtcccccattcccccccanantnaattntttttacaattcccnnggcccccctttttccaccnccttactggggaaaaaccctngcttttccccnccttantccccttgcaacnnantccccctttccccccccngggggttntttcaatnattnctnccccattccccctccccncnnttnccccccccnnaatgggcaaatgggcnnattttnncccttaannttttnttnaaattcccctttcaanttttngtttnnntccnccccctttttnnccccaanangcccaannccnccaantncccccctttnttcc

SEQ ID NO: 34870 - DNA, 213 bp, Oryza sativa
  Clone ID: PAT_MRT4530_38844C.1
atggcaatgggtctccgttcaccgtttccccacgatcgagcactcggcagcggcggctccgttgcacgtgtgcaacgctactccgccagcggccagccaccagccgtcgacgcgggcgcgacgcttgccgtcctccgtccgctgccagcgccatgccgccctctgtcgccactcgctagcacgccgtccgccgccaacggcctccgtcgctga

SEQ ID NO: 34871 - DNA, 1047 bp, Oryza sativa
  Clone ID: PAT_MRT4530_38845C.1
atgtcaccacaaacagaaactaaagcaagtgttggatttaaagctggtgttaaggattataaattgacttactacaccccggagtacgaaaccaaggacactgatatcttggcagcattccgagtaactcctcagccgggggttccgcccgaagaagcaggggctgcagtagctgccgaatcttctactggtacatggacaactgtttggactgatggacttaccagtcttgatcgttacaaaggccgatgctatcacatcgagcccgttgttggggaggataatcaatatatcgcttatgtagcttatccattagacctatttgaagagggttctgttactaacatgtttacttccattgtgggtaacgtatttggtttcaaagccctacgcgctctacttctggaggatctgcgaattccccctacttattcaaaaactttccaaggtccgcctcatggtatccaagttgaaagggataagttgaacaaatacggtcgtcctttattgggatgtactattaaaccaaaattgggattatctgcaaaaaattatggtagagcatgttatgagtgtctacgcggtggacttgattttaccaaagatgatgaaaacgtaaactcacaaccatttatgcgttggagggaccgttttgtcttttgtgccaaagctatttataaatcacaggccgaaaccggtgaaattaaggggcattacttgaatgcgactgcagtttggctcattattgccgcgacaacggcctacttcttcacattcaccgagcaatgcatgcagttattgatagacagaaaaatcatggactgggtatccatgccaggtgttataccggtggcttcagggggtattcatgtttggcatatgccagctctgaccgaaatctttggagatgattctgtattgcaatttggtggaggaactttaggacatccttggggtaatgcacctggtgcagcagctaatcgggtggctttagaagcctgtgtacaagctcgtaacgaagggcgcgatcttgctcgtgaagattga

SEQ ID NO: 34872 - DNA, 447 bp, Oryza sativa
  Clone ID: PAT_MRT4530_38846C.1
tttggttatcatgacttggagacatctgttgtcgatcatattagttttatccagtggggtactgggtagagatgtgattcagcaagatattggttttgtggttgaggctatcttgactgttcctgatccccctccctctccttctcctcaaccaagtcctgatgtagcaccaccacccaatcctgttcctaaccctattcctgtacctattcctgtacctattcctataagtgcacctcaacctaatcctaatcctactcctgtacctattcccataagtgcacctcaacctaatcctaattctaatcctgtacctgttctataaatacaccttaacctattcctactccaatacctgatccacagtcttgtaatgtaaatggttatgtctgtgataatgtagatcctatgagcaagtgtatgtgcataccaccacaacccaatgag

SEQ ID NO: 34873 - DNA, 1337 bp, Oryza sativa
  Clone ID: PAT_MRT4530_38847C.1
ccggccgcgaccttaataagtgatcgggcggcgaggcgaggcgaggtgagtaacagatcgatcgatccatgtcgccagtcgggtggttggtcttgttgttgccggcgctgctgcggcggggcagcagcggggtggctgcggcggggaaggtgccggcggtgatcgtgttcggcgactcgtcggtggacacgggcaacaacaacttcatcccgacgatcgcgcggagcaacttctggccgtacgggcgcgactacgctgacggcctccccaccggccgcttctccaacggccgcctcgccaccgacttcatctccgaggccttcggactccctccctgcatccctgcctacctcgacaccaacctcaccatcgaccagctcgcctccggcgtctccttcgcctccgccgccaccggcctcgacaacgccaccgccggagtcctatccgtgatcacgattggcgagcagcttcagtacttcagggagtacaaggagaggctgaggatcgccaagggggaggctgaagccggcgagatcatcggcgaggcgctctacatctggagcatcggcaccaacgacttcatcgagaactactacaacctgccggagcggcggatgcagtacacggtggcggagtacgaggcgtacctgctggggctcgccgagtccgccatccgcgacgtgcactccctcggcggccggaagatggacttcaccgggctgacgccgatggggtgcctccccgccgagcgcatcggcaaccgcgacaaccccggcgagtgcaacgaggactacaacgccgtcgcccggagcttcaacggcaagcttcaggggctcgccgccaggctcaacaaggacctccccggcctccaactcgtctacgccgacacctacaagatcctcgcctccgtcgtcgacaagccggccgactacggttttgaaaatgcagtgcaaggttgctgtgggacaggactcttcgaggccggttacttctgcagcttgagcacctcgttgttatgtcaaaatgccaacaaatacgtcttctttgatgcaatccatcccacggagaaaatgtacaagatcattgccgatacagtcatgaacaccacacttaatgtgttcctataaagtttattaattttgtggattgatggatacatatatatacgggcggtgaaagtactgtacaagttgcttaatgcgtaaactaaacaaacaccatagatattcactctcttgggatcatatatatactacgtgattgtacaaggatgaacggactactgtataaatcaaaatatgatcagttttgtaattaaaaaaaaaaaaaaaaaaaaa

SEQ ID NO: 34874 - DNA, 404 bp, Oryza sativa
  Clone ID: PAT_MRT4530_38848C.1
atggcgatgctgcacgttgccgtcactctcgctcccagtcaaccgagccgcgacgatagcgtttttcccgcgagggcacgaggcgggggccgcgttgctcgccacttcgtccggctaaattcggagccgagaattagccgggcgaagcgggtgggcgggccagaaaaaacgaagaattccggccgcgtttctggcagcccgcacgaccagcagatggcggtcggtgtcctcgtcgtcgtcgtcgtgatcgcgcgcctgcccggtggtgccgtggtggctggtcgtttcccagcgacgtacgggttcagcgaacgtgttttgccgcccaggccagatgcgttgcgtcctgccttggtaggggtcctaggggagtaggactcgtcggccaaaagcttgacgcccat

SEQ ID NO: 34875 - DNA, 4705 bp, Oryza sativa
  Clone ID: PAT_MRT4530_38849C.1
ctatcctactgcaataattctcgctaagaagaatgcccatgttgtggcaattccacccagaaggtaatgggttactcctacagcacgtccttgtataatgctcaaggctctaggctgagtagcaggagcaacttttaatttgttatgagcccaaacgatagattcaattagttcttgccaataaccacggccgctgaataaaaacattaaactgaaggcccagacaaaatgagcacctaagaaaaaaagaccatatgtggataatgaagaaccataagactgaattacttgggatgcctgtgcccacaagaaatctcggagccacccattaatcgtaatgggaactctgtgcaaagtttgcccctgtgatatgagttaccacccccttggtcacttatagtaccctaaacatccaactgcattttccaactaaaatggaaaatgactaccgaaatgaaattgtacatccagaatagtacataagaaaacatgatcccaggcggatacttgatatgttccccctcgcccaagccaatcgcaagggaagcgaaaaccaagatttgctttatcgggtatcaaacgggccggaactgtgagcaaatataatacctttaaaaagtattactacaaccacatagattgtaaatgcgtgaatgtgatggactaaaaaatctgcggttcctaatggaataggtaacaaagcaactttgccgcctactgctactaactcgccacctccccacgttaagctggtacttgttgttgcaccaggagctgttacgctaggcgcgccagcatggagattttgtacccattgagcaaagatcggttgtaattgtatggcggtatccgaaaacatatcttggggacgacctaaagcactcatggtatcattatgaatgtataaaccaaaactgtgaaaacctttatggccctgtcctgtaaatgggcctttatgagcctccaaaatatctttcaggccatgaccaataccccagttggtcctatacatatgacctgtatgactatcgaaatcgtgagcatcagcatgtaggttccagatccaagtggtagtatcagggcccttagctattgttcttgagaaatggccgggtctggcccattcctcaaaagatgtttttacaggatccctatccacaacaatttttacttctggttccggcgaacgaatcatcattaagtcctcctctttccggacaagacatacaaagagacccgccaactttttagtgaacctcaccttccctaagcgtgggtttcccttactaatttggttttctctccgcgaacccccactctttctcgtaaaaccggggtgtaggtagggcttatgcaaacagaattctagggttccttttttatcgaataagaagaattcttccattctctttttctttggtttggggaaaacccaaactaaaacttttcgagggagcggaattcctagtaaaaaaatcattgaaaatgaattaatgttaccccagccacaagtcatccccgtccgaaaaggtttacttaagtatttcatggtgtatgtagaactcaacatctcagtaatttgcttctcaatttcatctttaagggctggattatgccggtaaggcctgagattgatgggtttagcaccaggtataaggttgattgtatgatcacaggctcttctaggtggtagtccttcaggttcttggaaaatgtcatgaaagtcctgaataatttccttgacagcttcaggtacactggaattctcttcatgagtaacagactgcagctgcactaagtagcttaatgatcctagtctgttcaacccacacaactgatgattggtgatagaggagcattgtactgatttaggtaatattccttggagtctgacaagttttccttggtatagaaattccatccatttgttagcccagtctacctgcattggactgaaaagttcaagccaatccattcccaaaatgatatcataattcccaagtggtaacaccctgaaactgttacagaactgatttccttgcatccaccaattacagctggaaatctcatgagtacatttcatagttcctccatcagcaatcctaacagttaatggagtttgtaacttatgcacccctggtaacctcaaactgacttcactgtcaataaaagaatgtgtgctgcccgagtcaactagcataagcaattccatatcctgaatccatcccctgagtttaatagttctggaagattcagttccccaaactgcctgttgtgagatagatagcaaggtgccatgctgagaatcttcagtgtcttcagattttgggtcagattcagattcataccccaatgttaaggtttccagtaattcttctaccacatgtagctgtatggtactggcacatttatgttcctttccccatttttcaccacaagtgaaacagagacccttggcccttctatatgatttgagtgcagcaagtttctcatccctagctctggctgcttcagtacctcttctatcttcagctgttacattggttgttttggtgctagtaggtacactatagttggacatcattctattacttttgataccaaagatgggttcagacctttttggactggcagacttaaccccttccattgcttcctcttgtaacagagctatagcacaggcagtatccagatcttgtggtctttgtactaataccactactcttacttcatccttgagcccttcaatgaacttagtgacaaaatagacaggaatcagagaaggatcataagcaatcatttggtgcatcaacccatcgaatttttccacatattcagatacagtaccagtttgcactatgtgtatccactgcctaatgagggcctgatgtttgtctttagcaaatctggtacaaacagcatcacataatccattccaggaaattccccccatctgagatcttactgattgtaaccaaaatgcagcattgcccacaaagttcagagtagcaattttaacccaattaacaggatgagtaccatagacatcaaaatactgttcacaattggccttccacatctgaggattatcaccattgaactgaggacaagtcatagggggtacactgccactaacatccagggttccactgccaccagaatttctagcagaggactcgcaaaagtaattaggggaggaagtagggttgggatctcgcataccaggggtaagaggactgaagcctcttgcagcagcagtaaggaaaaaccaatatagaaaaagatcaaagagtcgggcggaaaaaggggagagctccccgttcctggttctcctgtagctggattccccggaaccacaagaatccttagaatgggattccaactcagcaccttttgttttgagattttgagaagagttgctcggctcgaactcgaatttgatcgctttccatatttcacaagctgcggctagttcaggactccatttgcaagctgatcggataatttcattaccttcacgagcaagatcgcgcccttcgttacgagcttgtacacaggcttctaaagccacccgattagctgctgcaccaggtgcattaccccaaggatgtcctaaagttcctccaccaaattgcaatacagaatcatctccaaagatttcggtcagagctggcatatgccaaacatgaataccccctgaagccaccggtataacacctggcatggatacccagtcctgagtgaaaaagataccgcgagcacgatctttttcaataaaatcatcgcgcaataaatcaacaaaacctaaagtcatttcgcgttccccttctaacttacctactactgtaccagcgtggatatgatctcccccagacatacgcaatgctttagctaatacacggaaatgcataccatgatttttctgtctatcaataactgcatgcattgctcggtgaatgtgaagaagtaggccgttgtcgcggcaataatgagccaaactagtatttgcggtgaatcccccggttaagtagtcatgcattacaataggaacccctaattccctcgcaaatacagctcttttaatcatttcttcgcatgtacctgcagtcgcattcaagtaatgccccttaatttcaccggtttcggcctgtgctttataaatagcttcggcacaaaacacaaaacggtccctccaacgcataaatggttgtgagtttacgttttcatcatctttggtaaaatcaagtccaccacgtagacactcataacatgctctccaagcagaaatatcacaagtaccgccgcgaccagggccgtcgcaaggaaaactatatccaaaatcttttttatccgtggcgaaccatgctgcttgcgtagtgggagatgcccgcccgtcgggcccggcctgcttcctgcccgaaagaaggctagcaggactagtgcgaagaactgcttcaaatacagtatcgggaagcactgcttggggaacttcaatatccacaggcttattcgctaaatggcaattggcacatacaattcgtggtctgcagctcctgcctttctttacccttccgctttttttgtgcagaagcaattgtcgtacgacctgtaagcgtaacttttgacttccttgccgtttgtgaattgagtcaatcgagttacgtttgcaaaatgaatggaattctggagtggaccgaatatccat

SEQ ID NO: 34876 - DNA, 1041 bp, Oryza sativa
  Clone ID: PAT_MRT4530_3884C.1
cttcctccatattgctagctagctaccaccataagctgtagctatagctatagctagctaacctctctcgagatctcggagatatcatctctggccatgaagccgtcgccgtcgacggtggcggcgttctacgggacgctggcgagggggctggacgagctggagcggtcgctggcggcgtcgtcggcggcggcggagttcgtgtcggcggcgtcgctgcgggcggcgctggcgctgatccgcgcggcgcacgcggggctcgcccggctcgtcggctcgctccacctccccggcggcgccgcctggctcgacgagtacatggacgagacctcccgcctctgcgacgcctgccgcgccctccgcctcggcgccgcctccctcgagggctactccgactccgcctcccgcctcgcctccgccctccgctcctcccacctctccttagaggtaacgagggcgatgtcggcgtgcaggagggacgccatggcgatcagggaggagaacagggtgctcgtggagacgcgcgccgaggcgctggcgctccgcctcgccgagaccatcccgcccgacgccaagttcaccgggatgctcacctccttcctcctcacgctcctctcctggggcgtgctccactactggcccgacgccggcggcgccggcggagccaccgactgcggcgcctacttcggcgccgcgttcgcgtcggcgctcgcccgcgcgcagcagcgcgccgcggcggcggcggcggcggtgtcgccctccgtcgtcgacgcagggggaggcgcgatgatgcacgagttccggcgcgccagggcggcggtggagcaggccagggacgccgtggacagggccggcgacgtcgcggcggcggcggcggaggtcgccctgcgcgccgacgcgctgaggtccgggtgcgaggacgtcatcgccctgatcgacgacctattcgacgaggtcgccgaggggaggaagaagctcctcgacctctgcagcggcggcggcggcaactaaccatcagctagctagcagcgcggcggaaga

SEQ ID NO: 34877 - DNA, 1311 bp, Oryza sativa
  Clone ID: PAT_MRT4530_38850C.1
atgtcaccacaaacagaaactaaagcaagtgttggatttaaagctggtgttaaggattataaattgacttactacaccccggagtacgaaaccaaggacactgatatcttggcagcattccgagtaactcctcagccgggggttccgcccgaagaagcaggggctgcagtagctgccgaatcttctactggccgatgctatcacatcgagcccgttgttggggaggataatcaatatatcgcttatgtagcttatccattagacctatttgaagagggttctgttactaacatgtttacttccattgtgggtaacgtatttggtttcaaagccctacgcgctctacgtctggaggatctgcgaattccccctacttattcaaaaactttccaaggtccgcctcatggtatccaagttgaaagggataagttgaacaaatacggtcgtcctttattgggatgtactattaaaccaaaattgggattatctgcaaaaaattatggtagagcatgttatgagtgtctacgcggtggacttgattttaccaaagatgatgaaaacgtaaactcacaaccatttatgcgttggagggaccgttttgtcttttgtgccgaagctatttataaatcacaggccgaaaccggtgaaattaaggggcattacttgaatgcgactgcaggtacatgcgaagaaatgattaaaagagctgtatttgcgagggaattaggggttcctattgtaatgcatgactacttaaccgggggattcaccgcaaatactagtttggctcattattgccgcgacaacggcctacttcttcacattcaccgagcaatgcatgcagttattgatagacagaaaaatcatggtatgcatttccgtgtattagctaaagcattgcgtatgtctgggggagatcatatccacgctggtacagtagtaggtaagttagaaggggaacgcgatatgactttaggttttgttgatttattgcgcgatgattttattgaaaaagatcgtgctcgcggtatctttttcactcaggactgggtatccatgccaggtgttataccggtggcttcagggggtattcatgtttggcatatgccagctctgaccgaaatctttggagatgattctgtattgcaatttggtggaggaactttaggacatccttggggtaatgcacctggtgcagcagctaatcgggtggctttagaagcctgtgtacaagctcgtaacaagggcgcgatcttgctcgtgaaggtaatgaaattatccgatcagcttgcaaatggagtcctgaactag

SEQ ID NO: 34878 - DNA, 426 bp, Oryza sativa
  Clone ID: PAT_MRT4530_38851C.1
atggcgtcagcgatgacgtcaccccggcggcggcggctcggcggctcgggctcgcatgctcgccggcgaacggcggcacttcggcacaaacggagggcaccaagacgaagaggacgacgcggcgaactcaccggtgaccaaaggaacggcggaagggcaacggacggcgagggcgacgagaaggaagcggcgaagctcttcgggtcgacggcggcaacggcgctccggcggtcttcagcggtgacgaaggggcggacgaggacgacgacgaccttgcgaacccgatggtggcgacggcgaccgacgacggcgactgcaacggcggcgcgacacggctggagcgacggcgacgacggcggcgcgaagcagcacggcgctagggcgctacagacgccggcgagcgaaggcgagggaggcgacgggtag

SEQ ID NO: 34879 - DNA, 2070 bp, Oryza sativa
  Clone ID: PAT_MRT4530_38852C.1
atgttatgtatctgtgttcttattcttttttctttcttaaggaattcccctatctcctgcctaagtagctttcctatttgccgattttttccattcctctgtgtaaatagcctaatatgggttcacaatcaataacatcttcaccatcgagagtaacgatcagtcgaagaacaccatgcattgatgggtgctgagggcccatattgactatcatgagatcttttcttgtaagcagtagactcatatcctttcttccttaattcattattccatgaaaatggattattccatgaattcctcaaaacgaggctcatcaaaatgcaaaatctaagactactataagactactaataaaataagaaaaaaaattcgaacgatgaaattaccactccctaatatccaactgactgattaatttcttataacgtactctatttttctttgccaaataagccagcaaacgttgacgttttcccaaaagtcttcggagacctctttccgatgaaaaatcttttttgtgtaattccaaatgtgaagcaagtctccgtatcttattggtgaaactaaatacttgaaattcaacagaaccccagttttcttctttttcttctttaaccataaatccaaaaaattttctacctcctttctttttcatgtatttttccaagttcaatagctttacgtccgctatcccgatcatggttttcctaccctcagggggaaagtaaaggcccttcccctttggaaggctgtgggcgaggagggattcgaacccccgacaccgtggttcgtagtactttttctgtaaatacggctcgaactcgaatttgatcactttccatatttcacaagctgcggctagttcaggactccatttgcaagctgatcggataatttcattaccttcacgagcaagatcgcgcccttcattacgagcttgtacacaggcttctaaagccacccgattagctgctgcaccaggtgcattaccccaaggatgtcctaaagttcctccaccaaattgcaatacagaatcatctccaaagatttcggtcagagctggcatatgccaaacatgaataccccctgaagccaccggtataacacctggcatggatacccagtccatgatttttctgtctatcaataactgcatgcattgctcggtgaatgtgaagaagtaggccgttgtcgcggcaataatgagccaaactagtatttgcggtgaatcccctgcagtcgcattcaagtaatgccccttaatttcaccggtttcggcctgtgatttataaatagcttcggcacaaaagacaaaacggtccctccaacgcataaatggttgtgagtttacgttttcatcatctttggtaaaatcaagtccaccgcgtagacactcataacatgctctaccataattttttgcagataatcccaattttggtttaatagtacatcccaataaaggacgatcgtatttgttcaacttatccctttcaacttggataccatgaggcggaccttggaaagtttttgaataagtagggggaattcgcagatcctccagacgtagagcacgtagggctttgaaaccaaatatgttacccacaatggaagtaaacatgttagtaacaaaaccctcttcaaataggtctaatggataagctacataagcgatatattgattatcctccccaacaacgggctcgatgtgatagcatcggcctttgtaacgatcaagactggtaagtccatcagtccaaacagttgtccatgtaccagtagaagattcggcagctactgcagcccctgcttcttcgggcggaacccccggctgaggagttactcggaatgctgccaagatatcagtgtccttggtttcgtactccggggtgtagtaagtcaatttataatccttaacaccagctttaaatccaacatttgctttagtttctgtttgtggtgacatacgtccctccctacaactcatgaattaagaattctcacaacgcccacgcgtccgcccacgcgtccgcccacgcgtccgcggacgcgtggggttctagatcgcga

SEQ ID NO: 34880 - DNA, 571 bp, Oryza sativa
  Clone ID: PAT_MRT4530_38853C.1
gcacgaggcgcgagctacatagatagagagcatggccgacacctccactgttccggtggccgctccatccggtgatcctccagttgcgtcaccggtggctgttccatgcagtgatcttccagctgctccggtcgtcgatcctccggatgttccgtctcccaaatctccggcagccgatccagttgtgctgattgatccgagtaaggaggagcgtatgaactctgaccacctacttcctaaatgtacaaacaatggaaactgtggatgaggtaccggtatgtactgtgaaaaccgtcctccctccgtggctccgttaccaaaagattgtggagtctccaagctgctagcatggtccgtgctagcacaagataccctcttactgccttatgtgtgtaccgttgaattaattgtaacgttgtttcagaattcagataatttcatacactgtgatcagcaaataaaccccgccggcattatgggccagttactggcttactgttaggaagtgcagaggctatattaattactccctccgtttcattttatttgacactgttgatcttttaacaca

SEQ ID NO: 34881 - DNA, 2250 bp, Oryza sativa
  Clone ID: PAT_MRT4530_38854C.1
tcctactgcaataattctcgctaagaagaatgcccatgttgtggcaattccacccagaaggtaatgggttactcctacagcacgtccttgtataatgctcaaggctctaggctgagtagcaggagcaacttttaatttgttatgagcccaaacgatagattcaatcagttcttgccaataaccacggccgctgaataaaaacattaaactgaaggcccagacaaaatgagcacctaagaaaaaaagaccatatgcggataatgaagaaccataagactgaattacttgggatgcctgtgcccacaagaaatctcggagccacccattaatcgtaatggaactctgtgcaaagtttccccctgtgatatgagttaccaccccttgatcacttatagtaccccaaacatccgactgcattttccaactgaaatggaaaatgactaccgaaatggaattgtacatccagaatagacctaagaaaacatgatcccaggcggatacttgacatgttccccctcgcccaggcccatcgcaagggaagcgaaaaccaagatttgctttatcgggtatcaaacgggaactgcgagcaaataaaacacctttcaaaagtattaatacagtcacatggattgtaaatgcgtgaatgtgatggactaaaaaatctgcggttcctaatggaataggtaacaaagcaactttgccgcctactgctactaactcgccacctccccacgttaagctggtacttgttgttgcaccaggagctgttacgctaggcgcgccagcatggagattttgtacccattgagcaaagatcggttgtaattgtatggcggtatccgaaaacatatcttggggacgacctaaagcactcatggtatcattatgaatgtataaaccaaaactgtgaaaacctagaaatatacatacccagttaaggtgggatatgattgcatcacggtgtctaaggacacgatctaatagatcgttgtatcgagtcgttggatcatagtctcttaccataaaaatggctgcatgtgcagcagcaccaactattagaaatccgccaatccacatgtggtgtgtgaacaaggaaagttgtgtaccatagtcagtagctaggtatggataggggggcatagagtacatatgatgagctacaacaatggttgtagagcctagcatagctaggttaagagataattgagcatgccatgacgttgttaggatttcatagagacctttatggccctgtcctgtaaatgggcctttatgagcctccaaaatatctttcaggccatgaccaataccccagttggtcctatacatatgacctgcgatcaggaaaagaatagcaatagctaaatgatggtgcgcaatatcgctcaaccatagaccgccggttattggatctagccctccgcgaaaactaagaaattctgcgtatttggaccaattcaaggtgaaaaaaggggttgctccttcggcaaaactaggataaagttgagccaaaaggtcgcgattcaagataaattcatgaggaagtggtatctccttaggatcaaccccagcgtcaagaaattggttaatcggtaaagatacatggatttggtgccccgcccaagaaagagacccaagtcctaataaccctgctaagtgatgattcaacatggattctacgtcttggaaccaggctaatttgggagcggctttgtgataatggaaccacccagcaaaaagcattaacgatgcaaaaatcaatgcaccgattgcggtacaatagagttgtaattcactagttattccggatgctcgccaaatctgaaaaaacccggaggttatttggattcctcggaaacccccgcctacatcaccattcaatatttcttgccctacgattggccaaactacctgagcactgggtccaatgtgagtaggatcacttagccatgcttcataattggaaaaacgggcaccatggaagtacatgccactcaaccaaagaaagataatggagagttgaccgaaatgagcactaaagacttttcgagagatctcctccaaatcacctgtatgactatcgaaatcgtgagcatcagcatgtaggttccagatccaagtggtagtatcagggcccttagctattgttcttgagaaatggccgggtctggcccattcctcaaaagatgtttttacaggatccctatccacaacaatttttacttctggttccggcgaacgaatcatcat

SEQ ID NO: 34882 - DNA, 1344 bp, Oryza sativa
  Clone ID: PAT_MRT4530_38855C.1
atggcggaggagggcgacaaggccacggcggcggcggaggcgggggggaggagcagccgctaccgccgccgctggtggtggtggtgggggtgggggtggtggagcggaggaggagagcgtgaagctgttcgtggggcaggtgccgaagcacatgacggaggcggagctgctcgccatgttccaggaggtggccatcgtcgacgagggtgctgcttcctcatatgcccctcgagggaagaggctgacaaggcagtgaacgcttaccacaataagcacacacttcctggggcatcaagtcctttacaagtaaaatatgctgatggagagttggagagactagaacacaagctttttattggaatgcttccaaaaaatgtaacggacaccgaattgactgatttattttccaaatatggaaatatcaaggatttacagattttaaggggttcacaacaaacaagtaaagctggctgtgcattccttaaatatgaaacaaaggagcaagcagtggcagctattgaggctctaaatgggaagcacaaaatagagggctctagtgtgccgttggttgtcaaatgggccgatacagaaaaggaaaggcaggcccgaaaagcacaaaaggctcaattgcaatcatctaatatgcctagcgcgagtcctatgcaacaatcttcattatttggggctttacagatgggatatatgcctcaatataatggatttggctatcagccaccagggacatacggacttatgcagtaccccttatctcctatgcagaatcaagccacattcccaaacatggttcaacctgttaatcaaggaaactctatacgaggagtcaaccctgaactgtcccctaattcagttcctagatcattcaacgcaatgcagttaagcagcccttatccacctgtacctggtgtgcagtatgctggatcctaccctggtggtctcatgaataatcgtcctttcgggaattcgttcagttcgattaaagttccaattgtaaatgcaaattctcctgcatcttctagtcccagtagcaatcctggtggccaaatagaaggtcctccaggagctaatctatttatctatcatatcccacaagattatggggaccaagacctttccaatgcattccagaggttcggtagagtactaagtgctaaggtttttgtagacaaagcaacgggttccagcaaatgctttggttttgtaagctacgattctcctgcttccgcacaggcagccattggtgtgatgaacggtttccaattaggcagtaaaaaactcaaacattgggagcttcgtgtatcttctttgttcaattcacattcttga

SEQ ID NO: 34883 - DNA, 1429 bp, Oryza sativa
  Clone ID: PAT_MRT4530_38856C.1
gctatctagtttatctaccggctcgaactcgaatttgatcgctttccatacttcacaagctgcggctagttcaggactccatttgcaagctgatcggataatttcattaccttcacgagcaagatcgcgccctttgttacgagcttgtacacaggcttctaaagccacccgattagctgctgcacgaggtgcataaccccaaggatgtcctaaagttcctccaccaaattgcaatacagaattatctccaaagattttggtcagagctggcatatgctaaacatgaacaccccttgaagccaccggtataacacctggcatggatacccagtcagtgaaaaagatattgcgaacacgatctttttcaataaaatcatcgcgcaataaatcaacaaaacctaaagtcattccgcgttccccttctaacttacctattactgtaccagtgtggatatgatctcccccaaacacccgcaatgctttagctaatacacggaaatgcataccatgatttttctatctatcaatagctggatgcactgcttggtgaatgtgaagaagtaggccgttgttgcagcaataatgagccaaactagtatttgcggtaaatcccctggttaagtagtcatgcattacaataggaacccctaatttcctctgcaaatacaactcttttaatcatttcttcgcatgcacctgcagtcgctttcaagtaatgccccttaatttcaccagttctagcctgtgatttataaatagcttcggcacaaaagacaaaacagtccctccaacgcataaatggttgtgagtttacgttttcatcatctttggtaaaatcaagtccaccgcgtagacactcataacatgctctaccataactttttgcagataatcgcaattttagtttaatagtacatcccaataaaggatgaccatatttgtttaacttatccctttcaacttggataccatgaggcagaccttggaaggtttttgaataagtagggggaattcgcaggtcctccagatgtagagcgcatagggctttgaaaccaaatacgttacccgcaatggaagtaaagatgttagtaacagaaccctcttcaaataggtctaatgcataagctacataagcgatatattgattttcctccacaacaacgggctcgatgtgatagcatcagcctttgtaacgatcaaaactggtacgtccatcagtccaaacagttgtccatgtacccatagaagatttggcaactactgcagccccggcttcttcggacggaacccctggctgaggagttactcagaatgctgccaagatacctgtgtccttggtttcatactctggggtgtagtaagtcaatttataatccttaacaccagcttgaaatccaacacttgctttagtttctgtttgtggtgacat

SEQ ID NO: 34884 - DNA, 1717 bp, Oryza sativa
  Clone ID: PAT_MRT4530_38857C.1
atggcggaggagggcgacaaggccacggcggcggcggaggcggggggaggagcagccgctaccgccgccgctggtggtggtggtgggggtgggggtggtggagcggaggaggagagcgtgaagctgttcgtggggcaggtgccgaagcacatgacggaggcggagctgctcgccatgttccaggaggtggccatcgtcgacgaggtcaccgtcatcaaggacaaggccaccaaggcctcgcgagggtgctgcttcctcatatgcccctcgagggaagaggctgacaaggcagtgaacgcttaccacaataagcacacacttcctggggcatcaagtcctttacaagtaaaatatgctgatggagagttggagagactagaacacaagctttttattggaatgcttccaaaaaatgtaacggacaccgaattgactgatttattttccaaatatggaaatatcaaggatttacagattttaaggggttcacaacaaacaagtaaagctggctgtgcattccttaaatatgaaacaaaggagcaagcagtggcagctattgaggctctaaatgggaagcacaaaatagagggctctagtgtgccgttggttgtcaaatgggccgatacagaaaaggaaaggcaggcccgaaaagcacaaaaggctcaattgcaatcatctaatatgcctagcgcgagtcctatgcaacaatcttcattatttggggctttacagatgggatatatgcctcaatataatggatttggctatcagccaccagggacatacggacttatgcagtaccccttatctcctatgcagaatcaagccacattcccaaacatggttcaacctgttaatcaaggaaactctatacgaggagtcaaccctgaactgtcccctaattcagttcctagatcattcaacgcaatgcagttaagcagcccttatccacctgtacctggtgtgcagtatgctggatcctaccctggtggtctcatgaataatcgtcctttcgggaattcgttcagttcgattaaagttccaattgtaaatgcaaattctcctgcatcttctagtcccagtagcaatcctggtggccaaatagaaggtcctccaggagctaatctatttatctatcatatcccacaagattatggggaccaagacctttccaatgcattccagaggttcggtagagtactaagtgctaaggtttttgtagacaaagcaacgggttccagcaaatgctttggttttgtaagctacgattctcctgcttccgcacaggcagccattggtgtgatgaacggtttccaattaggcagtaaaaaactcaaagtacaactcaagagagacaactccaagcacagtaaacccttttgacgaaaactatgatgaccacgcgatcaggttcctggtacatatttgtcagataattgatcgttgaattgtttgctctggccgcagcattgggagcttcgtgtatcttctttgttcaattcacatttttgatcctccacccccacccccaccaccaccaccagcggcggcggtagcggctgctcctccccccgcctccgccgccgccgtggccttgtcgccctcctccgccattggggcccgcccgcccgctagggtttccgccgggaagccgagctgtgtgcgtgggcgtgggcgtccccgcgtgctcggctgctgcgtctgcgtctgcctccgc

SEQ ID NO: 34885 - DNA, 556 bp, Oryza sativa
  unsure (1)..(556): unsure at all n locations
  Clone ID: PAT_MRT4530_38858C.1
gaattccggcacgaggctgttactgtcatgggttctaaatttcgttgttactccccttgnagctaagcttgattgtcccttctcttgcgtttcgggagaagttatcacaggcagtgggacacttcccttttgnacttcagatgcattccaagaaaggttatcactgggccaggcctcaaaagggatgtggatgcctccaagccattggtggcattgccgaatgcctccggggttgggctggatccgcctggcacccgtttccgccactttgcttgcgcctgttaccattgggtttttccaccccccttgttttccaaagcctttattgggtccgaacaagggttttgggccgggcgtttcccggtccgaagtcccaaagggacggcccgaattcaaaatttaagttgttagcccgttgaatgttgggaagaagttgaatcctggtccccaaataacaaaccgctttccttgaaaagcctggttattaataatccaaattttaataaattttggttcattgttccctccaagaattggaagaattgggtcccccttg

SEQ ID NO: 34886 - DNA, 267 bp, Oryza sativa
  Clone ID: PAT_MRT4530_38859C.1
atgaggcccagtcaactcttgctcctgaccctcgcccttgtgctgttgtcatcaaacaagttagcaaatgcatccgcagaaagcaacatcaatccagaggctgattgttctccagcagttattatgattggtgacaagtgtatccccaatgtttgcctacataagtgccttgcattgggtgctgcaagaggcaactgcattgaagggccagcatgcaattgtgatttctgcggacctaatgcaccaccaccgtctatagtacaataa

SEQ ID NO: 34887 - DNA, 153 bp, Oryza sativa
  Clone ID: PAT_MRT4530_3885C.1
atggacccagatggctacgttgaagccacgggaaatcttgaggcgcaagatggtgtggggagtttggaaagttttgggtggtttaaccggattataattacccccttataccatggaaatgacatagttgcgtccatccacacgatcaagtaa

SEQ ID NO: 34888 - DNA, 2937 bp, Oryza sativa
  Clone ID: PAT_MRT4530_38860C.1
atggcggcgcgggcggaggcggcggcggcggcgccgcggccgctgcaggcggcggcgatcggcgtctgcgcggagacgggcttctgggacgcgctccgccgcctcaagctggacgtcctcggcaccgacgactcccccatccccatcaccggttattatactccacgccaatatgagaaaattgcaagcctctttaggatatgcccagaatcgatactgccaccttctgccaattcctttggcgataggaacaattgtccagtcccagggaccctactaaacactaataacatgagaggattccaaaacttggacagagcacttctactgaaagctgaagcaaagaagatcttgcatgatattaaatctggcaaagtagaagagaatcctgctttgctactaaggttccttgtgatatcatttgctgatctgaagaattggaaagtatattacaatgtcgcattcccctcgttgatttttgactccaagataactttgctcagcttgaaacttgcctcacaagtgcttaagcaagaagaggcaacatccttgtctaatgcatttactgagtggcgtaaatcaagtgaaacaacagttgttccattctttctgatcaatatatccccagattcatctgctactataagacagctgaaggattggaaagcttgccagggcaatggccagaagttgctattcggattttatgatcatggtaatcgaggttttcctggatgggctcttagaaattatattgcattcgtgagcctgcgttggaagattgagaaagttcattttttctgctaccgagaaaaacgaggacgtcctgacatacagcagtcccttgtcggcgaagcatcatttccggcacctcatggctgggatgaacctgattatgtgcctgaagcaattggatgggaaggagaaacggccgggaaggaatcgaaagagatgaaaccgaaagaaattgatctttcttcaattaatccagcaagtcaagatgaagaaaaacagctgatgcacttgaagcttatgggatggcgccacttccctgtgaatcttgacaagttagctgggacctggggtgttcggaaactaacagtggttgatgatggttgcgtttccatgtctgatctagtcaaacaatccctctacacggataaggattgtggtgtcccaagagtgactgcaatagtcccacatctaaaagaaagatgttctgcggtggaagttgaaggcatccaaatgggaataccaaagcttgagtataatatttctgccagcaaaatatcaagtattactgatgattgcaagcgtctccaaacattagttgattccaatgatgtggtcttcttgttgaatgaaacatgggagggaatgtggcttccaactcttttatgtgcagacaaaaacaaggatatgacaattaccttgtcatgcgacatggtgctggtccaggaacaaaaagtggagtcagatcataatggagcactggatcagcagtcggcagtaatattacctgggctgacctcagttgcatctggcaaagcagtggagctctttgctaggatgttacatcatccagatgaaattcatgctccaggagatattgctggtacagacactgagcatcagcttggtctattgccacatcagatgcaaggatcgctctcaaagtgtgtcttgtcaactgtgctgtgcaattcctcaagcaactgtattgcatgttccaatgctgttttatcagaatatagaagaagaggatttgattttgtaacgcaggccatcacctgtccaacatatttgaaagaccttacaggcatatctgatttgaaaaaaccatttgcttctaaaatttcagccagcattcctgtttctaaaacttcggccagcattcctgtaaacctagagaagctgtccagtgcccgatgtctacttttaggtgctggaacacttggatgtgatgttgctcgtattcttatggactgtggtgtgcggaaactaacagtagttgacagtggtcgagttgttgtgtcgaatttggcaagacagtcactctacacatctgatgatcgtgacagcccaaaagcatcagcaatactagggcgtttgaaagagagatgtccttcagtggatgcaaaaggaattaaaatggaaataccaatgccaggccatcctgtatcacctaatgaagcagtcagtgtgcttgaagattgcaaacgcctccaggagttggtatcttctcatgatgctgtcttcttgctgaccgacacaagggaaagtaggtggcttccaacacttctctgcgcaaatgaaaacaagattgctattactgcagcattaggatatgacagttaccttgtcatgcgacatggggctggtccaggcacgaattgtggaagtccagatgtggttgctgctgctgatacactgtctgcagaagatgttcttggtcgtcagagactaggatgttatttctgcaatgacgtcgttgctcctgttgattccgtgtccaaccgaacactggatcaacaatgtacagtaacacggcctggattgtcctccattacatctggctgtgcggcagacctcttcacaagaatgttacatcatccagatgggatccatgctccaggagagattgctggcacaagcagtgagggtccacttggtctattgccgcatcagatacgaggatcactctcgcagtacaacttactaaccctattgggctattcctcgagcaattgtaccgcatgttccaatgcagtgttgtctgaataccataggagagggatggattttgtgatgcaggtgatcaacgaaccaacctatctggaagacctcaccggccttactgacttgatgaaatcagcggcctattctcaggtcgagtggattgatgaagttgacgatgacgacgagatggatatatga

SEQ ID NO: 34889 - DNA, 147 bp, Oryza sativa
  Clone ID: PAT_MRT4530_38861C.1
cccgcacacacatcgctcggtcgaaggaggaggttctagaaacttctggaagcggcggaggtgtggggagagagagagatagactatgttgcagaaacgtggtgtggtcgtgacggctgatgataaggagcttatgggccaggctct

SEQ ID NO: 34890 - DNA, 745 bp, Oryza sativa
  Clone ID: PAT_MRT4530_38862C.1
agaaaattcagtattactgatgattgcaagcgtctccaacattagttgattccaatgatgtggtcttcttgttgaatgaaacatgggagggaatgtggcttccaactcttttatgtgcagacaaaaacaagattgccattactgtgttgttaggatatgacaattaccttgtcatgcgacatggtgctggtccaggaacaaaaagtggaggtatggatgaagggattgctcagatagagaatttgtccacacaagacgctctcggtcggcaaagattgggctgctgtttctgcagtgatactacttcccttgttaattcagatcataatggagcactggatcagcagtcggcagtaatattacctgggctgacctcagttgcatctggcaaagcagtggagctctttgctaggatgttacatcatccagatgaaattcatgctccaggagatattgctggtacagacactgagcatcagcttggtctattgccacatcagatgcaaggatcgctctcaaagtgtgtcttgtcaactgtgctgtgcaattcctcaagcaactgtattgcatgttccaatgctgttttatcagaatatagaagaagaggatttgattttgtaacgcaggccatcacctgtccaacatatttgaaagaccttacaggcatatctgatttgaaaaaaccatttgcttctaaaatttcagccagcttttcctgtttctaaaacttcggccagcattcctg

SEQ ID NO: 34891 - DNA, 173 bp, Oryza sativa
  Clone ID: PAT_MRT4530_38863C.1
ttcctattctcgttcttgcacggggaagaggacagaaagatgtttaacgctggggggggaaacccaccgcccctgcgccgagagagcaagtcctccccctgcccccgctcaagccgcgcctctaccagagcaagactcaatccgccgctgctggccttgagatacgccccgct

SEQ ID NO: 34892 - DNA, 165 bp, Oryza sativa
  Clone ID: PAT_MRT4530_38864C.1
atgattggaagaatttttgattgtttactgtcaagtattcatactaagtctggagtactacatttcagtaggtacaaataagtgtccacataagatcgccagccaacgacatgaacagcacaaccggtcgtaaaaaattgagaggctgctgcagcacaacacagg

SEQ ID NO: 34893 - DNA, 268 bp, Oryza sativa
  Clone ID: PAT_MRT4530_38865C.1
ggggaaaaaattaaagggattcggcccaaaaaaaaaattggggaaaaaaaacaaaaaatggggggggccccaagggaaaaaaaccatgttttaaatggagggggaaaaaagtttaaaaaagggaaaaaagccaaatttgggaggggccggtttgttaggaagtgacggggttaaaaccttttctgaactgggcggggggccccgggaaaaccccaaatgggcccaaggccttgaggggatttttgaaaggggcaaggaaaaacccggg

SEQ ID NO: 34894 - DNA, 166 bp, Oryza sativa
  unsure (1)..(166): unsure at all n locations
  Clone ID: PAT_MRT4530_38866C.1
tcggcgaactcgtgaatggccccaccgtgcaccacgatngtccccctntgttttcacgtgtgtgtggtaccaccctgcgtactatgatgtaaccgatgtaaaaaaccacagttgatactcttttagaagtgaagttctcttcatccaaaaaaaaaaaaaaaaaaaa

SEQ ID NO: 34895 - DNA, 184 bp, Oryza sativa
  Clone ID: PAT_MRT4530_38867C.1
gctcttgtaaaatgcatgcagtcaatgtttaaattaagcttgttcgctagtactctcctatgtaataggtccctagattatctaagagccgatctcattcgggcgcctggtacgtgtgtctgtggattcagttttatggtcatgatgaataaaatcagtgttcaattcagatagggaaaaaaaa

SEQ ID NO: 34896 - DNA, 1428 bp, Oryza sativa
  Clone ID: PAT_MRT4530_38868C.1
atggaggtggagggggcgccggacctggccgacttcatgaacgactggttcttcggcaccgtcggcacacggcgcagcggcggcggtgcgtacgacttgaccggcgatcagagcagcggcaagaggccttcggcgccggcggagaagaagcagcagcagcagcaggggaggagcggcggcggcggcggtggtagcgcgagcaagcagacgcaggagtggttggaggaggcgaggaggatggtcggggccgggtcgccggggaggaagggcgtcggctcgccgtccaggcaggtgcccaggttcgccgccgccgccgccgccgggacggagccctcgccgtcgctcgaccgccgcgacccgatgtcacgctccgcccgaaggcaccggcagccgggaggcatcggcgacgagattctgcagcgcgcgtccatctcctcctcgcctccgcgcgccgacccgttcgcctccgcgccggcttcccccgcccactccctgcccccaaacccgccgtcttcccgccgcaagtcccgcttccactacccctccgcccctgacgccttctcctcctcctccgcctaccgccgcgccgcatcctccgcctccacctcgcccacctccgccgcaaagcctcaccaccgccgccacgcctccgcctcctcctcctcctcccccgccgccgtcgacgtgttcgacgatggcgtcgcgcgcctcaactccttcctccgccgccagcgcgccgccgtcgctgagctcggctccggcggccgcccatcctcgaggtccacgaagatcgtcctctccgacgcctccaaaagtgtcagctcaatcgcggcggcgatatgctacgcgtggatgctggcgagcaaggaggacgccgaggcggcggtgccggtggtgaacatgcgccgcggcaggatggagaggtgcaggcaagcggcctggctgctccaccacgtcggcgtcgacgcctctgctctgctcttcgctgacgaggttgacatggaggggctaatgatggataagcgagtcagcttggtagtggtggggcaggatgttctgaaaccaaacgataagatgggctcagtttgcacaatcctcaccaataattattgtgaagatgcttatagtctacttcagagcctggacataaagaaacttctgcttgcagtgcttcttgatcacaatgatcattcttttgtcgagtacttgaagaacaactacagagagccgtccacaaaaggtgaagggaacagtcccctggaccagaaacattcagtttcagcatcagggtcatcccaagatgctaagaagcccaattcaaataatcagagaccggtgcacgggaatggtggaaagacctcagatgaaactccccgtgggaagaacaaatatttcttagcaaaatggtttggttttggatcaaaatag

SEQ ID NO: 34897 - DNA, 492 bp, Oryza sativa
  Clone ID: PAT_MRT4530_38869C.1
ctactttcctaacgccggttcttcgtccttgcgcctgtgctgcttctgctttccccgattctgatcgcttgcgcgcacgagagatcggaacgagcagggcctccggaaccacaccttcgcctgagatctacaccgggtaggcgggtgatcaggttttggggagtgtttccgcacgactgctcctcttcctcggttcgtcgtcccttcatctgcatcaccatgactggagctgtcgcacccgcacctggaggtggcgcacccagagtcttcataatcagggttgctgacgacgacctctgtttctccttctttcttcctgatcagggcggctagggcttttgcagctccggtgaggtgaccttctagctttgcacctcttatagccgctagaacctgcgccttccatatggcgtggttggattttcctaatttctctgagctgaattggccgaccaggggattcccggcatggttcttcgaggagctcgccat

SEQ ID NO: 34898 - DNA, 517 bp, Oryza sativa
  Clone ID: PAT_MRT4530_3886C.1
ccggccgggctcacccaacccaacacatccaattcagttcatggaaaccaaaattgcatccactgtgttagtcttgctcctcctcacccttgatggtgtggcggctgccaagatgtgtcatgatccaagccaaaccttcagaggctcgtgcggccaccccaccaactgcatcgcctgctgcaccaacgagggctacacaggaggctactgcacaactgttagacacaaatgcatgtgcaccaaagcgtgtggaggggagagtccgcctgatgatccgccgtcggcgatgccggcatcgccagtgacgacgacaagagcctgatcgctgaaaatatatatgttgcaatggagaattagtgagatgtacttgctgaaattaatggattgcaaacaataaagaaagatgattcacagtagaaaaaaaaaaaaaaaaaagcggccaattcccaaggtcctgatgtgaataaaatcgatgtctatggattgaaccaaaaaaaataaaaataaatttgcggcc

SEQ ID NO: 34899 - DNA, 441 bp, Oryza sativa
  Clone ID: PAT_MRT4530_38871C.1
atgggccaccaccgctgcccgctcccggtcggcgtcgtcgtcgctggtgccagttccacgaggggacgagccatcgccgcccgctcccggtcgccggcacccgtcgtcattgtcgaattcacacagggtggcgttgctctaggctacctcgtcggtgccgctcgccgctttcggctgctctgctcccggtcgcccgctgtcatcactggatccacacgcgctgccagccgctccatgttgcccgccgtcgcggggccaacaccagatccgcggcgccatgaccgcccgccgccgcccattttgatatgggattatatgatggagaccgcagattacaaagggaaagcggaactcgatgataccgccgagatcgtaatcgagaaggactcggagacatcggacccggcacgatacaatgacgacccagtcctgtccgagtag

SEQ ID NO: 34900 - DNA, 595 bp, Oryza sativa
  Clone ID: PAT_MRT4530_38872C.1
ccacttcgaaggtgtgtaagaaaaattaaaattgttatgtaaagccttaaagctgtagaagcaaattgtaattacctacatgaaaaccaatttaggcttaatatgagaaagaatttatcaacagtaagtaagaactcaggagggattgatattgattaccttatcagatcttaccctaattattttattcaatcataagctaggtggtctgtcactttaagtgcagttctacttacagtagagagattttccaaggctactgtatatagaggatatatgaaagttggtctaattacttgtctactcattccaccatcatgctggagaaggtgtggagaaaagggactcctacactgttggtaggaaaataaattggtacaaccactatggcaaacagtgtagaggttcctcaaagaacttaagatagagctaccatatgatccagcaatcccactcctgggtatatatatccagacaaaactataattcaaaaagatacatgcacccctatgttcactgcagcatttttcataatagcccagacatggaaacaacctgaatgtccactgacagatgaccagattaagaagatgta

SEQ ID NO: 34901 - DNA, 299 bp, Oryza sativa
  Clone ID: PAT_MRT4530_38873C.1
aagaagcaaggcaagccctagccgccactcccgatttgcttcccagcccttgcggctcccgcgattcgatttggcgggaaattgctcgcgctctcgctcgcgccatcggttcttgaatcggagggattgggagcgggggggaaggtttcttgctttgcagccgaatcttgactggtccagtttcgtgacttacctagtgcccattcttcccgtttgagatttagaagcaagctttggatgaaaagcatcatctttagcttctttgatttgttgggtgaagggggctctcaattctttcg

SEQ ID NO: 34902 - DNA, 358 bp, Oryza sativa
  Clone ID: PAT_MRT4530_38874C.1
cccacgcgtccggccaccggtagttaacggtacttctaccatctgttccaaccgcatcagcagcatacgttgaaaccagatgagacggacatcctatgtcaagatgaagctctccaagatatcacctgccaagagcatttttggcaagggagatcacgcgggagaaagtggaagagttatattcccgagtaaccaccagccgattctgttcggtcatggagcacgtccacggcgtaaacaggatggattggtgttagtggctcagatgagcgaacgcggagccggaacgccccccgacgggttcctaaaacaagccgaagccgcccataatcgatacgctacacagccagaaggctct

SEQ ID NO: 34903 - DNA, 786 bp, Oryza sativa
  unsure (1)..(786): unsure at all n locations
  Clone ID: PAT_MRT4530_38875C.1
ttttccctactcttctcccttgcatctcgagctggtggctggctactccgctcctctccccgctcctccccttcgtgatctcctcactgccggagttttctctcttctccgcctcgctgcaagggagagctgaaattatctcgcggggaagaccagggcaggtatgatccgtgaactgggcctgaatcttgtgttgttgttggctgatgctagcactgcttcttgcggatttttcaggggaaaggttcaggaggggattagggcaggaggagtggagaaagcgccggcgacatgtcaggagcggacgtcgacaaggtccagaatcttatccattgctgccttcagctatacatggacaagaaagaagttgttgatgccctttcccgtgaggcaaaaatagaacctagtgttacacagcatgtttggcagaaactcgaggagaataatcgtgagtttttcaaagcatactatttgaggttgatgcttaagaaccaaataacagccttcaacaaacttcttgaggaccagttaaggattataaataaagaatatcatccagggccttcttctatgcctcttcccaatggttccaactcaaacctattgaagcaaaatccatgctttttatcagagtctactccgatgcctgncatgccagatgatggtaatgtgcaatggaaattccagtggcatagttagatcgcacaccatccagcgatcaattaatttatgcctggtaaagacattcagggcctntcatagtagcatgggatgcttccaatttgc

SEQ ID NO: 34904 - DNA, 5559 bp, Oryza sativa
  Clone ID: PAT_MRT4530_38876C.1
atgccgccggcgccatggccgacgccgcgcaccgtccggcaagccgccgagctccacgcccacctcaccacctccggccgcctcctccacccgccatccgcccaccacctcctcaactccctcgtcaactgcctgcccccatccgatcccctccacctccgctacgccctccacctgttcgaccgaatgcccgcctccaccttcctcttcgacaccgccctccgcgcctgcttccgtgccgggacctcgtccggagacccggacatccccttcgtcctcttccgccggatgcgccgcgcggccgtccgaccagacgggttcacgttccacttccttttcaagtgctcctcctcctcccgcccccgcgccctcctgtgcacgatgctgcacgccgcctgcctgcggaccatgctaccgtctgccgcgccgttcgtcgcgaattctctcatccatatgtacactgagcttgggcttgctggcgatgttcgacgggcttttgacgagatccctgtgaaggacgcggtttcctggacaatggtgatcagtgggctggccaaaatgggcatgctttctgatgcgcggctccttctggctcaggctccagtgagggatgtgatctcgtggacaagtttgattgctgcctattctcgtgctgatcgggccaaagaggctgttgattgcttcaagaacatgctttctgaaggcattgcaccggatgatgttactgttattggcgtgctctcagcatgctcacagctcaaggatttggagctgggctgttcactgcacttgcttgttaaggagaaggggatgtcgatgagtgaaaatcttgtcgttgcgctcattgacatgtatgcgaagtgtggtgactttggtcatgcacgagaggtttttgatgctgtgggtagaggccgaagacctcagtcatggaatgctataattgatggatactgcaagcatggccatgttgatgttgcacggtctctgtttgatcaaatggaggtccgtgatatcatcacattcaactcaatgatcactgggtacatccacagcggccagcttagagaggcgttgctattgttcatgaatatgaggagacatgatctgcgtgttgacaactttacggtggtgagccttctatctgcttgtgcaagcttaggtgcattaccacagggcagggcattacatgcttgcattgagctgaggctggtggaaacagacatatacattggtactgcactgctggacatgtacatgaaatgtgggagggtcaatgaggcaaccattgttttccaacgtatgggcaagagagatgttcacgcttggactgctatgatcgcaggtctcgcattcaatgggatgggtaaggctggtctggaatatttctaccagatgaggtgtgacggcttccagcctaatccagttagctacattgctgttttgactgcatgcagccactcatgtctattgaacgaaggccgcctgtactttgatgagatgagaatcttgtacaacatacatcctcagattgagcactatggctgcatgattgatttgctgggacgcagtgggcttttggatgaagcaatggatcttgttaagaccatgcccatgcaaccgaattctgtcatatgggcatccatcttgagtgcttgcagagtccataaacgcatagacttagctcaatgtgccgctgagcatcttctgaagatagaacctgacgaggatgctgtctatgtccagttatataacatatgcatagactctagaaaatgggaagatgcgtcaaagataaggatgttgatggaagaaaggcaagttaagaaaactgcaggttatagttctgttactgtggctgggcaggtgcacaagtttgtagttagtgacaaatcacatccacggatattggagatcatcgcaatgctagaggagatctcacacaggttaaagtcagcaggctattcgccgattacatcacaggtaacagtggatgtcgatgaggaagagaaagaacagacactgctagcacacagtgagaagctagccattgcttttggcctcgttagtctagcaccaaacttgccggttcatatcataaagaatctcaggccaactatcttcaggcctttaggggcagacgacggaaagcaaaagcagccagacagaagggtcgtcttcctcctgccgcccagccgccgtgatgctcctgtgctcgtacgcccaatcccgtcgtccccggctcccttctcactgagatcgtctgtgaccatggctgtccgagacgtcgcgtccttgaaccgtatgatcacaggcttcatcagggacggccttgctgatcgggcccgtgctgtctacaggtggatggtcgcttcaggcatcagggagacccctcataccttctctacaatcctgggagtgtgcagcacttacgaggcactgcaactccatggccgggtgctggccctaggcttgtgttgcaatccatttgttggatctgcgcttgttaatcactatatgcatgtcgaatcaccacatgctgccctctcattgttccgggaactgccgctgcagaacacagccatgtgcaatgtggtactgcgtggcttgggcaacctgaagctgactgaagaacttatctgctgctttcttgatatgagacggcagtatttggagctgaatggcttatcctattgttatgccatgaaagggtgctatcaaaatggtgaatggctagaacaaggcaggcaactccatggagttgttctcaaggctgggtggattccatccaacattttcctgtcaaattctcttgtagatctttactctgcaattggagattcagtggacacagtgaaggcactgaatgatatcctgtctgaggatgtcatctcatggaactccattttatcaatgtacgctgacagaggacatatgaaggaagcagtttattacttgaaacagatgctttggcatggcaagatgccttcagttcgctcatttgtttcgctccttgctttgtctggcaaaacgggggactggcaactcggagttcagatacatggcattgttcataagcttggattcagttgtagtagtgtgcatgttcagactacgctcattgatatgtatgggaagtgttgctgttttgatcattcattagcaatattcaatgaaattccaagtattgcactggagtgctgcaattcgctgatcacatcatcgcttggctgcaacatgtttgatgctgctttagagatattgcattgtatgattgtagagggagtgacacctgatgatgtgactttctctgcaactatgaaagccatatctttgtcagcttcaccaagtttaaccagttgtcaaatgctacattcttgtcttgttaaattgggatttgaaatggacatggctgtgtgctcctccttgatcactgcttatgcctgcgctggtcaactgagcagttcacacttgatatttgaaggattgttggatccaaatgtgatatgcttcactgctataatatctgcctgtgctcgatatggagatggagcacgagcaatggagctattcgatcagatggtttctagtggcctgaagcctgacaatgttacctttctgtgtgcaattgcaggatgtgatcaggcaggaatgtttgaagaaggacggctggtgattgaactcatgagagctagccgtgagctggatcctgatgaaagacattttgcttgtatggtcaaccttctcagtcgagatggttttgtgaaggaagcaatggaaatgatggaacagtccccattgagacactacaccaaggcatggagctcacttcttcagagctgcaaagcacatggtgaaaatgtgctgggaaagagagctgccaacatgctgatagatgtagggagaaaagatccagccaccactttgcaggtatcaaattttttcaatgatattggggacagagaaactgctttaaggattaaagagatgacaaatgtgaaggaagtgaagaagagcggtcacagcttaattgagatgttcgtggcaaggagactattttgctgcatatggtggtggaggctgactactgttttgagcacaagcactaagtctaaaaccgcggagtgcaggccagtggatgaagtgagcactggcgttggatggggttgtgtcaaatggggaaaggttcaggaggggattagggcaggaggagtggagaaagcgccggcgacatgtcaggagcggacgtcgacaagaacgcttgttgattcttgttgggttttgctactgaattcgttggttcttggcctcttcgcagaggatacagtgccactcaagtttgatttgcgtgcttatagtgacagtgccattctaggcctgcaatgcatgcaagcacacaaggtccagaatcttatccattgctgccttcagctatacatggacaagaaagaagttgttgatgccctttcccgtgaggcaaaaatagaacctagtgttacacagcatgtttggcagaaactcgaggagaataatcgtgagtttttcaaagcatactatttgaggttgatgcttaagaaccaaataacagccttcaacaaacttcttgaggaccagttaaggattataaataaagaatatcatccagggccttcttctatgcctcttcccaatggttccaactcaaacctattgaagcaaaatccatgctttttatcagagtctactccgatgcctgcaatgccagatgatgtaatgtgcaatggaaattccagtggcatagtagatcgcacacaatccagcgatcaattaatttatgctggtaaagacattcagggccttcatagtagcatggatgcttccaatttgcttccagtgcagaatgctaattctgtgctgtttggtgtggaaaatgggacgactattaagacggaatcaggctattcgagcaatggtaattttggtttctgcgggaatgctttcctggaatcatgccagtcaataggtgatgcatctggtggatcctttagcagttcagagttgaatgggcaacctctggatgattcaattttggatattgaatcatcatcgtttggcttcttgagtcagcttccccgaaattttttttcagacctaccagaggatttcagtcaaagcacagaaatattagacaattatggcaagtcaccgttcctcccttctgagcaaaataacttttcagattctacaggtggtgaacacacaggttgagcagccatcggtcatctgtacatacatgtttgggcagggaaatttattagccttttcttcgttagttccagtattctaattcgacaagtttggatgagttgtatctccagagcatgtaaggggatctgtcttcccatatgcttgctgatggtattgtaggtgtgccttacaatgatgcggttttgtaagataaccattagtagcggtggtgctgaatccgcagtctatgggttacatattcttctctggcatgtactaaaattgatatttttattaagtcaagtgaatgctgaaaaaaaagttcgaaaaaaccaa

SEQ ID NO: 34905 - DNA, 402 bp, Oryza sativa
  Clone ID: PAT_MRT4530_38877C.1
tttttgtttgattagttttatttgattttacgttgtttcatttcttagttttttatttttttttaaaagtgccgaacgtgaagaggcaatggcttaaataaccctacaaacaaatcggccttgacctttaggggatatattagaacacaacactggtataagcacttcccattagaaaagtaactggccccctcatgggacccgcccattgacaccccctgggggggatcccttggcggcgactgagggttttatcaacagggggcggtccttgagtgatcgaccgggattaatctacccgggggctttcttagaaagactgtggggacccatatggaggggccgtgtgggaacttctttgcaggggatcgcaagaaccccaggtaaacgcctgtgggtggg

SEQ ID NO: 34906 - DNA, 555 bp, Oryza sativa
  Clone ID: PAT_MRT4530_38878C.1
atggcgagcacatccaagggaacatgtgatcaaagccaaattccatcgacaacgatggatccttccgatgaagctccctcggggaaaaaaagtgacggacaaattccggcgccggcgccggttacctccgatgaaggcaaggcgccggtgatggagaagaagaagaagaagaagaaggcgaagacgaagatggtgcggtttacccaagcgcagatcaacaactgcatcacgtacaaggaagaggagatgcccgactacgacaacatgccgagtatcattgagatcctcggcgacgacctcgcgaattgtcctcaagactacatcgatgaactcaaggcgatcgacgacagccgagaagaggacaaggctttctggataaagatgcagaacgaaatccggggtgaacgggaggggatcctcaggcagtacttcaccaaaggctatgccgagtacgaggtcgacatcgacgacgacgacgacgacaaagacaataaagttcctgctcgagttgctgctcccctagccggagaaggttccgcaatggagtcgccgtga

SEQ ID NO: 34907 - DNA, 225 bp, Oryza sativa
  Clone ID: PAT_MRT4530_38879C.1
atggcaacaccgctggatactgcctccgctcagctatttactccgctaggtctatacacattcgagaagtacgaggcgcggctcggcgcagctggtgtggtcggcccgagccgggacggcggcgggctgctcggcaactgccgggcagagacgcggaggatctccggcgatctcccgccggcggccaaggcgcgtggcgaagcggaggcgagcggcgcggcatag

SEQ ID NO: 34908 - DNA, 1117 bp, Oryza sativa
  Clone ID: PAT_MRT4530_3887C.1
ggggcctatcattttaaaaaatactaaacggggggggccaaccaaatttagatttacagatccgatttcaaacgggtgaaatcacgatccaaaggctaaacctttgtagcttaaaatccgttaaaaagccttcaaataattgtcatcatgatacagaaaatagtccgaaataaaaagaaaagctaaaactcctcaaaaccgcttaaatttttgacgggttaaccaagggattagctgatttaaaaccctcgggggacaaaccttggggaggaaaccttgggttttcggggcattggattttcacaaaggttttcgttactaaagccgacattttcgctttggtttagaaaacccccgttttggcggttgtttccttttaagggggaacgctcccctaccgaggcattttgacatcccacagcttcgggagatcgtttagccccgttaatttttcagcgcaagggcgctcgatcagggagctattatcattttttaaaagggggttgtttttacgaaaccaagcctgaatttcatcccccggatcccagtatactcctcctgttaccgcccattctgttaagtcggggatgggtccctgtttccgaccaggattaggactccttggttgcttttagatgctgctggggtacatgaagacgcggaccttcttgcccatgaaggtgggcgggaggttggaccggaacttggcgcggacgacgccggagttgccgtgcgggcgggtgaccttgccccagatgcagcggatggtggagtcgttgctcttcgtcttggccttgtagacgtaggcgatgcgcttcccggcgtaccacccaacctcctccttggtgttcaccccctcgatctgcagcagcgacgtgttctcgtactggttcgacttcgacctcttgtagccgaggatggtgccgcggacgtacagcctcacgcgctggccttgccgtcccttcatcgccgctgaagaggaggagtacggggcgtatggcaggtaggccgccttggactgcgcgaagtcgagctcgatgattccgccgccgccgccgccgcagatggcgtccggcaccagccccacctccgacgacgagccctgctcgatcgaaag

SEQ ID NO: 34909 - DNA, 2279 bp, Oryza sativa
  Clone ID: PAT_MRT4530_38880C.1
cgggctgctggttttcggctcgtgggtgttatgaaaaattgatggagttcatcaacaatattgtaatgctagccacctcaagaatctcagttatctaaaaataattacataactgcgaaatggctatgagtaataacattcaatcaatagctacacaacctattctctataggatggatttgatacaacgtctgatctctattggatctgatacaacttatgatagaaccccctactcattgggtagtcacactctttgccagattccttggttgatcaacatcaaatcctcgaagaactgtcagatggtatgcgagcagctgtaacggaattatgttaatcactggctggagacagtcagcgacctctggaacttcaataaccctgcaagatccactagggcaaactgcagatgcgtctccctttgagcacatcactatcagacgccccttgcgagaaaggagctgctgaatcactgactgttgcttgctgaagcacgcatcacgtgtagcaatgacgatgatcggaaggttttcatccactagtgcaagtggtccatgcttcatttcaccagcaagcatgccttcgctgtgcatcagagcaacctccttaactttaagagcaccctctaaggcagtggcatagttataacctctgccaaacacaaggagagactctgaatcgatcaaggaagaggaaagttccttcatctcggtatcaagttttaaaacctcgctgacattgcttggaagattggaaagaccactgatgatagcttgacgtctaacttgggtggatatttgatcagatccaacagccaaggccaccatcaccatgactactatttgacttgtatatgccttggtactagcaacacctatctcacaaccagcattgatatgaactccacaatgtgttcttcttgatagtgtgcttcctacggtatttgttatgccaacacaaagtgctccattttctagtgcataatcaagagcaaggagggtatctgctgtctcccctgactggctaacgaaaaatgcagtgtcttccctgtagatgggaccttgtctgtccagcaagtcacttgcaacctccatagtcacaggaataccagttaattcctccacaaaaggtcttgcagccaaggcagcattgtaacttgtaccacagccaatgaaaactaaccttctactgcgcctaatagttttgaggtactccttttcctttaatcctcctaaaagaacaccactatccttcactctacccctcatggttgttgttaatgaatgtggctgttcatggatttccttttgcatgaagtggtcataacttcctttctttatctgctcaacttccatctcaaggacagacaatgctcgttgcacagaagctggcttctctttctcatggtcaaacttaaggatagacacactgccatccttaatatgaacaatttcatcatcttcgatagccaaataattcttggtatgctccacaatagcaaataaatcactagagaagaataattctttgggcttcccgtttgttgtcagagctttgacatcatgaaatggtttcccactattttggccacttaattcattgacaccgagtatcagtgtgctgccccgtttgcatgcaatcaattcattggggtagtgtgggcttttaaagataagtgcgtaggctccttcaagctgcctcatgacttccataacaacttggctaaatgtcacatcaccttcttcatcatgcgccttatcaaaaacaaactttgccaacttagggatgacttctgtgtcagtatcagactcaaaggtgaacccgtgccggattagtgtctctttcagaacctcgtagtttgtgatgatgccattgtggacgaccaagaactcatcgccggcaccagaagattgggggtggctgttccttggggcaggcacaccatgcgtggcccacctggtgtgggcaattccagcatgcacattgaaggcggcgtccaggttcacatccttctcatcaacctcggagtagacggatcgtacgaggttctcgatcttgccctcctggcggaacaccagcggggacgccccggcataggccggcaccgccgtagaagaagaagaagaagcgcaggagggaacgtcggcgtcgacggcgatgccggaggagtcgtagccgcggtactcgaggcggcggaggccattgaagaggacctcgaggatgtagcggcgctcccgcgacacattgtagttgaggtacgcgaagatcccgcacat

SEQ ID NO: 34910 - DNA, 1983 bp, Oryza sativa
  Clone ID: PAT_MRT4530_38881C.1
cgccctgcacccgttgccaccaccaccgccttctccgccgcgccgcctcctctcgcgtctcccgctcgtgcagggcgcgcgtcgtcgggcgagctgctgccgtctccgtggccgtggctgatcagaactagttggcgttcgatcggaaagtcgctgtcttttggcgactcggtgagaatttgcgccgcggttcaatgtgaaaaattttggcccgtggcgagttggatttggcgccgagtccattcaggtggttaagacttgttcgtgggagagcgaagctgcgcgcgttaagaccgggctccgttcttgcatcgtgcagagcagctgctggtttgagaattgagaggcgcggttgacatggagagttccaacctgggcggcggcggcggcggaggcggcggcggtgggccgccgccgttcttgatcaagacgtacgagatggtggaggacgcggcgaccaaccacgtcgtgtcgtggggccccggcggcgccagcttcgtcgtgtggaacccgctcgacttctcccgtgacctgttgcccaagtacttcaagcacaacaacttctccagcttcatcaggcagctcaacacctacggtttccgaaaaatcgatcctgagagatgggagttcgcaaacgaggatttcataagagggcacacgcaccttctgaagaacatccatcgacgcaagcccgtgcacagccactccctccagaaccagataaacggaccactcgccgaatcggagaggcgcgagctcgaagaagagatcaaccggctcaagtacgagaagagcatcctcgtcgcggacctccagaggcagaaccagcagcagtacgtgatcaactggcagatgcaggcgatggaaggcaggctagtggcgatggagcaacggcagaagaacatcgtggcctccctgtgcgagatgctgcagagacgcggtggcgccgtgtcgagctcgctgctggagtccgaccatttcagcaagaagaggagggtcccgaagatggatctcttcgtcgacgattgcgcggcgggcgaagaacagaaggtgttccagttccagggaattgggacggatgcaccggccatgcctcccgtgcttcctgtgaccaatggtgaggcttttgacagggttgagctgagcctggtctccctggagaaactcttccagagagcaaatgatgcttgcacagctgctgaagaaatgtactcccatggtcatggtggtactgaacccagcactgctatatgtcctgaagagatgaacactgctccaatggagacaggcatcgatcttcagttaccagctagcctccatcccagctcacccaacacagggaatgcccatctccatttatccactgaactcacagagtctccaggttttgtgcagagtccagagctgccaatggcagagattcgtgaagatatccatgtgacaagatacccaacacaagctgatgtaaattctgagattgcctcctccactgatacttcacaagatggcacgtcagaaactgaagcttcgcatggaccgaccaacgatgtgttttgggagcggttcctcacagagactccacggtcatgtttggatgagtcagaaagacaagagtctcccaaggacgatgtaaaagcagaattaggctgcaatggcttccatcaccgggagaaggttgatcagatcaccgagcaaatggggcaccttgcttcagccgagcagactctgcatacctgatgcagtaataccatttgcgcggattcatagttcgtgtgtaaattagcgaagatgtaaattatagcttagatcggattagaggcttgcgtgttactttacagatttcaaccttttattagattacaataggtctttcacaatttatgattctgttctatccgctgactactgtgcataaattttttttagtagaccatatccatttttgtactccattgcccttctaagattcctcgttaaaatctc

SEQ ID NO: 34911 - DNA, 555 bp, Oryza sativa
  Clone ID: PAT_MRT4530_38882C.1
ctgcaggattctggcacgaggcccatcccgcgtacctgccaccgccgcctacctccctcaactccgatgtggggaaccacggccgcagccgtgcgccggctctgcgcggccggcgatgtccgctcggcgctcgcgatgctcgcccgcgggaccaagtcgggcgatgcggcgctggacgtcaccgcgtgcacggcgctcgtcaacggctgctgcaagggcggcgatgtggcggaggcccggagggtgttcgatgaaacgccgctcctggggcttgcacctaacgaggtcacttacactgctctgatgcatggctacttcactcatggccaaagggagaagggtttcgccttgtttgaggagatgaggaggggtggagtcgagccaaatctctacacctacaactgcttgattggggagtggtgcaggacaggggagttcgagcgcgctcgtagcttgttcgacgaaatgcctgtgaggggcattgtgcgcaatgttgtcagctataacaccctcattgccggcctattgaattcatcttggacggacggatactga

SEQ ID NO: 34912 - DNA, 255 bp, Oryza sativa
  Clone ID: PAT_MRT4530_38883C.1
tgctaatcaaatccacccactccccatccaccggggggcttttttaaatcattcgtccgtacctcacccgcatgtataccaagctctatactccctccttcatcaactactatgattcacctccactcccctccgacagtgcccgtcgtattccctctcgccgcctcggatgacatgccaccacctacagcgacggccatcggtctacgacctccctccctcctctagaaaaaggtcgccatcattcacacgtgc

SEQ ID NO: 34913 - DNA, 2144 bp, Oryza sativa
  Clone ID: PAT_MRT4530_38884C.1
ggttccactcatcacacctctccctcctcccctctcatggccgccgcctccgaaccctagctctctctctctctctctctctctctctctctctctcgcgccccacccagatctgcgccggcgacggcaaggatggaaggcggcggggctcagcgccaccaccgcgggcggcgccgaggtgcggcggggtccgccgcgcgaacgccccggggctggtgctgctccttcgctggcgtcccgcagagccccgacctccgccccttccctccctccctcgcgccgccggccacggcggcgtcttcctccccggcgccgggtggtggtgccgggaggaataagctgccgcccaagtccccctcgatctcgtcgttccacagctcgccgacgtcgtcgaggctcgccggcctcggcggcctcatcgacccgcgccgcatcctctcccccggccgcgtctcgcccatcgacctcgatgactccgcgcccccgctcccgctcccgctcccgctcccgccgccgccggtgacgcccgcggcggagacggtggtggtcccggcggagacgtcggcggcggtggcgccgttggtggtggcgtcggcggaggcggatgcggcgggcgacgaggcgctggatctgaggcttttccttcgcgggagggacgggagtacgtgcgtggtgatggagctcgactccggggtgctctgcgacagcagcgccttcttcgccgccatggcgccgccgcgcgggcccgccggtgacggaggagggagcggcaggaggatcgaggtggacggggtggacaatgtggaggcgttccgcgccgccgtcgagctcatgtaccagcctgatccgctgcggtggctcgccgccgctggcgtgtcgcgctccattgatgtgctcgaggtgtcttcatcaatcatgtttgaaagaggagttaaattgtgtttgtcatacatagaagcagttccatggaatgagaacgaggaggagaagctcaagaatctctttgcaagatgtacttttgatgaagcaatatcccaagatgttctggctagattgcggcctcacagctggagcagctcagaagacctcacagtgcatcttatccaatcagtcacgagcagcaccaacagtggtgcaagaaaagatatgcaatctttggtaaatggccttctaagcaaaagttctgtctaccaaaaagacatggcagggctaaacagagagagcctgtataatatctgttatgcctgtttaaattcactagtggatctttatgacgaagcaacagaggctacaaaccacactgctcaagcattagttatcaagggcagtaaaccatttattgagagaatctctcagcagacagagaacctcaactggctcttggacattcttgtgaatattgacatggctgaagagtttgtggagctgtgggcaaagcaagacaggctcatcaggatacatgagcaggcatcacccatgatgaggtatgaactaagccgaatatctgctagtgttttcatcgcactcggcaaaggaaaagttcagtgccgtggagagctgaggagcctcctcttctacggatggttcagcccgatgttgcttgatttcggctggcttcagcgatgctccaaaggtctggatgtaagatctttggaggaaaatctaggacaggccctactaaccctcccactcaagcagcagcagtgtctatttgaggagtggtttcagtgttttgcatccaaaggatcagagtgcccgaaccttactagagctttccaggtatggtggagaaggtccttcgttagatcatcggtagaaggtcagtgataatgtttttactactagtatatgctgtctgtaccacttgtaaaattgcaattgttggaataactagtaggggtgatcaggtgaatgatgtctaccgtagtttagccctttcgattgtatgtgcataagcttgttaaatttattttgaggaatggatggctttggtgtgtgtatgttaagtttgagccttcttgattcattacagttaaccttgtgacatcaaagtaagaaaaaaaaaaagcgaaggcggctcgagacaagaacacccacgagcaaaaaaaaaaaaaaaaaaaaaaaaaactcgagactagttctcc

SEQ ID NO: 34914 - DNA, 176 bp, Oryza sativa
  Clone ID: PAT_MRT4530_38885C.1
gagacttacccgtagtatacgaacgtcaaaagtcaacactagtcatatcgaacgcaagaagcactaactgacgagtcccctacgaactgaactgaaagaaacatactatacggcatacggacagtcgaatgatgaagtcagatcagcatgaatgaacatgagacacatggcgaaaa

SEQ ID NO: 34915 - DNA, 384 bp, Oryza sativa
  Clone ID: PAT_MRT4530_38886C.1
atggcatgttgcttatggcaagataaatccatcgaggaaatagataagctaaggtgtgccttcttttggaaaggtgagaaatcagtaaaaggaggtcaatgcctagttgcttggaagacagtactgctacaaaaacaacaacaggtattagggattaaggacctgagggcacataacacagcattggttttgaaatcagctccaccccaacctctcctaccaagcagaatcagagctggaaacactgtggcacatcctacaagacatcacacccatcccctggagctagccaagtccgagtcagccccgactttcatacaagctgtcatggacaagaatcactcaacaagtggaatagaacctgttgaaagtataagcacataa

SEQ ID NO: 34916 - DNA, 433 bp, Oryza sativa
  Clone ID: PAT_MRT4530_38887C.1
ttagttttacatgtgatttgagtgacaacattgcagcgccatggccatcatcatcatctgttcaatccttgtcactttgtgctccagaaatgtcattgcctgcattgcctgtcgcgccaacatctggaagctcagtaggtatctccagaactggaattggaattttggcgcctcttctattctttgcgacggccatcaccttctgagaaatgcttcacctagtgaaccaggagcttcttacccctgttgtattttttcccctctgtgcaggcccacgtgtaaattgaattgcatttcattcttgtaaatgagcctttcccttctctgttcttttttgttcggtggatagcattgctgttatgtgttagagaggactgttgtaccatcagatatctgaacaatggaggtaaatttctagatgttgctgggcacc

SEQ ID NO: 34917 - DNA, 291 bp, Oryza sativa
  Clone ID: PAT_MRT4530_38888C.1
atggaaggaattttatttaggggccaggcgggaacatgacatacatgaaaccctgagggaacttgctagttagctaccaacaaattaaggacttgcattcaagctaggtaattaggacatggcatatgtgggggccctggaagctcgatgatcaggggaagaattggatggggaaaagttttttttaattgcaattgcaaaaagagcagccccagctgggcccccacttgcaggggtttcaacccaaatttcctttttccgcccccatttttgaaccttcggaaacatcac

SEQ ID NO: 34918 - DNA, 1842 bp, Oryza sativa
  Clone ID: PAT_MRT4530_38889C.1
atggacgcggtccagccaagcaatgccagcataaaccgcgtgcacctggtttatgtgctggtgcgccgcctcgccctcgtcggatccctagtagggaggggaggtctccgtctgccggcgggaggcgcgggcgccgccatgaccggatgcattgtcttgtttatgaggcccggtgttcggaccgcgtcatacattcgtggaacagtgtgctcatgccttcggacatcctggataattgacagccatagaattgcttcaaaaataaaaaatgcatctggatcggtggatgccagtaagcacaaatgggttagcaacccaactaaggcttgtccaaggtgcaaccacatcattgataacagtgatgttgttcatcaatggcctggtttgccaagaggtgtaaagtttgatccaactgaccaagaattgctttggcatttgcttgcaaagcatggcaaagttggtgcaaaagctcatccgttcattgatgaatttattccaacagtcgaggaagatgatggtatctgctatacccatccacagaaacttccaggtgtcaagcaagatggaagcgtatcacactttttccatagaacatttaaggcctataatactggaataagaaagcgccggaagataaacactggtgatcttgctgatgtccgctggcacaagactggtaagacaaggccagtagtagttgatggaaaacaccttggttgtaagaaattcatggtgctatatatgagcaccatgaaaggtggtaaacctgaaaagaccaattgggtgatgcatcagtaccacctaggaactggggaagatgaggtagaagggcagtatgttgtctctaaattattgtttcagcaacagtttaaacctggggagaagaacgcacaggacttaacctctgcagatgctttagaatctatagttgctgaagatcttccaaatattcctccacttcccctggaagaacatgtttttaccaaccaagaactagaagttcttgagaaatctgaaactatcactgaccagggaaaagagactagcgaaataaacaacgaagataacgctgtagaagatgttgcgcatatggctactgagaaacctgaggatggagataacccctcatcgcaagatccgaaatggtgggaaggtgaatcccagttcctgttagactctcagcaactggcagagaaccttgcgatttgcgatgagttccttcagagtcagagccagacctcatgcggcggtggagatgatgaaaccgataagataaagccccgtcttgctgtttatgcccagttgccagtagaggacttgaagaaggatctggaagaatgccagaggttggacccctcagatggcacaaatcttgagcttgaaaatgcgtctgaatttcgactgagccaaattgagttttcgcaggatagctttacgacggcatgggctggtggcaaggtgatcgattgagtaagaaatctaccccgcgcattggctgagcgtcactgggttggtcccacagcccggccacgtgagactgagggcagcaacaagtaccgcgccgtgggtcggtcccatagcaccgggtctacaggccccatcgtttggccaagtaagtgtggtgtgtggataaaggtgggcccaagcccatggcgacgggcccaccacccagcggaggctgagagggacaccgtgggtctcggaaaaaaccgtaacggcgtctctctccgttacaacggagaatccttcgcaaacacgataaacacccctgggaatatttttcctttggcaaatcttatctgcaaggaattgagtgcaaggaaagccttagaaatgacatag

SEQ ID NO: 34919 - DNA, 300 bp, Oryza sativa
  Clone ID: PAT_MRT4530_3888C.1
atgtaccatgtgctccaacagccaagcctttcctctacaagtggtgaagaacctctcgagaatgaactcctcgagttggtcgggttgaacaccacgaaccctgtcaaacagcttggagcagagcttcaggacaatgtggcccggagagccactttcatgaggatcaaatcaactggcacgctcacgaacctaaaagcgaaattttggacctgcacaagagttaagcagatcttccaggccatggtcagccttcctaccttcatgcctctagaagcttctacaaagctttgcttccggtag

SEQ ID NO: 34920 - DNA, 525 bp, Oryza sativa
  Clone ID: PAT_MRT4530_38890C.1
ggaattcggcacgagggagagagagagagaggtggttgggtttttggcttgtgggttttgtgcaggaggaggggattcggattcgtctctccgcggcgatcgaaaccctagcgagcgcatcccgatggtttcctgctgcgagctgctcgaatcgtgaggttttataaaaggcataagagtgaagcaagaatttgcaattgtaaactcgaagatatgactgataacgctgaagcgagagttctgctaatgttgatttggtttgtgctttatgtgataacggtggtgaaattgcaagctgcgaaggcaagtgcctcagatcttttcatgccgtcagggatgctggtgaagattgtcaaacactaggctacactaggcgtcaatttgatgcattgaatccttttttgtgcaagaattgtgagcttgaaaaatatcaatgttttgcatgcatgaggttgggttcagctaaaacagatactcctgaggtatttccctgtgcatctgcgaattgtggttatttctaccatg

SEQ ID NO: 34921 - DNA, 657 bp, Oryza sativa
  Clone ID: PAT_MRT4530_38891C.1
tcacttaggccattcaacatgtgtatgcaagtgcagaagacgctgcaggttggcagcgaatgcgcgaagggcggtcttggagagggccttgttgatgctggcaccgaggagtccgtcgtcatcctcttgctgcagatgcaggagtaagcatcgtcgcttgccagtgccgcggtggtggcgcgcaccaggcgacggagttccatcttggcgcgacaacggtgatcgtcgctgctgagcagcacggccgtgctgccgcatcggaataggcacagcctggcgctgcaaccccatcccggagaggtttgacgccgtgacgtcctcgcgcatgcggtaccacctcacacagtcgttggcaatggggtagaacccagtcctaccgaggagctcccggatggcgctgtcgtagaaagcgtccatctcatcgaccgcgtcccgctgtgcagcgagctcttcgtgaccgtcgacgaagctccgcagctcgtaggtccagcagccgaggcctacgccggagatgaggcggaggaggaagcgaacctccaccattccaagccgcttgttgtgttagacaatcgcgccggccagctccatcagttattcgtcttcaccatgaggccatccgcttgcttatattacaacgatgtacttcgaagggtctaa

SEQ ID NO: 34922 - DNA, 275 bp, Oryza sativa
  Clone ID: PAT_MRT4530_38892C.1
ccgccgccgctggcctgcctgaggccagtcaccgtcgtccgcttggtcgccggcaacggatccaaacgcccgaggctgggagaccattgccgccaccgcagtcatcgtcgctgccctgcccgaggcccgccgctatcatcccaatggtcgccggtgatggatccaccctccccacggtggccggcgacggatccgcgctccccacggtggcaggcgacggatccaccctccccgtggtggccagcggcggatccgctccgctgccaccaccctag

SEQ ID NO: 34923 - DNA, 507 bp, Oryza sativa
  Clone ID: PAT_MRT4530_38893C.1
atgtcgtcgtcgtcggcggcggcggatcgcggcgccgcgggcggggcgtcgtcgttccgggtgtactacagcctcggcgccgccggcaccgtgccgttcgtctgggagtccaagcccggcacgcccaagagcaccgtcgtgccggcgtccgccgccgacggcggctacgccatgccgccgatctcgccgccgccgtcgtactcgtaccagtggtcgtcgtgcaactccgatcagccgccgccgccgtcgaaggccaagaagtgcaggaggaggctgtcgacgtcgtcgtcgtcgtgttcttgggcgtcgtcgggaggatggatgagctggctgacgagcttcaggcggcgacagcggtggctgccgccgtcgccggggaagacgacgtatcgccggcgctggctcgggcaggacggcggcgtggccgtcgacgacgtcgtcgtcgtccggcgatcgccgccgcggcgcgccgtgccgtgcttcggagcgggcaaagttcactggtga

SEQ ID NO: 34924 - DNA, 323 bp, Oryza sativa
  unsure (1)..(323): unsure at all n locations
  Clone ID: PAT_MRT4530_38894C.1
gcgcacccgcncgcgggcaggagtaaaggagaaaacccggcccaacacccccgangangaggangagagacnagaaccagccgcagcaacgcacagacagccaggggcaaccaggagcacccgcanccacgacgcaggcgcagccacagcggccagcaccaacccgcggcggcggcaacgccgcccgccaggaacccaaagggcagcacaagggcagacacaaacgccgaaccacgccaaggcccaaccaagcaacggaagaggaaaacaaaaggcaccacaacaaggacnccaaggaacgaacaggacagagaacaaacaag

SEQ ID NO: 34925 - DNA, 1042 bp, Oryza sativa
  Clone ID: PAT_MRT4530_38895C.1
ctatgcctcacttttcctctctctctcacgggtgggtcggcggtggcgggcgggggcgaaggcggcgacgggcggcgggtgggggcggaggaggcggcgggcggtggtcgaggagccgagggcggcgactggcgggggtggagaaggccggcgcacagcgcgcacggcgaggacgggcggtgggcgcgggcggtcggcgaggatggcgcggggacgggcggtcggcgaggacggcgcagacggcgtggacgtcggcacggaggcggaggcggagacggcggaggagcgtggcggcggtgaggtgaggacggcggcgcgcgggggcggagccagtggcgggtggcggagggggcccgaggatgacggcggccggcgacggaggcggaggccgaccaggcgagcggggacgcacggtgggcggcgggctcctcctcctcgtcgtaggcgcgcgggggcagcggctcctcgcgtcgccgccgcctctcctcgtccgccgccgcgggtgggctcgcggggcgctctccaagccccttgcacgcgcgcacgcatgagggcggcaagaaggaggtcgctcgagccgcgcccgccgcatgcagccaccttcggcctcggctcctcgccgccgcccgctgccttctccgccaccgcccatcgccggcctcggctcctcgaccaccgcccgccgcctcctcctccgcccccgccacgggcagtgcgcggcgctttgcggctgcactgcacacacgtcgccgtctcgagaagcctttttaggccatcagccacagccatggccgattggccgtcgtccttctccttctcattctcctactgcttctcgtgcaatggcaacatcaagagacagcatctgtacctgcagccaccaagtttgccgagagagaggactgagagcgacttgatcgatcgtctccagattccaggccttgtttcgcagcgtccatataatataaaatatcatctacttgttctgctagctgtttatcacagatgcattggcgtttcttatagcaaaaaaaaaaaaaaa

SEQ ID NO: 34926 - DNA, 474 bp, Oryza sativa
  Clone ID: PAT_MRT4530_38896C.1
atggcggagccaaggcccggccagcctgggccattgcccaggctccgcctcatgaacatacactatgacgtggataaaattggaggtgtgaccaccacctctattataaaacttgccctaagagttagaggctacctagctatcttcctcaagctttgcaagcttgacacgcagaagcatatggctcccggcgctgcttcccctaaggcggccaccgtcgccgccgccgccgccgtcttcgccgcgctggtcgtcctgtcctcctccctcgtcgcgccggcggcggcgaagatgttctgcagcaactgcgacgacatctgcaacgcctcgtgcgtcaactccgacaccatcgccaagctgtgcgccccgcagtgcgacggctgctcgccggaggcttgccagagctgcctccaggcgctgaagcaggagtgcttgacgggctgcagcgactactgccacaaaaactgcacttaa

SEQ ID NO: 34927 - DNA, 375 bp, Oryza sativa
  Clone ID: PAT_MRT4530_38897C.1
atggcgcggggacggacggtcgacgaggacggtgtggacggcggcgcagacggcgtggacgtcggcgcggaggcggaggcggcagaggagcgtggcggcggtgaggcgcgcggtggccgccggagcgcagggtctgcggtggcgcacgggggcagcggctcctcgcgtcgccgccgcctctcctcctccgccgccgtgggtgggctcgcggcgcgctctccaagcccgttgcacgcgcgcacgcatgagggcggcaagaaggaggttgctcgagccgcgctcgccgcatgcagcctcctttggcctcggctcctcgccgcccgccggcgcttgagcgacctcggctccttgactgccgcccactatcgcctctga

SEQ ID NO: 34928 - DNA, 150 bp, Oryza sativa
  unsure (1)..(150): unsure at all n locations
  Clone ID: PAT_MRT4530_38898C.1
aggtgatgcgcaatgctgtcagagatgaggctgatccgcaacaatatcattgccaggctatttgcaccatcaggtctatcatgcagcaagtgagtttgatntggctttgttggtgagccccaagaggnncaggcaggtggttaatttaaa

SEQ ID NO: 34929 - DNA, 580 bp, Oryza sativa
  Clone ID: PAT_MRT4530_38899C.1
atgcctcacttttcctctctctctcacgggtgggtcggcggcggcgggcgaccacgggcggcgggcggggccgaagacggcagcgagcggcgggtgggcacgaggctggcgacaggcgggggcggaggaggaggcggggggcggcggtcgaggagccgaggccggcgatgggcggtggcggagaaggcagcgggcggcgggtgggcgctaggctagcgatgggcggggacggaggcggcagcgggcggcggtcgaggagccgaggtcgctcgagcgccggcgggcggcgaggagctgaggccagaggtggctgcatgcggcgggcgtggctcgagcgacctccttcttgccgccctcatgcgtgcgcgcgtgcaaggggcttggagagcgtgccgcgagcccacccgcggcggcggacgaggagaggcggcggcgacgcgaggagccgctgcccccgagcgccggcggccacctcgcgcctatgacgaggaggaggagcccgccagcccaccagagcagtccccagctcagcccggtcagagcctccagcctccagtcgccaggccagccgtagtcctag

SEQ ID NO: 34930 - DNA, 399 bp, Oryza sativa
  Clone ID: PAT_MRT4530_3889C.1
ggaatgaatttattttgttttgtttcatataggatgttgcttgctttcctgccattgtttttagtgtacattatttttttcgtgatggcttgttggacgtatttttgtccgcgaaaaagacccagcccccccatcttagtaaacagggggggaagagacacatggcttggcccccttcaaaacctgaacagggggggttttcccacacaaattttgtttttcttactcagaacacccacagggggcctcttatgctgtttcccagcaaaagcggttttaaagcagagattatctccggcccccctacctaaaaaaaaacccgcttaaacagtcccctcttcttggggaaacatcactccccgaggattgctttgtcacctaagaacctggtccctcccc

SEQ ID NO: 34931 - DNA, 392 bp, Oryza sativa
  Clone ID: PAT_MRT4530_388C.1
aaatatgaaagacatctttttttttttttatataatttttttttttttattttttttttttttttttttttatttttttttaattttttaattaatttttttgtaaaactcattacaagacaccgtcaagggtggtaatggtactgggtgcaccaaaaaacctatggaggagccatatctagatggcacaataaatgttaaaaaaattgttcttgagaaaaaatccgatcaaagtggggataccaaaatgtttgagtaggagcttctgggatatgccctgaacattgttaaagggctgattgtgagattggggcgccaccagggcaagctttttccgggggggaaaattttttactgaaaaaaataaaaaataaataaggggggttgaaaaa

SEQ ID NO: 34932 - DNA, 1149 bp, Oryza sativa
  Clone ID: PAT_MRT4530_38900C.1
atggcgaaaagggcgagactactcagcgccgcggccggtcccgtcctccccgacgagctcgtgtgggagatcttggcccgcctcccggcgagggggctcctccgctgccacgccgtgtgccgcgactggcgccgcctggccacctccgccgacttcctcctcgcccaccaccgccaccagccgccgcgcccgctcgtcttcggctgcgcgaggtggaggagcggcgccgccgccgacgccgacgccgccgtggattccgtcgacctcatccggcaccccgccgagcgccgccgcgtcctcggcttcagcgactaccgccaacaccagagcttcaagatccactcctcctgcgacgggctcctcctcttcgtctccggccgcgccttctacatctgcaacccggccacgcgccaggtgacgccagtcccagccctcaccggcggcggcagccaggtcaccctgtacccgcacccatcttccggcgacggcgagtaccgcgtcctcaaatggaagtatcccgatgccgtctgcatcctcgcggtcggctcgtcggagaagccgcggcgcattggattacctgaggcatttctcccacccgtgttctggattgatgagatcggctttctcccacccgtgttgctccatggctgcctgcactggcacctccgtaaaccggaagacgcaatactcgttttcgacacggtggctgagtccttcaggtggatggtttctccaaatgttgatggttatggtgcacatttggttgagattgatggtggtatgcttggcattggcattgtgactcaaggtatggccaaactctgggttcttcaggactatgagacggaggtctggtcgttgaggtaccacgttaaattgcccgtggcgagaatgaggagcattgcaagggaaggtttcttttcatggaaaatcgtatgtcatcgtggggaaattctggtctacattcagagctctgtgttcttgtttctgtgtgacaccaaggggaatttgcgggagaaaatccatttggataacatgcttccatgtgctatgaggcattgtttgaaagaaagccttgtcaaccatgcgttcttcgggaggcatggtggtgctcatgtgggacagccacagtttttctgtggtctgtag

SEQ ID NO: 34933 - DNA, 627 bp, Oryza sativa
  Clone ID: PAT_MRT4530_38901C.1
gcacgagggcggtgcgcgcggcggcggaggcttgccgcgccggcggcgaccctccgattcccgtggcggctcctggacggcgcgaccttcgccgcgaatcggtggaatggagacgcggattggtggcttggcaagtcgtagcggagatgggatgctggagcatgtggattggggttcctgggcggaatgcatagctgtgaatcttgtgaggtggcattaactagtgaaggtggctaaagggagaaaggcacggtgacttttcttcagaagcgcgtcctgtcacctgtgacttgatcctttcaaagaaagggatttcgattctctgaagcaagtcagagaagcacggcttggtagttttgagctaatcttgctcatccattcgaagacaacgtgctacagtagatgcaactgctacaggtgcagtaatgtttgctacaggcaactgatacatgatggtggcaagtgtcaagtgtgtgaattcttgaaaattaaggaagacctgcctgactaaggtggcatgtatctatcaccgcgtgcgatttccaaggtacgcaagtcttcagctaatggcagtgcacatcaattctactttgctgcttctagactagcgcacatcaatagcatgca

SEQ ID NO: 34934 - DNA, 795 bp, Oryza sativa
  Clone ID: PAT_MRT4530_38902C.1
atggaggaggaggcggcgggcggcggtcgaggagccgaggccggcgacgggcagtggcggagaaggcagcgggcggcggtcaaggagccgaggtcgctcaagcgccggcgggcggcgaggagccgaggccaaaggaggctgcatgcggcgagcgcggctcgagcaacctccttcttgccgccctcatgcgtgcgcgcgtgcaacgggcttggagagcgcgccgcgagcccacccacggcggcggaggaggagaggcggcggcgacgcgaggagccgctgcccccgtgcgccaccgcagaccctgcgctccggcggccaccgcgcgcctacgacgaggaggaggagcccgccgcccattgcgcgtccccgctcgcccggtcggcctccgcctccgtcgccggccgccgtcgtcctcgagccccctccgccacccgccattggctccgtccccgcgcgccgccgtcctcacctcaccgccgccacgctcctctgccgcctccgcctccgcgccgacgtccacgccgtctgcgccgccgtccacaccgtcctcgtcgaccgtccgtccccgcgccatcctcgccgaccgcccgcgcccaccgcccgtcctcgccgtgcgcgctgcgcgccggccttctccacccctgccagtcgcgggcctcggctcctcgaccaccgcccgccgcctcctccgcccccgcccgtcgccagcctcgcgcccacccgccgcccgtcgccgacctcagcttctcgcccgctgtcgccgacccacccgtgaatgagagagaggaaaagtga

SEQ ID NO: 34935 - DNA, 1344 bp, Oryza sativa
  Clone ID: PAT_MRT4530_38903C.1
atggaggcgtctcttgttctgctctgcctctgcgtctttcttgcgagcggcggagaagggaggtcgccggcgggcacggtcctcccgctgcaggtgcgggtgcaggaggtggagttggaggcgccggcggcgaacaggctccggttccggcacaatgtgagcctgacggtgccggtggccgtcggcacgccaccgcagaacgtgacgatggtgctcgacaccggcagcgagctctcgtggctgctctgcaacgggagctacgcgccgccgctgaccccggcgttcaacgcgtcgggttcttcctcgtacggcgcggtcccctgcccgtcgacggcgtgcgagtggcgcggccgcgacctccccgtcccgccgttctgtgacacgccgccgtcgaacgcctgccgcgtctccctctcctacgccgacgcctcctcggccgacggggtcctcgccaccgacaccttcctcctcactggcggcgccccgcccgtggccgtgggcgcctacttcggttgcatcacttcctactcgtcgaccaccgccaccaacagcaacggcaccggcacggacgtctcggaggcggcgaccggcctcctcggcatgaaccggggcaccctctccttcgtgacgcagacgggcacccgtcgcttcgcctactgcatcgccccaggcgagggccccggcgtcctcctcctcggcgacgacggcggcgtggctccgccgctcaactacacgccgctgatcgagatctcccagccgctgccgtacttcgaccgggtggcatactccgtgcagctggagggcatccgcgtcggctgcgcgctgctccccatcccaaagtccgtgctcacgccggaccacaccggcgccgggcagacaatggtggactccggcacgcagttcaccttcctcctcgccgacgcctacgcggcgctcaaggccgagttcacgagccaggcgcgcctgctcctggccccgctgggagagccagggttcgtgttccagggcgcgttcgacgcgtgcttccgcgggccggaggcccgggtggcggcggcgagcggcctcctcccggaggtgggcctcgtactccgcggcgcggaggtggccgtgtccggggagaagctcctgtacatggtgccaggcgagcggcgcggcgaggggggcgcggaggcggtgtggtgcctgacgttcggcaactcggacatggccggcatgtcggcgtacgtgatcgggcaccaccaccagcagaacgtgtgggtggagtacgacctccagaacggccgcgtcggcttcgcgccagcgcgctgcgaccttgccacccagcgcctcggcgccggcgcgtag

SEQ ID NO: 34936 - DNA, 269 bp, Oryza sativa
  unsure (1)..(269): unsure at all n locations
  Clone ID: PAT_MRT4530_38904C.1
atggagaggaccgcggcggaagcagcggctggggggaagggggcgtggagggacggccccgtgacgtacctccacctcctcttntacatcgccatttccggcggccagatcttcttcaacaaaggcaagcccaccaaagcaacccttctatcaggcgacaccatcccctccctttttttctaccccccgcgcttctccggcggattctgcctgcgcgtgcgcgtgatccgccgccggcgtgcccggctgtacggcgcggcgggcggggg

SEQ ID NO: 34937 - DNA, 237 bp, Oryza sativa
  Clone ID: PAT_MRT4530_38905C.1
atgggcgctgtgatgggtgaccgacggtgcgggagcgagctctccggccttgggccggggaaggggaagatgacggcgctcggagtcctcttctcgcgtccttcgcacgcaccggtctccctggtgcttcggcgacggacggcgagggcaactgcaaggcaggggcgacaatggcgcggcagcgtggagagtgaagcgagaggggttgagaggaggagctcggctgcggttttatag

SEQ ID NO: 34938 - DNA, 158 bp, Oryza sativa
  unsure (1)..(158): unsure at all n locations
  Clone ID: PAT_MRT4530_38907C.1
gccgtgcgttttgcctcagtcgtctggaacaaacatgtcgatgtagattgttagtgaagacatgcatgganttgcgtaacttggaacgacttgacgtcacaaacaattggcgtcgagattagatccagaggagaatccaggaactgttggagatgatc

SEQ ID NO: 34939 - DNA, 282 bp, Oryza sativa
  Clone ID: PAT_MRT4530_38908C.1
tgttacaagcaaccgagcttgacgaacctatgcggttattacatgtgcgagatgcttagggtctgtgggagatacagaactaagggtatgtggctcccgagcatcccttataacgcaagcccgttcgatcagaaaacgcttatctacttatgcgcggacttatgccggttcattcgtcgcgacacctacaactatccaggagagttccatgatcctcatagctaacttgctacggatcccaaattcaagaacctaatggagcgggagagggaacatgctata

SEQ ID NO: 34940 - DNA, 345 bp, Oryza sativa
  Clone ID: PAT_MRT4530_38909C.1
ggtatactctctacccttggatatacgctatacatcgatatggtatatctgcacgtatacagacgttctctgtatatgctaaggaaattcatcacggagtccacagatggaaagattcctacccggataggaatgggtcgtcactgtatcgtgtaaggtctgatgtctccgagtcctacatagaaaccacctgacctgcggtataaaagggatccccgggaggacctacagcatcgaatctcatagccaagacaaccaccacagcctacaaagccggagcctacgggagccaagtcgccgagtgatctagtcgaaccaactcgactacgatctcatcggtatcat

SEQ ID NO: 34941 - DNA, 1078 bp, Oryza sativa
  unsure (1)..(1078): unsure at all n locations
  Clone ID: PAT_MRT4530_3890C.1
gcacgaggatgatgtctggctcgggcccggcacgcggattgcatagaagaagaatagaagcatttgaagcctcctcctccaggttgcagcaaaagcacaggaagcagcgagatggaaggcaagagccggcgaccggagataaccgtcgtgccggcggcaggcggcggcgccgccgccgccgttgatgcggtgaaggcggcgaacaaggagcccatcagcccgggctcgccgtccctggcgagcggcgccggcaaggagagcctgagccgccatgaggccgccgtcgtgtccctgcccgcgtggaagctcgacgcgctctgccaggagtccggctcgtcgccggcggtgatgagggcgcgcttcccctacttctgaatttctgaatttctgatgaagccatgagctttttgccatcttcgtacgtgtgtgtgtgtgtgtgtgtgtgattgtaactgtgttgttcatggctgagtaaagaattatacttcctacaagcggctgtgatgtatatgtgagctgctttagctgacgcgttcatctttggacgctgtaaaaactaaaaactgccagtttttcatgtagcatcattggaaaaacatagccatctgtttgcgttgaaaattggtttgattctcacttgtgggcatgtggttggtaaccttaggatgtttgcgaacgatgtgctcggggctttgtgttctgggttgcaaccagatgatcgtaggagttaatgctgccaatttaaagtatgacatgtttgaccagctggtttggtatatctcgagtcagtgaacttcatatcgtccatagaacatgcacgcacctgggggtgctttttttttttttgacttttctcccgagaggatcatatgaacttgaagtgccggtatgtctgtttatcagaagtttgtgatgcttgaggctttaaagtggacccgtactttctgagtgaagtctgccnnnaaaaaaaaaaaannattttttacccnttattaaatcattaaaaaaaaaaaatctcctcgggggggcccggccccaattccctttaggggggggtatacgccgcccactggccgtg

SEQ ID NO: 34942 - DNA, 340 bp, Oryza sativa
  unsure (1)..(340): unsure at all n locations
  Clone ID: PAT_MRT4530_38910C.1
gcggaccgggactttttttagtttctcaattctcgatcgatcatatcatattcatttcngcggaaaccaataaaaccatcattgcaacaaccacccctccttttagatattcttagagaacacaaccccaaccttttactacctttgccgaacttaacccattttccccaacccaaaaacaaccaactctcttgccccaaatccatccaaccccaaataaccccccttaaattacccgcccccccttcaattgccgcgggacaaatatatggctgcccccccgccctcttttttctccttttcctccaggtggccccaaaggtttttgagggggcccttt

SEQ ID NO: 34943 - DNA, 1849 bp, Oryza sativa
  Clone ID: PAT_MRT4530_38911C.1
ttttttttttttttttgtccaattgttacagttgtattgcattcccacaccgtacaccaccaacattaccattactaaatccttgcagcttctcaaaatttaaatacagtgcacacggagaaaacctacagtctttcagcaaacagtaaaaacatactcgcgtacagcatacagtgtctatcaacagagatatttcacggcgctgggaagatactagagaaacctcccaacatgagaagtgataaaccatccatattttgtcaaactgtttacatgctcaatttgctcatgtacgtctgacatgctcgtatttacacgctctaatcctattctgctattcaagcctaagacaaataataacatgcttcaaatccacaatcattttttacccacgagccaactcactgatccggattaatttaccggcatcgcttgatcagcacgtagctcgacgagtacagacaaacgcaagcaaaaccgagtcattcccgctgcacaccatcggccgccgccgccgccgcggcgccgtcagacctcctccggccggctcgcctcttgctgctgccgtcgccgttggcggcgacgtcgtcgggcggcgcgacgtaaacgaaggtgccgacgaggcagtcgtcgtcgagggcgaggagcggctcgagcgccttgaccacgggggacatgtgggggcgggacttggggttgaggctgacgcagcggtgcgccagcgcggcggccttctgcgccgccttggccgggtactggccggcgaggttgcggtccatgacgcggcccagccgccgcgcgtcggtcaggtacggccgggcccactccaccaggttctgctcccgcgccggccggctcttgtccaccgacttcctccccgacagcagctccagcagcaccacgccgaagccgtacacgtcgctcttcgccgtcagatgccctgtcatgatgtactctggtgcagcgtatccctgtgtgcccatgacacgtgtcgagacatgcgtctcgtcatcctctggcccgtccttcgctagcccgaaatctgagagcttggctttgaagtccgagtctagcaagatgttggaggtcttgaagtctcggtagatgaccggcttctcggcttcatggagaaaggccaaccctttcgcggcacctatggcgatcttcaaccgtgttgaccatggcaacgacgctgcgtactttttgaagagatgcttctccaagctgcccctcgtcatgaactcgtaaacgagaagtctgtgttcatcctcgtagcagtagccgatcagtttgacgaggtgaggatgcctcagttgccccagaaagatgacttcagtcagctggcaagatttgaattcgagacctttggctctatttccatgttgaaacttaagcagccactcgttgtgtccctgtgtgccctcgaggtcgaggagcttgacggcgacgggctgcgcgcggaggccgggcttgagcttgtcgtcgacgtagcccttgtagacagggccgaagccgccctcgccgatgaagttggtcatggagaagtccctggtgacggcgcggagctcggcgatggtgaagacgtggaggttcgacccggccagcgacagcgacaggtcctccggcgacaccatccctccgaacgacaggtcggagaacgacagccggctctgcagcttccgctgcttctggctcgccgccgccgccaccttcttcttcgccttcttcccgccgccgccgcctttcttcctcttgccgccgccgtcgtggtgcgaggtgaagcacccgaacagcgagctccacgcctgcttcgccatggcgttcttcgtgtcgtgcgtgtgtggttgaa

SEQ ID NO: 34944 - DNA, 4953 bp, Oryza sativa
  Clone ID: PAT_MRT4530_38912C.1
atgggcgacgccgccgccgccgccccggcagccgcggcggcggggccgagcagcacgcggggggagccgaaggatccgaggacgatcgcgcgcaagtatcaattggatctctgcaagagggctgtggaggagaacatcatagtgtaccttgggacaggatgcggtaagacgcacattgccgtgctgctgatttatgagcttggtcatctcatccgcaagccaagccgcgaggtctgcatcttccttgccccaaccatcccccttgtacgccagcaagctgtggtgatcgcaagttccaccgatttcaaagttcaatgttattatgggaatggtaaaaactcgagagatcatcaggaatgggagaacgacatgagggagtttgaggaattctataatagtaacagtgttgagaaattccctcgggtttttggcatgactgcttcaccaattattgggaaaggtgggtctaataaacttaactacacgaaatgtatcaacagtcttgaggaattacttcatgcaaaggtttgttcagttgataatgaagaacttgaaagtgtggttgcatctcctgatatggaggtgtacttttatggcccagttaatcactctaaccttaccacaatatgcatcaaagagcttgatagcttaaagcttcagagcgagcgcatgctaagagcgagcctatgcgatttcaaggattctcagaagaaactgaagtccttatggaggttgcatgaaaatattattttctgtttgcaagaacttggttctttcggagctctgcaagctgcgaggacctttttgtcctttgatggtgataagctagatagaagggaggtcgatcttaacggcagtacttccagcttcgcacatcactacctgaacggagcaacttctattcttagtcgcaacaaaacagatggttcccacgctggttcatttgaccttgagaagcttgaagaacctttcttctcaaataaattttctgttcttatcaatgttctttcgagatacgggttgcaggaaaacatgaaatgcattgtttttgtgaaaagaataactgttgcaagagcaatatcaaacattctccaaaacttgaagtgtcttgaattttggaaatgtgagtttcttgtgggctgccactcaggatcaaagaacatgtcaaggaataagatggatgctattgttcaaaggttttcttctggtgaggtgaatcttttggttgctacaagcgtaggtgaagagggacttgatattcagacgtgttgtcttgttgtgcgatttgatcttccagaaactgttgctagttttatccaatcaagggggcgtgcccggatgactaaatctaaatacgttgttctcctagagagagaaaatcagtctcatgaaaagttgcttaatggttatattgctggtgaaagcattatgaatgaagagatagactcaagaacttcaaatgatatgtttgattgcctcgaggagaacatttatcaagtggataacaccggtgcttccattagcactgcttgtagtgtatctctactacattgctactgcgacaaccttcctagggatatgttttttactccttccccagtgttcttctacattgatggcatcgagggaataatctgcagactaattcttccaccaaatgctgctttccgtcaagcagatggtcaaccatgtctgtcaaaagatgaagctaagagagatgcatgcttaaaggcatgcgtaaaacttcataaattgggtgctttgacagattttcttctgccgggtccaggttcaagaaagaataaagtatcagtaacaaataattcatcaaacaacaaagttgaagatgatagtctaagagaagagcttcatgagatgttaattcctgcagttctcaaaccttcgggattaaagttggattctttatcgaacttgcatttctactatgttaaatttattcccataccagaagataggcgatatcagatgtttggtctctttgtgatcaatccccttcctgtggaagctgaaacattgcaaatgatgcttgcacacaagtttcaagagatgtgtctgaagattctcctggacagatctgagtttacttcaccccatgttaaattgggcaatgatgttacattagaaatcaattcaacattttaccttctgcttcccatcaagcaaaagtgttatggtgatagatttatgattgactggccagcagttgagcgctgtttatcatcaccgatttttaaagaccctatagatgtgtctgtgcatgcctcatattcatcaaatgagtctctgagacttcttgatggaatcttcagtaaaaccgatgtagttggcagtgtagtctttagtccccacaacaatatctttttctttgttgatggcattctggacgaaataaatgcttggagcgagcacagtggtgcaacttatgcagaacacttcaaggaaaggtttcgtattgagctatcacatcctgaacagccacttttgaaggctaaacagatcttcaacctgcgaaatttgcttcataatcggttaccggagaccacagaatcggagggccgtgaattactagagcacttcgtggagttacctccagaattatgctctttgaaggtcattgggttttcaaaagatatgggcagttccctgtccttgttaccttctttaatgtatcgtttggagaatttgctggtggctattgagttgaaggatgtgatgttatcttcttttccagaggcatctcaaattagtgcttctggtatacttgaagcgcttactactgagaaatgtttggagaggatatctttggagcgatttgaagtcctaggcgatgctttcttgaagtacgtagttggacgtcacaagtttattacatatgaaggacttgatgaagggcaattgaccaggagacgttctgatgtagtgaacaattcacatttatatgagttatcgatcagaaaaaaattgcaggtatacatacgggatcaacagtttgaaccgactcagttctttgctccaggaaggccttgtaaagttgtttgcaatactgacgtggaagtgagactacaccagatggatattcatccagataacagagaaaactgtaacctgagatgtacaaggtcacatcattggctgcataggaaagtgattgcagatgttgtcgaatcgcttattggagcatttcttgttgagggtggattcaaagctgcatttgctttcctgcattggattggaatagacgttgattttaataatccagctctctatagggtattagattcaagctccatcaatttatctcttatggactacactgacattgccgggcttgaagaattgataggttacaagttcaaacataagggtctacttctccaagcattcgtacacccttcatttagtcaacattctggaggctgctaccagagactggagtttcttggagacgctgttttggagtatgtgataacttcgtacctctactctacttatccggatataaaacctggtcaaataacagatctaagatcgttagctgttggtaatgattcgcttgcttatgcggcggttgagaaatctatccataagcatcttataaaggattcaaaccatctcacgtcagcaataagtaaatttgagatgtatgtgaagctctccaattcagagaaagacttgcttgaagaaccagcatgtcccaaggctcttggtgatattgttgaatcttgtattggcgcagtgcttttagattcaggcttcaacctgaactatgtttggaaggtaatgcttatgcttctaaagccagtattgaccttcgccaacatgcacactaatccgatgagagaacttcgagagctttgtcagtgtcatggatttgagttaggccttccgaaacctatgaaagctgatggagagtaccatgtcaaagtagaagttaacataaagagcaaaattatcatttgtactgcagcaaatcggaattcaaaagccgctagaaagtttgctgcacaagaaacactttctaaactgaagaattacggttataagcacagaaacaagtcccttgaggagattttgattgttgccaggaagagggaatcagaactgataggatataatgaagatccaatcgatgttgaggctgacatatctgtaaaaatgaagagtccacatatacatgaagagaacataccttttcaaaatacagaaacatctttcactaggagttctaaattccacaatcaaattatagcagggtctggcaaacatgatgtcaataatggaaggaacaatcaacccaagttggcaacacagagtggtcgtctgcctagtgaagcaacagagaaaagcaataaaaaggtgtatcatggtgacatggtacacaaaacagcaagatcattcctttttgaactatgtgctgcaaattattggaaacctcctgaattcaagttatgtaaagaggaagggccaagccaccttcggaagttcacttacaaggtggttgttgagatcaagggtgcttcggcgacccttttggagtgtcatagcgatggtaagcttcagaagaaggctgcacaagagcatgcggcacaaggggcgctctggtgtctcaagcaacttgggcacctaccaaaagaagaggacgttcgtgtatagcaacattgtcatgttttgggggtcacagtgcgaaagtacagtgatatttgtttgtccagagataaacgtgcctttctctcttttgctctgatgtccaacctcccttattaagggacgtgtataaattttcacttctccagtgccctttgaatggctagagttgtatagctagtccattattttccatgagacgtatattggtatatagttttattcttcaatagacgcatatagtattctttcaagttcccagactagttctctctcgtgccgaattcc

SEQ ID NO: 34945 - DNA, 440 bp, Oryza sativa
  Clone ID: PAT_MRT4530_38913C.1
aaaaaaaacccttttggggggggcccttaactttaaaaagggggtttaaaaaaaacttttacaggacaaaaaaaaaacccaatgggtggcaaataattaattaattaattaaattattttttacccccatggccaacttaaaaggattcccccccaataaaaacctttggggaccttttgttttgggggggagggaaagcccccaacccatcccctttgttatgctggaccccttaaacctttttttttgaaaagggaaatgcatttgcaaaaaaaaaaggggggaaaacacggaaaaagaaaccttttcctggaagggggctaaccaaaaaataagggtttgttttaaaagcaaagaaaacacaaccttttttttgggccttttttaaacaacaaaggggggggggacaaaaaggaggtgcccacaaaaaaactttccg

SEQ ID NO: 34946 - DNA, 2064 bp, Oryza sativa
  Clone ID: PAT_MRT4530_38914C.1
atggctacacgcgtgttattgtcgtcgaaggtgatattagcactagttctcgcgtccctcttctccctcccgcgccatggccgcgctctggagctcatgaactggtcatgcaacaacggcagcgcctatgccgcgaacaccacctacgacaccaacgtccacagcatcctcgccacgctgaccgcccgcacacccaatactaccaccggcttcgccaccgcgaccactgggcgcggcacggacacggaggcgtggggcctcgcgctctgccgcggcgacaccgaccgcgtcgggtgcgcgtcctgcctcgccgcggtgccggccgtcgccttcaacgagtgccggggcgacatggacgtgaccgtgttctacgaccgctgcctcgcccggttctcgtacgtggacttcacggcgaggcccgacaacacggaggtcctgatcgggagccctagcgcggaccgcatcaccgccgacgccggccacttcgacgcgctcgtggcggacctcgccggcgcgctggccgactgggcggcgtacaactcgacgttgaggtacgccgctggggtgatgacctccggcgacggcttcatgtcgacgacggaggacatggtgcacaacatctacggtgtggtgcagtgcacgcccgaccaggcggcggcggcgtgccgggcgtgcctggaggcgctcagggtggacatgcccaaggtgttcgctggaaagatgggagggaggttcaacgcggtgtggtgcaaccttaggtacgagaccttcgtcttcttcgacggcgacccttcggtgaagctcgtcgcgccgccagttgttccggaggatggaaagaggagaagcagccccgaaaatgcagcagcagttgttggagctgtccttggtgctttagtcatccttctgtctctgttcatcatttacctctggaaaaaattacaagcaaaacaatatgctgctgacaaaaatgttgactcaggctcacttctatttgatctggcaataataagaaaggcaacagctaattttgcagaacacaacaagcttgggcatggtggatttggagcagtatacaaggggttcttgccagatgtaggtgaaatcgctgtgaaaaggcttgacaggacatcgggacaaggccttgaacagctgaggaatgagctcttgttggttgccaaactctggcacaacaaccttgcaaagcttctaggtgtttgcatcaagggagatgaaaagttactcgtgtatgaattcctgccaaatcgaagtctcgacactatcctttttgacccacagaagcgagaacaattaagctgggaaacgagataccagatcatacacgggacagcacgaggcctactctatcttcacgaggattcccagataaagatcatacatcgcgacctcaaggctagcaatgtgctgctagactccaacatgaacccaaagatatctgactttggcttggcgaggctctgtagtggaacaaaaactacaagtatcacaagccaagtcgtcgggacactgggttatatggcaccagagtatgcagtgcttgggcacctgtcagtcaaggttgatgtctacagctttggtatcttagtattggagattgtgaccggaaggaggaataccgatgtgttcgacgcagacgaagaatctagcaatctactaagctatgtgcgtcctattgatcaattgttctatgatttccttaaagcaatggcatttttcatgttgaaagtatgggatcattggcagaaagggataccactggagatcactgacacgttgctgctgctcagcggtagccggggtttgcaggacatggagctgctcaagtgtgtccacatcgggctcctctgtgtccaggagaacccggcagaccggccgacaatgctgagtgtccttgtcatgcttcaggatgttgacaccaccaattttgctgcaccatcgaaaccggcatttacttttgcgaatgttaggaacacaacaagctctagccctagcgctgccgcattgtccgcgaatgaagtatcaatatcggagttccatcctagatag

SEQ ID NO: 34947 - DNA, 460 bp, Oryza sativa
  Clone ID: PAT_MRT4530_38915C.1
ggattcacacctgcaattccagtcctctgttgcttgacatctggactgaaaaatttgtgtgatcttttgaagtctgctcttgaatggatatcgggatacaggcatttgaagttgaaagattacataagatatgttgcctagttgattacaggagcttgtccttttgatctatatctgctaaacttgtaattatctcctcatgctattcgaacaaagtagttcctatttttcttgctcatgcttaaggactgactttatctgtttcatatgcaagatggatgttgtagtaaaaaaattggggcttagaagtggcttagatataatctattagcttgtctacaaaaagtgtgatttatattttcctaaccacgtggatgtcaggtaaacacaattaactctagatttaatgtccatttaataatgtacaagctagagttagtctgaaacagcactgtaactt

SEQ ID NO: 34948 - DNA, 230 bp, Oryza sativa
  Clone ID: PAT_MRT4530_38916C.1
aagcccgaaaagttcaaaccgaatgccactggccattttaattcaacagattgcagtcgcaaatgaccctgaccaatgactttttacatgggcgaactattttccaaccttggttaggacataaaggaattgattttttagacccaattacattttccgttggtttggcgggccgggccttacaaatggtaaaaatcggggtaatttaaatatatcactttccttgaaac

SEQ ID NO: 34949 - DNA, 139 bp, Oryza sativa
  Clone ID: PAT_MRT4530_38917C.1
cggcggcccggcgcggggcggcgtcagcctggcgcagtgcaagcggaggctggcagccagcgcaggggctcacggcggctggtcccgccttttcgccatcttgttcatcgcagaggccaggagctccgacgtcgcgtga

SEQ ID NO: 34950 - DNA, 762 bp, Oryza sativa
  Clone ID: PAT_MRT4530_38918C.1
tggatccccgcgccggccgggcctctccttccttcctccttggcgctcatccaccaccacctcctccaagagccaccaaacggcagcaggatggccgctgtgatgaaagctctcgccgtcgcctcgccgatctcggcacgagcacagccccgacgatgccccgcaggttcgtcaggcggccctagccaaagcctgcattcatcgttcggcggcgtctccctgcagtgccggcgcacgaagccggcgtccctccaccggagtcggccgtcgatgcaggtggtgatgatggcggcgaggccggcgatccagttcatccagggcaccgacgagcagacgatcccggacgtgcggctgaccaagtcccgggacggcaccaacggcgtggccatcttcaccttcgaccagccgtcggtgttcgactcgtcggcagagctcggcgacatcaccggcttctacatgatcgacgacgagggcgtgctccagtcggtggacgtcagcgccaagttcgtcaacggcaagccggcgctcatcgaggccaagtacgtcatgcgcacgccgcgggagtgggacaggttcatgcgattcatggagaggtactcccaggccaacggcctccagttcgtcaagaagtgatcgcctttttttttctccttttttccccctcacactgccttgagcatgtactgtgtgctctttcagtgtaaatacctatgaattctgatcatcataagctcgatacatgatgacttgtttggtgtgtgc

SEQ ID NO: 34951 - DNA, 1383 bp, Oryza sativa
  Clone ID: PAT_MRT4530_38919C.1
ggccgcaaattttttttttttttttttccttaaaatctcttgatatcagtataagggaagttcataattgatttcctcttacacatgaatttctcttctactatggcaatgctagcaattcaattagggctttgcactcacaaacttagcgtccgcgcttactagggacactaacaagcaatagcaagagaagatatggaggttccaatatcatgtggacagcagcaaaattccacacgacctacaatgcgtggagagaactattcagatagtagatcctccaacttctttcggaacttcggaattgcttcagctttgacggccatcactaagcccatctccttgtaattcttcatctcttgctgagccgattgttcagaacgtattgggaaagtgaacgaccatgaagaaagctcgcgaaaaatttcgtcttctaacttaggatagataataggctcatcctcttctgtactgttctttgccttttgctttgctggagttttcctctcaagtactctgacaaccattaggtactgcttgaaccggaaggagtcccggagttcttgtgttggctcgtcttctgtggcccatgaaacttcgtcaaataacgattcatacatcttgggcacaagttcatatgggaaattcacaaaacggcggcacacaagcagacccacatcaggtgctttgtcccccagcatttgcttgagcttcttcttggtatccttgtcaccacaaacagcaagcaggtaatccttaagatccttcatacagcggtgctcactgtatcttccaagattaagcacgctaatgagaccaaacagatcgtcattgccaccagtgctgcttccatcagcaccatttccttcaccatcctcttcatcgtcagcaatcttgacaaccgtacccaccgtggtctgctcaaggatgaggtcgacgaagccagtgagatcccacggcttggagtcgaggtaggtcttgagcagcagcttgacgccatggaagtcgccgggcttggggtcgtagaaggcgaagtccgcttgcaccgtatcgagctcctccgacgcgtcgtcgctgtcgtcggagtcgctgctgtagctctcgtcgtcactgctgtagcgctcctcgtcgctggaaggctcggcccgcttggcgcgcttgggcggcggcatatcgcgactggagccggcgattcctgaagggatttcgtcggcggcggcggcgggtggatcctcggggggaggtagtggtttagaggaggaggcggagaagaggagggagcgagcgaacggggagaatccggcgaagggagccgggcgctttcggtcgccgaccatgatcgccgagcagtcggcggcggcggcggcggcggctggttcggag

SEQ ID NO: 34952 - DNA, 261 bp, Oryza sativa
  Clone ID: PAT_MRT4530_3891C.1
ctaacccctagcttccatctgccgcgtcatcgtcgtggtcgcagtccgccgatgccgtggccgcagtccgctactgtcgtcgtcgtcatcatcattatcatcatcatcatcatcatcgccgcaacagtcaacgccactccagaggtcgatggcggcaaatccgcccctcccgcagccagggtagtggatccaccggatctgctgccgccgagctccccaccgctggccgttcccgatcttgctggttgtcggccacttcat

SEQ ID NO: 34953 - DNA, 3030 bp, Oryza sativa
  Clone ID: PAT_MRT4530_38920C.1
ggaagaatcatcaatttatagtccaaaaagaagaaaatttacatgctgtttaggtccttttggtgctgctctgtattcacaggttacatactcacatctatacatccagtactaatgatactaagttttcctactgccgtacctgacgtgtgtggaacatggtctgtgcaaaaaggtagtaaaaccactcaacttgtaagatcatacaagtgaggaaacacagacctgaactacacaacgatcagagaagcaacagtagcagatgacaaaaaaatggttaagtggtaactaaaactggaatcagtgcagtggacggaacagtggatcgtaagatgctttgacttcggcatcatcccactccaacgcatcccaccactcccttgtgcattgtaccgcattcagattaccgacagggagctcgagcttcttcagcttcgggcagtcgacaatcttcaggttccccagcaaggggaaccgcaggaagcacgtagtgctgcacaatgccctgcagtttgccaagccatggagatacagttctttgaggttagggaagggtgtgatgtctctgcaaattcttgcagcttgttcactgctgtttgccgctgttccttgttcatcatcgctgagagtaatcagctcctccagcccatggcaataccagatgtacaacgatgttatgttctggacacatccggatttgtagatgatctttaccttatgaagtgcctgaaggatgatattttgcaggtttggaaggatgggctgctcgtcattggaataatgatctccccggctttgcgagataacatcaggttgtctatacatgtggtcagtttctgtgttgccatcgatgattacctccgctaagttgttgcagctcgcgatccacactctcttgagtccggtcatgttcttccaaagtctgcttgaaggaagctctacctttgtaaggctagcacatgtctttatgagtagatttcttgtcgagctagcgaggcgattcgacaaggacagtctctccagagcctcgagagactgtattgtgatatcgagtatcttgagcctgcgtaggctttcaagctccagaaattcaactccatttccggttgcatcaaccttccagtctccataactgagatccatgtacaatacttgcagcattgtcaggctgcttattacaccacctggtatcaaatccagtggcatatgcgaaagcagcaggaaccgcagggttaccagtgctccaagctcccttggaagtgatttgatgtttgtgttatacaaatcaaggtactgcaactcaactaatgaactgatcccggaaggtaattcatggatagaagtatgtgataaatctaaaaccctgagagatggcatgaattggaagaagccgtcacatatcttatccaatgcagggttgacctgtagcatcaaagttttcagcagagggcaattaggtctctcatacagctcaagaatgttgtttcgcatgaaagaaatccgctcagcgtcgctccatttctctgcacctggtgcctccttgagcccaactccggcacggacaagccattttgtttcttttgtgccaaaatctgatgctatccacagagccatggcacggaccatgggatgcatactgatatgatcctcgtcatcccctttctccagcaaacaggcaatcttgagaacaccaagaaggtcatgccctttgttataaatctcatccatgtcagtgtacaggtcatcaatgaaaccttcaccgatgcagtaccctattatccattccttagaaatggagaattcctctgggaacagtgagcaatacagtagacaaagccttagcttgtcactgggcaaactatcgtagctgttcttgagaggcattagaacatccatctccatgccaagaagctgccatggggcaacctttagcacggtgatggcatgcttccactctttttctgtgcgcttgctggccatcgcccggccgacggtgatgagcgcgagcggcaggccgccacacttcatcgccagcgccttcgcctgttcctgaatctcaatgctggaaaacatgagatgctccccgaccttctcgcggaagagctcccaagcgggctcccatggcaggcactccatcttgagcttgcggcggacatccatgcggtcacacacgtcctcaatcctcgtcgtcaacacgatcttgctcttggagttgtgcttaggtacgggaattccgatcatctggaagttgagtggctcccagaggtcgtccagcagcagcacgaagttcatcttggtgagcactctgtagagcattccggcacgctccctgggcgttctgttctcccacgacacgccgaggcggtcgccgatgattttctggatatcatccagactgaactccttgccgacttcgatgttgatggcgacattgatgtccggcgagttgatgaggaaatcgttgttgtacttgttcagcagcgcggtcttgccgaccccggccatgccgtagatgccgacgatgcccacgtcgccgtgccggacgcacgcgtggagcctctgaagcacagcgtccatgccgacgacggccgcgctgggcatctcctcgaagcggacctgcacaagctcgtcggcgaccttgtggaacgcgcccttctccttgaggttggcggcctcggcgaacatctcgtcggccctctggctgaggtggtaggtggccctgaggccgggcgcctgctcggggggaaggcggaggcgcgcctggtactcctcctcgatccgggcggcggcgtcctcgagcctggagacacactcgagccaccacttgacctggctggtggcctccatgccccggcgctcggcgacgtcgaccaggcgcttcacgtcgtcgcgcttgctcttgagctcgtccatctcgtggcccagcaggtcgatgtagtcgccgcaggacatgacatacccgaacgtccgggcgaagtagtccttgagcggccggaacaccgcgtccacgatggacgccacgaactccat

SEQ ID NO: 34954 - DNA, 1147 bp, Oryza sativa
  Clone ID: PAT_MRT4530_38921C.1
tttttttttttttttttttttttttttttttttttttttttttttttttttttttttttttttggggggaaaacctcagcttactggtttttcccaaaaaactgaacctactggtttagtcctcaattgatacattctgtgaaaacatttcatgaacatttgcctaaaatacaggagcgacacgcattacaacttccattgcttctgtgattcccgtgtctaccgaagtgatacatcaatatgcaagctaatgtctgctcccagggtagaaaaagtcagcgccgttttccttcactctaaaatggaagttccaaattctctgtgcttttagcctttgctccctgaatgtacacttgtttaccactgaaagctgtccatgaacatcagcagctaaaccagtgctcaaaggtgcagctctgatcacaagatctgcaatgtagcgcagatgcaaaaggacccccacaccttcctcactcgaatatatatcctcatgaataaggaagaccaacgagcaattcatctcagaggtaagtgtaacacaataatgcaagaagtccaacacatcatctacagaaccacctgctgcaacttctaacagtgaaacatcatcgatcatgagagtaaagcggcctgtattatctcctgtcctgctagcgtcgatggctctttgaatgtcaccatacagtctaacaaaactatcagaaatggcacctccctttgctccacctgggaaggcctgcaagtcaaaaaaatgaagcctctcactcttcctatgcaaggataggttacagcccatcttacggagaacccggtcgtagtgggagaaaggctgagcgagggcgaggagcgccgcggcgccgccaccggcaagcgcgcgcttgaggaggaggtgcagggcgaaggccccgggcgcctcgacgcggtcctccaccaccaccacgcgcgctccggagcccattgcctcgctcaggaggtccccgcccccgtactcctccatcggggccttggagggctggaccctgatcgccgcctcctcgctggcctccgccgccgtcttcaaaggccccgccgcaccttccctgctcccttcaccgtcccgttgtgctcgccgccggtccgccgccgccgccgaatgacagaggaaaac

SEQ ID NO: 34955 - DNA, 433 bp, Oryza sativa
  Clone ID: PAT_MRT4530_38922C.1
gcacgaggctgaatttccctccctttccctctcctcccctcctcctcctcccgcctccgccgccgccgccgccgactacgccatggccgccaccgcgacgaagaccatcgacttcgccgcggagagagcgctcgccaaggacttcctcgccaacttcgccggcccgcgcggcgagcccaagtacctcaacatcctccaagatgtcgcgaaccggaagatccgcgcggtccagatcgagctggacgacctgttccactacaaggatgcggatgacgagttcttgcagagggtcacggagaacacgaagcgctacatcggcatattcgcggacgccatcgacgagctcatgccggagtccaccgaggcgtacgccgtcgacgaggacagggacatcttgatgacgcagcgcgtcgacgagggagccgatggcggc

SEQ ID NO: 34956 - DNA, 132 bp, Oryza sativa
  Clone ID: PAT_MRT4530_38923C.1
gcatgatcgcccttactttatcgcggaggcatatggtggcaattccgctgattcgctagaggaattcacggggatcaagccttgggcccgggtcatcttcctaccaagctactagaagcggacccaagcttt

SEQ ID NO: 34957 - DNA, 709 bp, Oryza sativa
  Clone ID: PAT_MRT4530_38924C.1
cgtaaaagattcgctcgccctattgtggataaagatcggccggatattcgtattcacgtttatttagatcgtgagaagctaattgtatcgctagacttaagtggcgaagcattacatatgcgaggctatcgtgaagataccggtaaagcaccattacgtgaaacccttgctgcaatcattgtgttacgttcaggttggcaaaaaggaacgccattagttgatcctatgtgtggatcaggcacgctattgattgaagcagctcaaatgcaagcgggtatcgtaccacaattacagcgtaaatattggggattcaacgcttggaaagggcatcagcaagcgatatggcaacaagtattagaagaagcacattcgcagaaaaatactcaaattgacccgcttttttatggttttgactcggatcatcgcgtccttgctaaagcaaaacagaatgctcaaaatgccggtgtagcgcatttgattcattggccacaagcggatattgcagcgttaaaaaatccgtgcctagatcagaaaggtacattggtatctaatccaccatatggtgaacggttaggcacaacacccgccttgattgcgctttattctgtatttggtcaacgattaaaacagcaatttgctggttggaatgtttccatttttagcggtgaaccatcattattgaactgtttacgtttaagatctacacgac

SEQ ID NO: 34958 - DNA, 2769 bp, Oryza sativa
  Clone ID: PAT_MRT4530_38925C.1
aaagcgatcatccacaacagcaacagcagcgatcggccccagggggcaaccgagaaaagacgaccgccgagaagggggcgtgggtggagccggcgccggcgtacagggaggtggaagggtgggagggggcgggggacgactcgccggcattggggcactgccactatgagaccgtggtcgtgcaccccacaagccacgacccgcgattcctcctcttcggcggcgccaccgccatcgaggcccccccatcttcacacatgacgggtatcaggctcgcacgtgagccgaacactgtgcacgcgtatgatgtgaagacgctcttgtgggatacattggatctagccggagaacctcaatcgcctagggcggcaaatattcaggctgcagctgttatacaattagaagcaccgattgatattgttggtgctcgtcacgggcagtttggtgtccttatgcgtgttttggatgaatatgggtttccatcaactgctggtgatgtaccgtatattgattctcgtttcctgtgagactatgttgtcggtcgtgaggacagcctgtatccaataactttgcttgtagctgttaaaataggggacccttagaatgttcacgttattggcggaaaacacgaggcagctaacatgaatgaactttttggggtcggccttgaatctacagcgagaatgtgtgaaagtgccagtgcacgcgccgatgccaggcttttacattgctgtgataagcatgcttctgctacgccactatctgatgcttatggtctactaattgatacaattggaaagtggatgtacactctaggtgcagggggagcaccttctccgggctatcagaatgcagctggcttttatgattctcatggacctgttattgttcgatcctttagaaaatgatagtgtggagggttagagaccaaatgcacgagggcctggcttggtgacatttgggcctgatcgagtgactgaattctgtaaacgaaactcgacgattttcttgttgctgataatgcacctatccaatcagaatttacttcatctatgtacgacagagtcccaagggcagaaaatcaaaatagaaaccacaattttaattcagattctcccactacaaataacaggcacgagatagcttctggtttcagcacggacaagaagtccattgacatgttgacacaggcttcagctgccgaagctgaagctgttagtgctgtatggcgtgctgcacaggaagcatctcatgcatcttcagaagatagcctgtcagagggaataggatctgagtccccactcagtgaaacttcaccgatgcctgaggatttagacgatggaggctccctagaaccagatgtgaagctgcattcactttaccagtcacaaggtacatacattatacatccaacaacctgcagccgagcatcacatcacaggccccctgtttgtcgaaggtgttcatctggtgattagttcattgtgacgcttcagtgttcagtgtagttgatatgacttcatctcctcggttggaagctacacaaccgttcagagcttcaaatcgtaagctatgtgcttcccggtccctctcatctacaccaattttaaaggacagaatggaatgatgagcaaataatcgagttgtatgtactttgggtggtttacctgtaactttagtgtacatgattagttcattgtttactcaggagtaagaaggttgtaatgactgtacaccatgtccccagtgtgggacgctgctttgcacagcgcagctatacaaggttgtcgaagttagattggacggggagctttgaggctttatcccgtcgctcgttgtagagcgtgatgaatgtttgtaagcgaaccgtgttgtgattaattaaatttataggtgtgtgaacaataaaataagttaagcattgaatgcatagagagaatgggtgaaagtgatggcatatgggcttggacaagattcaatcaactgtttaattatctcccacttgctgccatgatagaaaagaaaataatttgcatgcatggtggcattggaaggtcaataaacactatcgagcaaatcgagaaacttgaacggcctatcacaatggatgttggatctattattctcatggaccttttatggtccgatcctacagaaaatgatagtgtggagggtttgagaccaaatgcacgagggcctggcttggtgacatttgggcctgatcgagtgactgaattctgtaaacgaaacagattgcaactaatcataagagctcatgagtgtgttatggatgggtttgagcgttttgctcatgggcaattgataactttattttcagccactaactattgtggtatgtctcctctaacttcctttgttacctatgcaagtatgcaaccaagttttttgctaagaccatgcgtgcaccagttaattctccagagtcttccccagaacgtgccatggacgccacatggatgcaggaacttaacatacaacggccacctacaccaactagaggacggccacagtctgctagtgacagaaattctcttgcttatatatgatacatcgttgaaccacctccagcttcttgatccatgtttcttgacggaaatctctttaccagtcacaaggagtaagaaggttgtaatgactgtacaccatgtccccagtgtgggacgctgctttgcacagcgcagctatacaaggttgtcgaagttagattggacggggagctttgaggctttatcccgtcgctcgttgtag

SEQ ID NO: 34959 - DNA, 195 bp, Oryza sativa
  Clone ID: PAT_MRT4530_38926C.1
atgccattgccggaggcagaggcgcgcgcgcgccggagcgcgttcgtcggcccgctcctcgggcaagctcaacccgccggcggcggcggcggcggcgcggcgctgtccacgggccacggctccatgcgcgacgcgactggagcgcaccctagatcttgtcaaggccgcgcatacatcctgtggcctctgccatga

SEQ ID NO: 34960 - DNA, 294 bp, Oryza sativa
  Clone ID: PAT_MRT4530_38927C.1
atctcgtggggaccaagggatgtatagatggagagcccactgcccaccacgggctcgagatgatccctcacatcacgagtttactgcgagttcaacgtgcgtgagcctttggcctctctagtctcaaactggaaaattcgtgattatatgccggtttactatagtacttatctgagaactttatatttactctcggtgttgaccatgacgagaaagtgatgaggaatgacatagtccatgtcacacacctttggcgagagatacgcgtttctggctataacgaacgcatgctga

SEQ ID NO: 34961 - DNA, 688 bp, Oryza sativa
  Clone ID: PAT_MRT4530_38928C.1
gcacgaggttttgactagatgacaatgagtttactgttctgatttctaaaccatgatgagtagaaattttttcccactgaagtgcttgctatatctttactgcaatgtgtgtttgcataacagatgagttaattatggttgtgaaaccttattgattgtgctccattgagcttcatcatgatgtgctacgcgtgttgctgaataagtcgaaaagtcgaaaggagctgggttagtgggttctgttaataagacatgatgtgcagtcattttttgctgcgttagcaatcgtgtggtaaatggtatcttgactagagagcttcacatttcgctgttgcgtagattctggataatttaagaattctgtaaaataaatcgtggtatccataggttgtgaagaaactttaaattagctatgctttgcaagatacatgaaaaatatcagtaggtttttcaatggctctgtcacatgtatggttccaagttcactgcaactgcaagtgatttgatctgtgcagctatcaaatgtttcttaagcatgatttctcttttttgttgactttgtttagctagagagttcctcatttagctgttgcgtagattctgctggttgattataaggtcagggtataaggcatgatggataaaatgagctggggattttgttgctgaacagtcataagacatgatg

SEQ ID NO: 34962 - DNA, 375 bp, Oryza sativa
  unsure (1)..(375): unsure at all n locations
  Clone ID: PAT_MRT4530_38929C.1
cggacgcgtgggttctcaactnntcctatgaaaactttttttcgaggctgcacgtttgcaatgtgagtaaataaaatcatttattgaagattacatttgtatctgcaaattcagttagctagagggtaaatctttttcagtgacagtatctttcctaggaaattcataccgaattgtgaatcctcatgtactgaatttgtactatcatacactaccgaattgattttgccccttattgtttaggctttccacgatttctgctaattattttcacagtaattgcttgcctttttttgcaccggactagattgctgtttttctttgatcatcctcttttggttcctatactcttctagcgttggtgctttttttttc

SEQ ID NO: 34963 - DNA, 560 bp, Oryza sativa
  Clone ID: PAT_MRT4530_3892C.1
ttttcaatagaaaggactaaactatacattacgggggtggtttgtaacagtggcgcagtttccaagcttctagccaagaagtaacaagtaatacaaggaactgtatgtcaactcatccaaagattccttgatgtggactgacataatgttggacaaacacaactaatccatctcattgtcctaggctatagccaatggcacgttttaaagtcaccaacataaacacatttgaaattgctcttacaatatttattatgccgtttcaattgtacctaaatgcccttttagacatcagatcttacaggaacaatagttagatattcccatgaaaagtagagttagataatattttgcggctttgcaaagataattgataggcaagatgatgaaccagtgtagcattttgactaaatgtggaaatatgggctgcatctctaatttctatgccttctaccctgaagctgttcttttccactccaagatactgcttgctagaacttgtacttagtgcattagttttcttaggtctcttatcaggtaggtgattttttaggctgatt

SEQ ID NO: 34964 - DNA, 2211 bp, Oryza sativa
  Clone ID: PAT_MRT4530_38930C.1
cgggctgctgccttactacactggttctagtcctaacattttccttctacagaacattaaggccgttttgatctcctctccttctccaggttgggagaaggaaggaaggaaggaaggaaggaaggaggctttgcctcgatctcgctctctccgggcttcatttgaggagtcatcttatttttggtcaagatgaagcgcatgcaaaggatgccaacaaggaagtcccattcatggtggtgggacagccatattagtcccaagaactccaaatggttagccgagaacctagaagagatggataagcaagttaaagatatgctgaagctcatcgaggatgaaggtgattcttttgcaaagaaggccgagatgtatttcgaacggcggcctttgcttgtaactcatgttgagaacttctaccgcatgtatcgtgctcttgccgagcgttatgacaatgtgactggggaattacgcaagaatatcccatcgtcactccagtcacaaggctctcttagcatatctgaatctgattctgagacacagtctgctcccccaactcctaagcctgactcggaagagacaacaccaaaacagaagcgtaaaccaagagcagctggctttgatgtcttccttggttctggtggaagttcagacatttccaagaaggggagcgatggatcatcatcatcttcttcagaatctgattctgaggttgacgaattgagagaagacaatggtgatggaagtccttttgcattgaacgaacgaattgccgagctagaagatgagcttcaggaagcaagggaaaaacttgaggcacttgaggaaaagaatacacgctgccaatgtgaaaaacttgaggagaagttgaaggattcgcactcagaaatcagcagccttcagaaggaacttgaaggccaactagctcatcatgaccatgaaattgagaagtgcaagaaggagcttgaacacgttcatgagaagtattcccacgataaatctactcttgaaacagaaataataaagctccaagacatcgtcaagaatttcgaaggtgatctagcaaaaatgtcacaagagaaattgcagctcaaggcccaggttaaggaacttgaacaagcatctcgcagcctagatgattcatcagcacagattatgaagctccaagaaataatcaaggatctgcaaagaaggctggacaatgattcaaatgagaagaagatgctcgaagaacgtgctatcgaatttgaacaagttcgtaaggagctggagggttcaaggactgaggtcgcagaactacaagctacaatcaacaatctgaaagctgacctaggaagagctctggaagagaaatcacagctggagagccgtatcaatgatctggaacacacaatcgcctgtaatttggaagaattctcgcaggagaaatcctcacttggtgccgagatccaaaaactgaaagaagccaatgcttctcttgaaggcaagctgacatccacagagtcacagctccagcaactccacgccgagaaatcagaagcatccattagcagtgagaagcagatctccgatctgaatcaagccatcgccgatctcgaaacaaagcttgaactcctttcttcagagaaaactacagtcgataacaaggtggctagcttactgaccgatgtcacagctcgtgatgagaagatcagggagatggacagccacctgcaccagctgcacctggagcatgtcaagctgattgcagaggcagatgccgtgacgaaggcggtgtcggagctgcgagcacgggtgagcgagctcgaggaagaggtggaggagcagaagctgatggtctccgatggcgcggaggggaagcgagaggcgatcaggcagctctgcttctcgctcgagcactaccgccatgggtaccagcagctcaggcagctcctgcagggacaccacaagaggccattggtgatggccaattgagagtgagaatttctaaaacctatcttggcaatgcaactgcaaagcaaaattgcatcaaagaacctgtcaatgcaatgcaaaattgcatctccctccccttttcttgttctatgatgtagctcattcagatgctggtaccctatggtgcgtgtattgtaatcgaggaaccgagtctgaacaaacttctttttttcatttcctggtaatgaatctgtcgaattctgctgtgagcatgtcaag

SEQ ID NO: 34965 - DNA, 246 bp, Oryza sativa
  Clone ID: PAT_MRT4530_38931C.1
atgttcgaagggcaaggcaccgcgtgggtgcgtcgaatcgactcctggagcgtggcaatgtatgttggcgtcagcatctgcggtggtgacggtggcggtgatcgcgacgcgcggggagggggggtggacaattcttctccattcccactcgagctgcagatacggacggcgacggcatttgcggaagcagcaacagccggtggatgcgatggcaacaatgagggtgattatggcggcaatgtgatg

SEQ ID NO: 34966 - DNA, 449 bp, Oryza sativa
  Clone ID: PAT_MRT4530_38932C.1
cccacgcgtccgcccacgcgtccgcccacgcgtccgcccacgcgtccggtttcattaaggccgttttgatctcctctccttctccaggttgggagaaggaaggaaggaaggaaggaaggaaggaggctttgcctcgatctcgctctctccggtgtcctgtgtccatggtctcaatttctcaaagagttttcctagaagagatcagctgatcgaatgaagaaattattatttcagggcttcatttgaggagtcatcttatttttggtcaagatgaagcgcatgcaaaggatgccaacaaggaagtcccattcatggtggtgggacagccatattagtcccaagaactccaaatggttagccgagaacctagaagagatggataagcaagttaaagatatgctgaagctcatcgaggatgaaggtgattcttttgcaaagaaggccgagat

SEQ ID NO: 34967 - DNA, 642 bp, Oryza sativa
  Clone ID: PAT_MRT4530_38933C.1
atggtgctcgggttgatggtggtggaagcgattggcgatccaatcggtgggccagacactttgggcgggtggcccagactttccggcagcggcatgaactgtttgatggctacattcaacaaggagatgaccagtcatggtgctcaggttgatggtggtggaagcgattggtggtccaatcggtgggtcagacactttgggtgggtggccaagactttccgggagatgaccagtcatgatgctcgggctgatggtgatggaagcgattggcgatccaatcggtgggtcagacactttggacgggtggcccagactttccgattgatggcattcaatcggaagtcagagcgggtggttcctagaggccgatttggaggtgttgatgacaagaacagagatgagtcatcatatggtcaacacagattggtggcagaagtcgttgacgatgttgttggtcgtgctatgtgtgcttgctctagagcgaggatgtcgctgggggaagctctaaatgatgagcttctgaacgtaagatatctaagatggtggcaatacagaagatttgtttttcagcaatggaaaaacacacagataccagctgctcagaaatcaaaatgtcatggttatgtcactatatccttttag

SEQ ID NO: 34968 - DNA, 1615 bp, Oryza sativa
  Clone ID: PAT_MRT4530_38934C.1
atgtcgccgccgccggcggcggcgagggcgccgccggtgctgaggaacgagctgtcgaggaggacggcggtgctggggctgcggctgtggaagctggacggggaggcaatcggccgcgtctgccacaagaatctcgtcaggttgctcggctactgcgcggagggagctcaccggatacttgtgtatgagtacgtggacaatggcaacttggagcagtggcttcatggcgacgttggaccggttagccctctgtcttgggacatcaggatgaacatcgtgcttgggacagcgaaagggatcacatatttgcacgaggggctgcaggagaacggcgcgaagcgggacatcaagtcgagcaacatactgctggacaagagatggaaccccaaggtctcggactttggcctcgccaagctcctcggttcagacagcaactatgttaccacgagagtcatgggaacatttggttatgtagcaccggagtacgcgagcaccgggatgctgaatgagagaagcgatgtgtacagcttcgggatcctgatcatggaaatcatctccggtcgaagcccggtcgattacgtccgtgagctggaggaggccaccgccgccttcgcacccgagcatgtcgtcggcgagggcggctacggcatcgtctaccgcggcgtcctcgccgacggccgcgaggtcgaagtcacggaagaaggcctctcttggttgctctgaggtgtgtggatcccgactcgcagaagcggccgaagatggggcatgtcatccatatgctcgaagtcgatgacttcccataccgagaagatcgtcggactccgcgggcgagcccactggacagaacaagaacatatgcgaagccggtgacggagtcgggcgacgagggcaacaccaccacagctgccagtacgccatccagattgcacgagagcttgagataggtctcacttgatcgatggcctcatcagggctctagctagcgctgtaacctgttttttttttagtccgtgtcgtttgctctggttgtgctattcgtgttgatcggttggtgcgtaaattttgtgcgagtgtggtggtagctgtggttggttgcatttgccttccattcatgctgttgaacgctctatgtactgtggattgacatagcttgctaccggccgactgctgtatagggaacctgataatggaaatcatctccggtcgaagcccggtcgattacgcaagggctccaggagaggttaacctagtagagtggctcaagaatatggtgagcaaccgggactatgaagctgttctggacccaaaattgccagagaagcctacctccaaggcactgaagaaggctctcttggttgctctgaggtgtgtggatcccgactcgcagaagcggccaaagatggggcatgtcatccatatgctcgaagtcgatgacttcccataccgagaaatcatactatatgtgcatggatcgtcggactccgcgggcgagcccactggacagaacaagaacatatgcgaagccggtgacggagtcgggcgacgagggcaacaccaccacagctgccagtacgccatccagattgcacgagagcttgagataggtctcacttga

SEQ ID NO: 34969 - DNA, 417 bp, Oryza sativa
  Clone ID: PAT_MRT4530_38935C.1
tcttattgaattaaggaagttgatgttgtatcaagaaagaaagttccttattatgaagaaagacaagtatatgaaggtccagcacaaattgatgtgatacaaggtggtgctagagaatacgcttctgctgcttctactgccgtcaatggtagattaattgctcaccaaaaattacctggtcaaagaattaaggaagtcgatgttatttccagaaagaaaattccatattatgaacaaagagaattatacgaaggtccagctcaattacaagttattaatggtggtgaacgtgaatacgtttctgccacctcaaatgccaggggaggacgtttgattggacatagaactttaccaggacaaagaagcaaagaaagtgatgtcatttccaaaaagaaagttccatactatcaagaaaga

SEQ ID NO: 34970 - DNA, 2020 bp, Oryza sativa
  Clone ID: PAT_MRT4530_38936C.1
ggggttgccggcgggatgatggaggaggcgagcacgtcggcgtccggtggtggggggggcgccgcgaacggcgggcagcggggcttcccgccggcgagatcgggagtgttctataggttcactcagcagaacctcccagcttggaagccggcaatgacaccaggatgtgtgataactattttcttgatgatcggagttacttttgttcctgttgggcttgtttgccttcatgcttcaaatcatgttgcagaaattgctcaccgttatgatattgattgtgtacctaatgcttacaaaagaaataggcaggcgtatattaaagatagctcgatttcaaagaactgcactcaagaagtgaaggttaaataccttatgagagcaccaatttatgtgtattatgaactcgacaacttctaccagaatcatcgcaggtatgtcaaaagtagaagtgataagcaactacgctatgggcagaagtacacacatagttcatgtgatcctattgaaaggaatgatggccttccaattgttccatgtggcttgattgcctggagcttgttcaatgacacttatggatttacctgtggatccacggaaataaaggtcaacaggaagaatatttcatggaaaagtgaccgggagcataagtttggcaaggatgtatatccttttaactttcagaatggatccttaattgggggaggaaaacttgaccctgctttaccactgaaccagcaggaagatcttatagtgtggatgcgtacggctgctcttccccaatttcgaaagctctatggtgtcattgaagaggatctacaggctgatgaaatcattacgatgcacatagcaaacaattacaatacctacagttttggcggcaagaaaagcctaattcttacaacatcaacctggctaggtggcaagaatgactttcttggatacgcatatcttatcactggctccttgagccttttcttaaccattctctttgctctgattcacgtgaaaaatccaaggccacacggtgactagaattacctatcatggaataggccaaacagcaatagctaagctgcctacataactgtacgatatgtaaggtaaacatttgacaaatacagtgtagttgtttccctgtaaaaccaagactattcttctttcatatgataacatagagttcagactgaatttcgtggcagtgcaaatagaacaaccaattttgtcattgccttttcttttaagaatgcacacaatttgtgcatttgaaaagaactggtataattggcagtttttagttcatccaaacatttggtatgttgggataataaagtgctgatgaggattgactggcttcttcatgcattgtaattggctctctacatgctcatgaagaaaacaaactaacaagaattgtatgtgcgtgtgccatactatttgagtgaccatgtatagtataaatgcgtttgtcataaggtttctgccactactgcccatatcttatttccatcgtccagtctaaccattgtgaagataaaagctgacttggatttcaagagatggacaagttcaatttaacagttgtgcaggtccgagaatttcctcagttcatgagcttcactatgcaagaagaaaggtccatcttatcccaatctctctcatcaacttttctgtttttcttctgggagatgtgtgagctttctcacgtcatacttgcctgaactatggaagttggcgattctaccaaggtgaaggttacattttgcaggtgcataagcatcaatgggcgacaccaatgcctcgactggttcattcattgacgacatgatgtcatacttttgaactgacttgctgctcatatgacgagctgttataatctcctttgttcatatgacctttacgtgtgaacaaatatgctgtgctggtttatagctgatttgacagacaactttgctttagtataagtagaaacctctcatgctcgagcatcattttcaacaaagctatttcattgtcttccctt

SEQ ID NO: 34971 - DNA, 165 bp, Oryza sativa
  Clone ID: PAT_MRT4530_38937C.1
atggcaaaggtaccctatagagttataagtattgcgttttgtcatattgtagatgtccaaggtggtgactggcggaggaagagaaaggtgggtgactacagacgctaccgacaagctggatatcgatgggcgcagcacgctcgttcttctcacggtcgatactga

SEQ ID NO: 34972 - DNA, 1269 bp, Oryza sativa
  Clone ID: PAT_MRT4530_38938C.1
atggagaagaaggataagggaaggcaccgcggccgcgacggcggaggcggaggcggcggcggcggtggtggtggtggtggtggtgtggatcgcggcggtggagggagcggaggaggagggccgggaatggggcggcgcgggagcgatgcgcgtggccagcaggcggaggcggcggccgcggcaatcagcggcatcgccacccgccttggcttcgggtgcaccatcagtatgacgcctttgttttgcgctgtgttggatggacaagagattactgtgaagtattttcttgacaaaggtgctgatccgaataagaaagatgcagaaggctttgctcctcttcatgaagccgcaaaaatagggaacgttggaatagcacgactgttgttatctaaaggagctagtgttgatgtatcttcttctgaagggacaccacttcatgttgctgcctctaatggaaaatctagcattgtgctgattttattagagcaccatgcaaatccaaacgtgatgacgccagattgttatacaccactgactgcagttctttctgccactcctgaaatagtgaatgaatctgagtgtttgaagtgcatgaaactccttatcaaggctggtgctcattataaacttgcaactcctgatactccattggagatagcaactagaaatggcttaactgagtgtgttgcatacttgttggagatcagcactgttgttagactaagtgaacatgacaaaggaagtgatggagacagaaaatctaagctgaaattacatggtggaaaagcatttgaggagggtgactatgcgggtgcaatcatattctacactgagtttttatgcaaatataatttcttcaataatccaagcccgaactataamcamcagagattagcacaaaagaacccaactccacacataccacatcgcagaagcatggcagtctctgcatcccagttgacatctaggatactattatcacttctattgtctaggaactattgctgtgttaacaaaggaagactcagtttgaatttccaatggcattgccatcatgtgggggatacacttgcaatgaaacttgatcctgcagatgccacactgtattcaaacaggagcctttgccatctgagaagtggtgcagcgcaagaggctttgctggatgctaatgattgcataaaactcaagcctgagtggactaaagatcatgaggaggatgcttgtgaagatcctgttgacccgttagagtgggacagctatggtttctag

SEQ ID NO: 34973 - DNA, 515 bp, Oryza sativa
  Clone ID: PAT_MRT4530_38939C.1
ctcgtcttattgaatctctaaatggccactagattccgacacacagaagaaaaagaggagacgtcacagccggatatggacgtgttggaaagcacagaaaacatcccggaggtcgaggtaacgctggaggtcaacaccaccacagaatcaacttcgataaataccatcctggatacttcggaaaggttggtatgagacacttccattacactcgaaacaacacttctgcccgactgttaacgttgagaagttgtggtcggttctttctaagggccaacaagccagatcaacctctggaaagaccgatcgagtcccagtcatcgattgcacaccagctggattcttcaaggttttgggccaagggacatctccctaacttccctgtcgttgttaaggctaagttcttcagcaagtctgccgagaagaagatccaagctgctggaggacatgccagttggttgcttaattcaatccaccataaatactaacaagagagctctaaaaaaaaaaaaaaa

SEQ ID NO: 34974 - DNA, 339 bp, Oryza sativa
  Clone ID: PAT_MRT4530_3893C.1
atgccgtggccgcagtccgctactgtcgtcgtcgtcatcatcattatcatcatcatcatcatcatcgccgcaacagtcaacgccactccagaggtcgatggcggcaaatccgcccctcccgcagccagggtagtggatccacctatcccaaagattggggcggcggaaaccgtagctccccaagccgatatcgttgtcgtagcctccactgttgccaccggatctgctgccgccgagctccccaccgctggccgttcccgatcttgctggttgtcggccacttcatcccgtcatctaccgttcgatgagacagagagagagagagggaggacaggataa

SEQ ID NO: 34975 - DNA, 1458 bp, Oryza sativa
  Clone ID: PAT_MRT4530_38940C.1
atggagaagaaggataagggaaggcaccgcggccgcgacggcggaggcggaggcggcggcggcggtggtggtggtggtggtggtgtggatcccgccggtggagggagcggaggaggagggccgggaatggggcggcgcgggagcgatgcgcgtggccagcaggcggaggcggcggccgcggcaatcagcggcatcgccacccgccttggcttcgggtgcaccatcaatgtcggcggcgggatgccaccgcagatggagttcctgatggcgtgtacggacggcgacgtcgcgcgcctcaaggaggtggttgatagcatggatgaggatgatcggcaatcgctcacctctgtgaggatggaggggtatgagccactgtttgaggcagcaagctcgggaaaaattgatctctgcaagtacttggtggaggagcttgggttcgatgtcaatgccgaagctaatcatgattccggtatgacacctttgttttgcgctgtgttggatggacaagagattactgtgaagtattttcttgacaaaggtgctgatccgaataagaaagatgcagcaggctttgctcctcttcatgaagctgcaaaaaaagggcacgttggaatagcacgactgttgttatctaaaggagctagtgttgatgtatcttcttctgaagggacacctcttcatgttgctgcctctaatggaaaatctagcactgtgcagattttattagagcaccgcgcaaatattcaacgatcacaagttgatgcaaaaagctttcgaaacagggtccaagtgttctatgtacctgctttgccaaacgtgatattaccagattgttatacaccattgaccgcagttctttctgccactcctgaaatagtgaatgaatctgagtgtttgaagtgcatgaaactccttgtgaaggctggtgctatttataatcttgcaactcctgatactccattgaagatagcaactagaaatggcttaactgagtgtgttgcatacttgctggagatcaccacagttaaactaagtgaacatgacaaaggaagtgatggagacagaaaatctaagctgaaattacatggtggaaaagcatttgaggagggggactatgctggtgcaatcatattttacaccgaggcaatgaaacttgatcctgcagatgccacactgtattcaaacaggagcctttgccatctgagaagtggtgcagcgcaggaggctttgctggatgctaatgattgcataaaactcaagccagagtggactaaaggtcactatcgcaaaggatgtgcccacatggcactcaaggaatacgaagaagcttgtactgcattcatggctggaacaaagctcaatcctttaaacgatgaaatgcaggatgcattttgggaggcagctaaaggaatgatgtatgaacatatggctggaaagcgcgtcagctcggttgattag

SEQ ID NO: 34976 - DNA, 1578 bp, Oryza sativa
  Clone ID: PAT_MRT4530_38941C.1
atggggaagaagggtaagggaaggcaccgcggccgcggcggcggaggcggaggcgggggtggtggtggtggtggtggtggtggtggtggtgtgggtggggatcgcggcggtggagggagcggaggaggagggccgggaatggggcggcgcgggagcgatgcgcgtgcccagcaggcggcggcggcggcggcggcaatcagcggcatcgccacccgcctcgggttcgggtgcaccgtcaatgtcggcggcgggatgccaccgcagatggagttcctcatggcgtgtacggacggcgacgtcgcgcgcctcaagggcaatgcaattgtaatgggagctgttgtatgtgaggctagtcttgatagggtcaggaaccgtctttaccttaccatgaagagtttaactatagttacagcactgggtatgacgcctttgttttgcgctgtgttggatggacaagagattactgtgaagtattttcttgacaaaggtgctgatccgaataagaaagatgcagaaggctttgctcctcttcatgaagccgcaaaaatagggaacgttggaatagcacgactgttgttatctaaaggagctagtgttgatgtatcttcttctgaagggacaccacttcatgttgctgcctctaatggaaaatctagcattgtgctgattttattagagcaccatgcaaatccaaacgtgatgacgccagattgttatacaccactgactgcagttctttctgccactcctgaaatagtgaatgaatctgagtgtttgaagtgcatgaaactccttatcaaggctggtgctcattataaacttgcaactcctgatactccattggagatagcaactagaaatggcttaactgagtgtgttgcatacttgttggagatcagcactgttgttagactaagtgaacatgacaaaggaagtgatggagacagaaaatctaagctgaaattacatggtggaaaagcatttgaggagggtgactatgcgggtgcaatcatattctacactgagtttttatgcaaatataatttcttcaataatccaagcccgaactataaacaacagagattagcacaaaagaacccaactccacacataccacatcgcagaagcatggcagtctctgcatcccagttgacatctaggatactattatcacttctattgtctaggaactattgctgtgttaacaaaggaagactcagtttgaatttccaatggcattgccatcatgtgggggatacacttgcaatgaaacttgatcctgcagatgccacactgtattcaaacaggagcctttgccatctgagaagtggtgcagcgcaagaggctttgctggatgctaatgattgcataaaactcaagcctgagtggactaaaggttactatcgcaaaggatgtgcccacatggcactcaaggaatacgaagaagcttgtactgcattcatggctggaacaaagctcgatcctttaagcgatgaaatgcagaatgcattttgggaggcagctaaagcaatgaagaatgaatatatggctggaaggcgcgtcagctcggttgattag

SEQ ID NO: 34977 - DNA, 519 bp, Oryza sativa
  Clone ID: PAT_MRT4530_38942C.1
atggatgaggatgatcggcaatcgctcacctctgtgaggatggaggggtatgagccactgtttgaggcagcaagctcgggaaaaattgatctctgcaagtacttggtggaggagcttgggttcgatgtcaatgccgaagctaatcatgattccggtatgacacctttgttttgcgctgtgttggatggacaagagattactgtgaagtattttcttgacaaaggtgctgatccgaataagaaagatgcagcaggctttgctcctcttcatgaagctgcaaaaaaagggcacgttggaatagcacgactgttgttatctaaaggagctagtgttgatgtatcttcttctgaagggacacctcttcatgttgctgcctctaatggaaaatctagcactgtgcagattttattagagcaccgcgcaaatattcaacgatcacaagttgatgcaaaaagctttcgaaacagggtccaagtgttctatgtacctgctttggtttgctactgtcttaccttctga

SEQ ID NO: 34978 - DNA, 1632 bp, Oryza sativa
  Clone ID: PAT_MRT4530_38943C.1
agtctgcgaagcccaccaccaccaccacccagatgcccacctcgccgccaccaccaccatgcggggctccatgcggggctccgcggcggcggcggcggcgaccgtgacgcgggtggctcagcgggtggtggccccatcggcggcgacgcctgggggcgcgctcccgctgtcctggctcgaccgctacccgacgcagcgcgcgctcatcgagtccctccatgtcttcaagggccgcgccgacgccgccgtggcgcccgccgcggcgatcgagcgcgcgctcgcggcggcgctcgtgagctactaccccatcgccggccggctggcggagcgcggggatggtggggagctcgtcgtcgactgtaccggcgagggtgtgtggttcatcgaggccacggcgagctgctccctcgaggatgtggactacctcgagtacccgctcatggtggacaaggacgagctcctcccccaccccacctaccccgcctccgagtctcaccccgaagactcgctcatcctccttgtccaggtcacgcagttcgcgtgcggcggcttcgtggtcgggttccggttcagccacgccgtcgcggacggccctggcgcggcgcagttcatgacggcggtcggggagatcgcgcgcgggcgggcggcgccggcgctggcgccggcgtgggggcgcgacgcgatcccgtgcccgccgtccgccgccgtgggcccgctccccgtcccgacggagctccgcctccagtacctcgccatggacatctccaccgactacatcgaccacttcaaggcgaggttcctggagcagacgggccaccggtgcagcgcgttcgaggtgctcatcgccaaggcgtggcagtcgcggacgcgcgcggcggggttcgccccggggtcccccgtccacgtgtgcttcgccatgaacgcgcgccccgtgctccggcgcgcgctcccggacggcttctacggcaactgctactacatcatgcgggtgacggcggcggcgggggcggtggcggacgcgtcggtgaacgacgtggtgaggctgatccgggaggggaagaagcggctcccgggggagttcgcgcggtggagcggcggcggcggcggcggcgaggacgacccgtaccggatcacctccgactaccggacgctgctggtctccgactggtcgcggctggggttcgccgaggtggactacgggtggggcgcccccgtccacgtcgtgccgctcaccaacctcgactacatcgccacctgcatcctcgtccgcccctccgcccacaagcccggcgcccgcctcatcacccagtgcgtcgccgccgacgccgtcgacgccttccacaacgacatgatgcgcctcgactaataaccgagcgagctcaccgtccgccgccaccgacatcgccggcgcaatttgattcgttctttttttctttttttttttgggttttttctctcctctcgctgtacgcacgccatggcattcattcgccgtagtagactagaagaagaaaattatatatatatcagattaaaaaatacgataaatatatatgtatacgcgcctgtaatgcgaagcatttgtgcttattccttcgattaattattgagaccgggttcccctttgctgcg

SEQ ID NO: 34979 - DNA, 306 bp, Oryza sativa
  Clone ID: PAT_MRT4530_38944C.1
atggcggcgggaccgtccccggcggcggtggctggcgtggcggcgggaggcgtcctcggcgggagtggctggcgcggcgacggcgggaggcgtcccaggcggcacgacctcgcccctcgcatcttcatggctgatgccgctcacccgccgcgtcaccggagtccgccgcttgcccgccgtgctgatgccgcttcaccgcgtcgcagctgcagcggctcggcgtcggcggagccacaggcgcctgtggaggagccgcacggcaccggccgccgcggcgagcgcggctgtcgccgccaccgccgctag

SEQ ID NO: 34980 - DNA, 343 bp, Oryza sativa
  unsure (1)..(343): unsure at all n locations
  Clone ID: PAT_MRT4530_38945C.1
gcggtagctttcatcggtgcgcggccgtaggcaggcggagcggtttcttctcanttttattattctacttccttgcttgctatcctatctttctccattttctcgtcaatctatcctcgatggaggtctgctttctctttcctctggatctcggggcccggttattgaggtttcttgtttgtacggtctatgaggttgtgagctggttgtacatgcagatcgtgcacatgatttagtttctgtcgttcgcctagcttatcgttaaagcactgatcttgatcgtcattttcatattgatgttggacaacattttttattttgtcaaatttttattaattttttg

SEQ ID NO: 34981 - DNA, 260 bp, Oryza sativa
  Clone ID: PAT_MRT4530_38946C.1
atgggcacggcggggcgcgaggcggcgttgcgcacagtcgagcccgccgccgctcgttcagccgagcccgccgacgtcggcaacgactacgatatagcaacaggtctcggcgacgatcattcaggccagattcttcccgggggccatatccgcgcgcgggaaaaaaccgcccgggccatacggcaacaaccgtggcaggggcgcttaatgggcgcagctatgaacacccggggctccccggagggggtcgcaccatcgcg

SEQ ID NO: 34982 - DNA, 407 bp, Oryza sativa
  Clone ID: PAT_MRT4530_38947C.1
gtcacaagcacgatggattggacaatgatttctgcgcatatgaccataacttgacgaaaactgttccatctagagagactatgactgtataggtgatcattcaacgggccaaattcaatttgggtcatgtacactttcttgccctacaactgctggcgctgccccttcatgctggactatattgtggctatatagaggaggagcctgacataggccattgggcctgagaccatgtcagtgatatttgtgaggctcagcctttcttacacaatcgctgctgcagtacacaccaaagctgggtctttatctgtgatgcctgtgatgccacccttggtccgttttggatgagtgcttaacttttggcacgactggctgcagtctcatcttacacacccaatgatgcttac

SEQ ID NO: 34983 - DNA, 399 bp, Oryza sativa
  Clone ID: PAT_MRT4530_38948C.1
ctacttcccgttgaggcgagcccaactccaacgctcaaccacgaagccaccacacgcccccgccatcagctcggtctgaccgaatatggctttggcggctcgggatcggcacacccagagcatgccatcccggccatatggctggccggtcagactggcatgtacccgccggtcagaccgccactgcctcctcttcctcgccatagggccgcggtagggctcgacggtggcgggcaacgctctcccctccaccggatctaggaggggaggcggtggcggcccagcgtctcggcggccccctccaccggatccagtgggaggggagcagccggtggtccggcatccctgcgacggcggtggcgattcagcggcgacggtggcaccctccctttccggcat

SEQ ID NO: 34984 - DNA, 219 bp, Oryza sativa
  Clone ID: PAT_MRT4530_38949C.1
aacaatgagcttaaggggcaagtggccaagctcaacaagagtttggagaggtgcttaaaggtggatgatgatgtggcatctttgcatgttaagcttaaggagttagtgggggataactttatagtaataaacccagaagttaggaggaaaatcagactaaagtgtgggagaaacatgtatccatacaaggatgggttgggaacttcatcaaaatactag

SEQ ID NO: 34985 - DNA, 408 bp, Oryza sativa
  Clone ID: PAT_MRT4530_3894C.1
atgtcgtccttctctgttgttgggattgtctgcacggcgtcatattcgagaggcgccagaagatcgatggtgacaagatgggtggcacgcagggagaagcttgtcggccagctgcggggcgtaggctccgaggaggtgcacaggctgtgggagctcgtggaggacttggtcggctccgttgcgcacgggaaaagaatcttgtcggcggctgcgcacgcggggaggacttcgctggctccgacactcttgggaggagaagctcatcgggggctacgcacacggggggaagctcgccggctgtcgcacacacgggatggacttggctggctgcacgcgcggttccaatccttcctcccgctcctctcccacccctccccctctcttcagtgcccatctcctttccgctga

SEQ ID NO: 34986 - DNA, 151 bp, Oryza sativa
  Clone ID: PAT_MRT4530_38950C.1
gaattatgtatatggtatctttggtagaatatatgctgcaacccacctggtaaagagtatgatgctgcactgccactgtgtaagactaagtggtgaagcatatatcagtgaacccatggcatttctcgttcaaaaaaaaaaaaaaaaaaaa

SEQ ID NO: 34987 - DNA, 2035 bp, Oryza sativa
  Clone ID: PAT_MRT4530_38951C.1
gcacgagggagagaactagcttgcaaagaacacctgaatctcatgatagtggacgtgtggaactgatgatatcaattacaagaaagccaagaatgtgttggctcttttagaggagcagtaaatgaagtaacaaaaaaattactctataatgttcctctgcagttccacttccacaaccaacaccccccacacacaaacatcaaactatgttctctccctttgccctgtatgtcacctacgcaattacgaagaatatcacgggctccaaaggtttcaggtggtgttaaaggtgcaactgtagtttcatctgcggttttacttgtacaactgaattggccatcagaatagccaatgcgaatcggaattagctgatgaaatgcaatgacatgtatctgcaatacacacctcaataaagcttcgtgaactcggctgtctggttaggttcaccaagtctgaatgcatccctttcaatcaggatctgcaaggagctcattgtcttaaccaaagatccccagatcaagggagcgcagcaaaatgcataggcgaacactgccaaggcccttacaacaccgtttaaataccatgggaatgccatcacgaagagagcaccgatgatccccaaccatgttgtgaggaccgcaagggggtggaggaggaatacattgatcacgattgaagaaaaggagaaagcaccaagcaaatatagtggccaacctagtagcggatgcaccgtccgtgggatcaggaagaagggtatggtgtaagctgcaagtatggaccatgctgccactactctgagtgttgtgagcaaaactatagtacttttctccattcttctgttgtagcacatctttgacaaactaggccgcgcaagtcgggtgactgcaatgactccaatgtaaaatagggcctggattaatacaaccggtagctccgatgaataccccaagttttcacggcgttgttcatgccaagaaagtcccagaggtaaaactggccaagaccaccaataccatggcttaaaccatggagcgctaggaaatgtaatcacgctgttcggcccacatggaatgctccagcggagtttcaaataatagtaagatgcgtccatttgatagcctaacggaagacgatatgttccttcaagtttggtaccattaactggtggatggaacattggtcggtcaagcaagtctgggaaatagctagcaaggaagccctgatctgcaccatctgggttatcacgcccaacagctagctcatgtagcatgttcttaaaaacgtccattgagggctgaagcacaaagagccctgtatggaagatacaagggttaatgaagacagcacagaactggccacactgaaataattcatcagtgttctggaggaaaatgttgtcagagtctagcataacaactcggtcataggaaactaggctccatgcatacagcttgttaagagtcaacttgaatcgcatgttgaagttcccttgtttttcataaggattcttcaaattctccacagagaccaccttcacaccatcatctttcagcgcctggacccagcgcggcgggacatcgagggaggcgatcacgacgcggtcggcgtccgacccgagcctcccgagggatcgcatcatgacgcgcgtggccacgtagaactcgtaatcccggggagtgcccatgtacatcatcgccgcgtacgcgtgccgccgcggagccaccgccaccgccaccgctgcctcctcacgcgccccctccgccgccgccgccgccgccaccaccaccaaagccacggcgacccaccaccagcggccgcagccccgccccatctcccggtagtgtgatgatcttggactcgaggatctcgccgaaggtggagaaggcggcttcgagggagcggtcgtcggtggcccaggcgaggccgccgacgaagcagcggtactcaacatccggcgccgccatgctttcccaccaaccccacgaagaagaaaaaaaaacgaaatcgaaccggacccgaaccgaaccgaaccggg

SEQ ID NO: 34988 - DNA, 540 bp, Oryza sativa
  Clone ID: PAT_MRT4530_38952C.1
atgaggaaagatgatggtgtgaaggtggtctctgtggagaatttgaagaatccttatgaaaaacaagggaacttcaacatgcgattcaagttgactcttaacaagctgtatgcatggagcctagtttcctatgaccgagttgttatgctagactctgacaacattttcctccagaacactgatgaattatttcagtgtggccagttctgtgctgtcttcattaacccttgtatcttccatacagggctctttgtgcttcaggtaggattacttgctatatgggtttctcctttcttctgcaaaatttcttttaactttctccatccctcaatggacgtttttaagaacatgctacatgagctagctgttgggcgtgataacccagatggtgcagatcagggcttccttgctagctatttcccagacttgcttgaccgaccaatgttccatccaccagttaatggtaccaaacttgaaggaacatatcgtcttccgttaggctatcaaatggacgcatcttactattgtgagtatcaatag

SEQ ID NO: 34989 - DNA, 366 bp, Oryza sativa
  Clone ID: PAT_MRT4530_38953C.1
ttctcctccccctcccggttcggttcggttcgggtccggttcgatttcgtttttttttcttcttcgtggggttggtgggaaagcatggcggcgccggatgttgagtaccgctgcttcgtcggcggcctcgcctgggccaccaacgaccgctccctcgaagccgccttctccaccttcggcgagatcctcgagtccaagatcatcaactatcgggagacgggtaggtccctcgacatcggtatccttagcttcttatgacgcacagggctggcctattcacagacaaactttgtgctggagaagtttcgactgtacttggagccagtgctgtttctgggttctttgcatcggcctgcagtctgcctt

SEQ ID NO: 34990 - DNA, 258 bp, Oryza sativa
  Clone ID: PAT_MRT4530_38954C.1
aaaattaattttaaaaccattattttaattacacatgtaaaggcagtaactataagcattttcttgcaaaagtacatatttagtaaacgttctagcttaaaaataagtcctttaagacaacaaatttataccattacgagaggggtgcacaccatgatatgagccaaatattccacggtgcgaactctaaagataataggtacttgccggactgtccgctttgaagttcagggcaggtggcccaagaacgaaatcaag

SEQ ID NO: 34991 - DNA, 189 bp, Oryza sativa
  Clone ID: PAT_MRT4530_38955C.1
atgggatcagttttgacgtggtcgtggatatacagcaacgacaacgaagtgatggtagctttgcctgtccggctgacacggtacgaccctagtcgggctgtgccgtgcttgggccaagccatgggcctcagatcatatggccatctatacttggaccagggctcagttttggctggagaaaggagatag

SEQ ID NO: 34992 - DNA, 364 bp, Oryza sativa
  unsure (1)..(364): unsure at all n locations
  Clone ID: PAT_MRT4530_38956C.1
ctcctgaaccagttgcttattgaacttgatggtgctggtgaacggaaaggtgtttttgttattggagctacaaacagaattgatgtgatagatgatgcagcacttcgacctggtagatttggcaagaaacattatgtacctttacctggtgctgatgagcgggtttcgatattgagagccctcgctcggaacaaaccgatctcctccagtgttgatttgggtgcactggcacgtagagaggaatgcaaaaatctcactggtgctgacctagcatcaatggtgaatgaagcagccatggcagcattggaagagaggctggagttcctggagaatggggnatcgtcaatgagctcatcatctgcga

SEQ ID NO: 34993 - DNA, 568 bp, Oryza sativa
  Clone ID: PAT_MRT4530_38957C.1
ctcaggcaaatgttggactaatattaaacacagcctggagtcttgaactgttaaggggtttaagtattcccagcgtacaaagtttttagttgtgaatataaaacctcaacatagttaacaagccactgttagacgataacaaatatgagcaaactatattgctcacatactgatgcgttgtatcattaaaaaaataaagcacatatgagcataatgtgtaatcagtcataaacagatgtgaaatgtaagtgcattctgacgacttcttgcatggactgttgctgaaggcctggaaatgtccaagatctgacagatgagttgatgaccccgcaacgaagaacactgacatgaagaatttcctgagccttgctccactagaaagcagaggtccttcaagacctttagcaagctgaaactgttattgatgacatcttcagagaacagcattcagtggattctgtattcaactattgatgtaggaggtagctgaccaatacaaatctcatgcactgtggacagaagaggaaacaattcttgccaccctcgataagtcaagacttcataaact

SEQ ID NO: 34994 - DNA, 479 bp, Oryza sativa
  Clone ID: PAT_MRT4530_38958C.1
agttgtcctacttgctgtacttgatctcacctgctttttgcagccacccgcacagacagcaaaatggcactctgcgtcaaggccaacaaggcagtctcctgcactgctgcccgcaagcaggtggcccgcgctggtgtggcccgcccagtcttggcacgccgtatggccgtgcaggctagcgcccagaaggagagcagcccagtggccgcacagctcactgcaggcctgaccgctgctgccgccaccaacatgctgatgcccctggcagctgctgctgaggtcaccccatccctgaggaacttcatctacagcctggttgctggtggtgccgtgctgggtgccattgccctggccatcacagccgtgttcaactttgacccagtgaagcgcggttaagccactcaacccagcagatgatggcagcagtgacaaggacagtcctgcagcgccgctgctgcctgccaggtggctctcacagg

SEQ ID NO: 34995 - DNA, 246 bp, Oryza sativa
  Clone ID: PAT_MRT4530_38959C.1
ttactgtgggttggacatgcgccggtaacgcttgaatggcgacgacggcgtgaaggatgctccggcgacggcaagaaacggcatggcaacggcgtcgacccccttccagactccggacttggcgacgctcatggcgcagcggctaggtcggagatgcaccggatcatcgggaacggcgaagcgaccgacggcggcgctctggacaccgaggacgccgacgagctcgacggaatgtgtttgatccat

SEQ ID NO: 34996 - DNA, 1383 bp, Oryza sativa
  unsure (1)..(1383): unsure at all n locations
  Clone ID: PAT_MRT4530_3895C.1
atgctgatgaacaccttgagccgctccgccgcctcctcgagcaagcgagagatctgggagggtttggaattggggagaggggtggggggaggcctcgcgctgcgtggagggttccgccggagggtgctcggagcaggcggagaagccgccgcgccagcgccggcgccggtgatggcggggctccttcaaattcatctcgactttggggcggtggcgctgctggtggtgctgaaggcggcggcagggtctgcggcgccgccgacgacgacgaggagcaggagcagcagcacggtggtggccgggatggtgttctgcgaccagtgcaaggacggcgccagaggcctcttcgactacccgctctacggtgcgcgggtggcgatcgagtgcggcggaggggagagcccggtgacggtgcgggagtgcaacaccaactggttcgggggattctccgtccgcatggagggcacgcccgagatgaaccgctgcacagcgcgcgtcgtccaggccaccggccactgcggcgccgccatccccaccgcccctcgcgacctcaccctcgccttccgcatgctcggcctcgccctctacaccgtccccccactcctctcccagccgctccgtcccatggacttctgcccatctccattaacatctccatctcctcccgccctcgcgctcgccccctctccgattccgactccaatcatcgcgccgccccccgtgtcctcgccggctccccctctcccgcccctctggcgccgcaggcctcgccgcctgccgcccatctggcgcccgaccccaccctcgctacccgttgacaccatgccgccgccgccgccgccaccgccaccgcagccgcagggctccgcctgcaccttcgacaagtgggcggacgttggattgcacgggtgcaactggaaggtggtgacgcccaacacgacggtggccatggcgttcggccccgccgcggcgcagaggtacggccccgacatgacgctgcgggaggcgctggacgggaggggagacatgtaccggacgctgctgcgggaggccacggcggcgctcctcaatgcctactacaaccccagtggctccggcttcctgtaccccaccaccgccagcgtcatcgaccacatcaacgccgccctcctcacccccacgctccacaagcttctcctcgagggtgcgcgcttccgccgcgccaactccgactccaacctgccctgccacctcaccccctgcaactaattactactcctgcttgcttactcgatcgctaatgcactcgtttttcattttattancctgtacgctaatgtattactagtgtctcgactcaatacttaattggtggatggattttaataaaaaaaaaaaaaaaaa

SEQ ID NO: 34997 - DNA, 240 bp, Oryza sativa
  Clone ID: PAT_MRT4530_38960C.1
atgcccgtttcacttgcaactatcatggtcctggtctatttggtgcaccgctctcctgccatcgacctgccccgtccagtgttgggatatgtacacggctccaattccacggcgagcacgcgcaccggcaacggcgaggacacgtcgatgacgatgacattggatgagcaagcaaaggcggcgaccacgaacgaatacaaattaattatgcaaagacggcaccaagaacacaattcatga

SEQ ID NO: 34998 - DNA, 189 bp, Oryza sativa
  Clone ID: PAT_MRT4530_38961C.1
ggaagaaaattatatgatcctaaagctggtggatgggaagatttggggatgtttgatgtgatgaagattttggggcgtggtggacgaccgaagtttgaaaaaagtggcgaaggaattattatcgggacacaggacaaattggtttactatttaagattattaaaaagtaagtttggaatagaaagcaag

SEQ ID NO: 34999 - DNA, 808 bp, Oryza sativa
  Clone ID: PAT_MRT4530_38962C.1
acagctgctttctttgtccgatggggagagaataacctccatcgttcctgtaaatgaatttggtgaagatcagtatcttgtgatgctgaccgttaacggttatatcaagaaagttcctcttaatgctttctcagcaatcagaacttctgggatcatttcaattcaactggctcctggtgatgagctgaagtgggttcgtcgttgtggggatgatgaccttgttgctttggcttcacaaaatgggatggttatagttaatacatgcaacgaagcgtgggcggacgcgtgggcgcgcccttggaaggaaaacaaggggcgtcctggcaatgaagctaaaggaaggtgacaagatggcatccatggatataattccagcaacgtcgcataacatgcctgaaacttacagcagagtcagagatttgagtccgccatggctgcttttcatagctgataatggtattgggaagcgtgtgcccctaaatgcattccggcaaggaaatttcaacagagtgggcttgcaaggctacaagcttccaccagactgtagcttagctgctgtatttgttgttggattttcacttactgatgacggtgaaagtgacgaacaggtggttttagttagccagagtggtactgtaaacagaatcaaagtcaaagatatatccatccggtctcgttccgcaaggggagtcattctgatgaggctggaacatgctgggaagatccagtcagcctcactaatatcagcagcagaagaggaggaagaacaggacccggagtcagcctcactaatatcagaagcaagaag

SEQ ID NO: 35000 - DNA, 1947 bp, Oryza sativa
  Clone ID: PAT_MRT4530_38963C.1
ttataatttcatcaatgcttttgacattgtaaaattaggggggcacatatatgagttgcaaattgcaaatttttgagcaaaatatggagtattggcatacagattatcaagataacaaagagttagagttggagtttgatcgcgtgatggttgctgaacaggagaagtaggaggaggaggaggtggtggagccggtttgagagttgttgttgccgatttcttcttcacagcaattctctttttttcatctgcggcttgatgaacatcttctccgatctcttcttcatccagagcttgttcaatagatggatccagggcaggcagatcatcggttagcttagtcttctttagtttgtccttcttctttggggctggagccgatgtatccacagccgatgacctggttcttctctttttaccggtatcagctggttctctgatgagcccttggagaagtgttgaagtcttgggggcatgataaccgatgacagggggagagggcccaccatttggaataaggcctggagcatactctatgtccataccactattgctctggttaggaggggagaattctatcgtctgaaggataacgtctggaaagagatctttcatgtacatagaagccgattgatggaacagatgcagtttccattcaccccaccatctgtcaaatgatctgctcctgaaccttgccagttctatattttcaatactgcctgctccaactactgagccgacggctatcttagccgatgcattgttcagcatttggtacaaatagccgaggaggatcttgcctaaggggaattgtctctttgattccaaggcctcggctacaaactgccagttggttgtagggccgcagcttgatccacagaagaggaatttctctagccacatcagtagaaaggctacatgctctcgaggagtgacagagccttggcccatatatgctgctacgtaacctgaccagccgcctatgctcttggtcctgaagtcatactgattcttcgtgttcagactcatagggttagccgatgaggtgacatccagaacggtgatcatggtgatatctattagagtcggggtcatcggcccttggttgaacaagaaagcattgatggtgttggaccagaaataggaggcggcggccattaaaggttcatctttggctgaattagctatggtaaggtcgagcgcttggccaattccgatttcgtcccaatgaatcctcttgctagccgacatacgcatgaaccatgtaatccagctcttctcgggtggagttttctcgagagatggccaagatttaaaggtattcttccagtgacctagatctgggttggctaacctgaaaggaatcctattggtttcgctgatgatgaacttggtaggatcagggttgccaactgggccgaggaagtaataattttcatgcgatatgcttggaattgcaactaggttggagagatggttcaatacaatctcggcgcatcgccacctttttactttcgttttgtttcgacgagttattgctttcgggttgagctgcattggtttcgatacgtcgggccgtgtcgtgccaccccacgggctgcacacacggcccaggcatggcccaataagacttgggccgtgctgggccagcccgaaggcacgacatcccatcatgctgttggcacggcccgacaaacggcgccgggcctcctccacaatctcctcggagaggtcaccggacaacacctccacaagccgtttaggaggtggcaacctccaagagtaacaagtcgtgccgagggtgcagcccaggcatagctcgactgtcaagccgggtgagcaccgaaccgagattatcttcgactcgtggaagacacgtaacctagacttgagctcatggatcctagtcccacagatagagcggtttagttctgactgagccaccat

SEQ ID NO: 35001 - DNA, 1983 bp, Oryza sativa
  Clone ID: PAT_MRT4530_38964C.1
atgtcatcctccgccagcccgcctgccgcgccatcagccgagtacgctgagcatctctccaacctagttgcaattacaagcctatcgcacggaaattattacttcctcggcccagtcggcaaccctgatcctaccgagtttatcatcggcgaaaccaataggattcctttcagattggccaacccagatctaggtcactagaagaacacctttaaatcttggccatccctcgagaaaacttcacccgagaagagttggattacatggttcaagcgtatgtcggctagcaagagggttcattgggacgaaatcggaatcggccaagcgcttgaccttaccatagctaattctgacaaggatgaacctttaatggctgtcgcctcctatttttggtccaacaccatcaatgctttcttgttcaaccaagggccgatgaccccaactctaatagatatcaccatgattaccggtctagatgtcacctcatcggccaactctatgagtctgaacatgaagaatcagtatgattttaggaccaagagcatagacggctggtcaggttatgtggcagcatatgtgggccaaggttctgtcactcctcgagagcatgtagcctttctgttgatgtggctggaggaatttctcttctgtggattaagctgcggccctacaaccaactggcagtttgtagccgaggccttggaatcaaagagacaattccccttaggcaagatcctcttcggctatttgtaccaaatgctgaataatgcatcggctaagatagccatcggctcagtagttggggcaggtggaccatggtggttattacaatcctggttgaatctgatggtcatgaaattcgtcaatcggccatctgtgacagaagccgaattcccaagactggagccgattgtagaagatgatggagaggaacgcacccatcgtagatgcacatcttatggagaatatgccacaccagccgatgcaggagcaaagctatcagctgaactgcttaaggactggttctgcagtttttatgatggctttcagaaagacgctcggatttggttctcctatgaagactcgactctcctggaaaatccatcggactttagatttgaggacatcaaccatgaaagatatcaaaagtccagagaagttttctcgcctgcaatcagtccatgcatcctccttgttggcattcatcaaggaaggaatattcaaatttcttatgagttctatcatccgatgagtgctgtcagacaacttgggatgggacaactaccaatcggtttgttctttgccaataaaattcaatgccgaggggaaatttcatcaaccttgatgatggatcgactgcttaatctccaagggcctcctttgggtagtattgagaatatagagttggcaaggttcaggagcagatcatttgacatatggtggggtgaatggaagttgcatctgttccaccaaccggcctcaatgtatatgacagatctctttcctgatgttatacctcagagaatggaatcttcccctccacatcaaagcaatagtggtagagatatcgaatatgccctaggtctaattccaaatggaggtgggccatctcctcctgtcatcggctataatgcccccaagacttcaactcttcttcaatggctcatcagagaaccagccgatgccggtaaaaacagaagaaccaggtcatcggctgtggatacatcggctccagccccaaagaagaaggccaaattaaagaagactaagccaaccgatgatctgcctgccctggatccatctattgaacaagctctggatgaagaagagatcggagagggtattgatcaagccgcagatgaaaaaaaaagaattgctgtgaagaagaaatcagaaacaacaactctcaaaccggctcctaagtcacaaaagttcccggatcgatggaacgaggaactagaacgcaatgctgatgattctgaa

SEQ ID NO: 35002 - DNA, 623 bp, Oryza sativa
  unsure (1)..(623): unsure at all n locations
  Clone ID: PAT_MRT4530_38965C.1
ccggccgggaactccatcttccacaacatcctccacactttcacacttttccactctcccaaaaccaacttcatcatacaaaatgcagttctctactctcaccactgtcttcgccctcgtcgccgctgccgtcgctgctccccacagcagcggaggcaacaaccccgtctgctctgctcagaacaaccaggtctgctgtgacggtatcctcaactgtcctatccaggttctcggcagcaactgcaatggcaactcttactgctgcaagactgacgcccctgttggctctttcatcaacgttgctctcctcaactgtgtcaagttcctctagaggaccagttgcattagcagctcgcagctctctctctgagtgctaggatgtgcaggatgggttgattggttggataatgggaacatggtgtggaggatactgacggggaaggcctctgctagctactccgtgtcaatagggtcttcacttctactataacttggctagacttatatactattatttccgaaaaaaaaaaaaaaaaaaacatccttcaccacaattcaaatattatagttgaagcatagtantagaatccaacaacaatgaagatcattttcggatttgctct

SEQ ID NO: 35003 - DNA, 498 bp, Oryza sativa
  Clone ID: PAT_MRT4530_38966C.1
ccccgactccccgtcctcctcccctgcgacgacggcggcggcggcggcggtggcgtggcggctctttgtcaaggtaatttatcctattcgcaaaactggtacatcaggagaaataaccaagtgaacgtgatagtagtataccactggtagtgcaccacggcaaagcgaggtgtcctgattcctgaacagcaggatgcggtttgcggtgacaaaagtatgtggtggtggggcaaaggcacgggcaggcatgctccagattgctggcagtaacattgaaacaccagcgctacttctgtccacacgcaaggggcttccagcatttgtgtcccgtgatctccttgcatccctctctctccctgactctctccttctccatgtgtgccctacccattttatggaaggccctccatcaaaaacaatatcaaatattggtggtttgcatcatatgttgggtcttcctgatcatatcctcatagccgcagctggtgattctattga

SEQ ID NO: 35004 - DNA, 192 bp, Oryza sativa
  unsure (1)..(192): unsure at all n locations
  Clone ID: PAT_MRT4530_38967C.1
actagtttctagatcgcgaggcggnccncacccgncgggtggaagccttcaagctttttggttcctttaagtgnagggnttatttggcgccgnctttgggcggaattcnntgggtcnttagcttggtttccttggggtggaaattggttaatcccggttcnacaatttccacaacaacatacgnagnccgga

SEQ ID NO: 35005 - DNA, 516 bp, Oryza sativa
  Clone ID: PAT_MRT4530_38968C.1
aaatgatttggcaagatcatttcctgtaccaagtgggatgatacctgtgggtggaactggttctcttttcaacctataaagatctgtgagacagccaagtacccaaccaactgtgccatcaccaccagcaacctgtcagaaagaactagtgcaaggatgttatgcaaagtagttggaagacaatgagtagccaacataggatatattcagtaaataaggaaagaacaaggacaccctgtcataaattattttataagtagataggatagtaaaggaagcaacaacctttcataagttttaacagatgctaatgcttgactactcaaacgtgcagagaactctaaacttataacaaatgcagtacccctaataaagtccattacacacgtaccataatcctcaatttttttcgaatggtctgcgcacaattgtcaccttgttcgggctatttctgctaacaacccaacccgttgttaatgaaatgcgaaggcttttcgaccgagagatcccagacct

SEQ ID NO: 35006 - DNA, 275 bp, Oryza sativa
  Clone ID: PAT_MRT4530_38969C.1
tacttcggcggctcatgctcgatccgcggccgaaaccctaggtggcggcggtgggattaggacctcctacactatacactccaccctatgtatcacctaaccccaccacactcgcctcttcatatcaacacaaatactcgcaaccactcatctcaaccccatttcctcctcttgcacgacatccccctctccccacctgccgcaatacccaagaagccctcaccccacctcctcgccaacaatttcgcatccctaacgcctacagcaacaccccc

SEQ ID NO: 35007 - DNA, 327 bp, Oryza sativa
  Clone ID: PAT_MRT4530_3896C.1
acgcatccaggcaagggtgggcgtgatggagtttggatgggccctgtgacggcctatgcggcttccggattcacctaggcacgagaggggactgcccgtcgcccgctggggacgggggtgaaacctgaggtgtggtgtgcttggctaaagggggttatgcgaaggatcctgtcacggcctctttccgacgtggatctgaatgtcaacattgtcgtttgtataccccggccggtcctggacggggattttaatgcacattctgcttggaattctattcgggaatttctgggcctgacagtgtgtatgcgtttggcccgtgtgatctga

SEQ ID NO: 35008 - DNA, 164 bp, Oryza sativa
  Clone ID: PAT_MRT4530_38970C.1
cgggctgcaggaattcggcacgaggaacagtgctcctcactgcaattgtaccacaccgctagtgggcacagatcggcccggctatatatcagtgagtgcgcacggaaacaatagacagtagtagtacgagctgcagcgctgtaggctagctagctgccaaccca

SEQ ID NO: 35009 - DNA, 172 bp, Oryza sativa
  Clone ID: PAT_MRT4530_38971C.1
gcgggctcatcaagcatttggtttaggcacggtccacaattaatacatggatagtgggtacgtctcgttggcagacactaacggaacagaaggggagttgtgggtacagcgttagccatatctttgtgcgtctttggaggcccaaagttggaaaaaaaaacagggagggggt

SEQ ID NO: 35010 - DNA, 1572 bp, Oryza sativa
  Clone ID: PAT_MRT4530_38972C.1
atggagactctcttctctgcaatcctaggagaactcaccagtagatccgtctccttcttgatagacagatgctcctcgaagccgtcatcgccgcctatggcggcgacgttcatggaggagaagattcagagactggaaaggatgctgctccggctcgccaccgccatcgaagaggcagaggggaagcacatcacaaaccaagccatgcttcgtcaggtcaacatgctgagacaagatatgcacaaaggctactatgctcttgacaccttcagaattcagaaacaccaggaggaggacatgaacgacgacgatgacaatgaagtgagttacaacaccttatctttgtctaaattcaactctatcaagcgagctcgagtccttactggtactagacgacatggagatatgagagagttcgatcagatggttgacatcatagagatcaccatggctggcatggctgagtttgttatgcttctgaacaactatccttccatgcatcgtcaaccatacaacacctacatgttcatggacaagtgcatgtttgggcgccaaatggagatggaacatatcatcaaattcttgttacatccagaaactccatatagtgacatatttgatgtcctatcaatcattggtcctgccaaagttgggaagagcacacttgttgagcatgtttgcaatgatgagagggtgcgcaaccacttctctcgcatcatctttcttagtgatagcgatttgagcgagcaaaaatcattgcttatcctaagagattcaggagtgataaggcataaacacaactcatcattagcttcaagtggaggagaaagattattggttgttgttgagctaactgaagatgtttccgatgacgaatggagaaggatgtactcctcttctcgaagttgcatttcagctggaagtaaaatcataatcacaagccgatcagagaagattgcaaagcttggaacaacacaacctcttcgcctaaaattcttgtctcgagaagcttactggtacttcttcaaggttctcgcattcggaagctcagatcctaaagattaccccgaggtggcatcggtatcaatggcgatgtttaatggatactttgatcgtgagatgtacaatactttcattggaccattcattgatctgaacaacatggctaccttcattcaagctagtatttacaatggcgactggcttagcctgcgtgagcgcttcaggaccaaggaatcaaagagccagttactgcctaacaaaggttcaggtgattttgggatgaagagcaagtgtgtggttattcctaggacagatggaaatgtgaactactactgtgaaatctttgaacattgccgagtagagcttgctcatgcagaagatcagaaggctccaaaaattggtatacaagatatcttgtcagggagagttgaacctcatgggaaatttgatcttgtgctgtggagatctcatttgccgccttattacagctacatatatagctccgagattcatgagttcaagtctgcaactacctgcaggattaggctccgtcagaagagaaagatttag

SEQ ID NO: 35011 - DNA, 291 bp, Oryza sativa
  Clone ID: PAT_MRT4530_38973C.1
atgtggctgaatcactggcggaagaccgtgtacatgcaccatccgaggttccttaggctgaatcatccgtaccgccaaaatacaagtgatttcgacgggatggtggaagagggagcacgtccaaagttcataatcggtagtgatatatgggatgaggtgaatgatctcgaagttttatgtggtaaagggagtggaagcacacctgcatccacatcaagcggtgagagccctctttggaaaaagaagtctatctatcgtactggaaagactcccgtcacgcagttgatgtga

SEQ ID NO: 35012 - DNA, 1818 bp, Oryza sativa
  Clone ID: PAT_MRT4530_38974C.1
gcagttgtgagccagcactgcatcagcatgatgagcagtcgtcttctcaaacgcgcctgcctcctcctcctcgtctcgtcatggctatgctccctctccgacgccaagaggaagacgccaccctcgccgccgccgccgccctcctcctttggcctccccgtccgggcggtgtgcctcggtggctggctcgtcacggagggctggatcctcccctccctcttcgacgccatccctaacaaggacctcctggacggcgcgcagctgcagctcaaggccgtggcggcggacgcgtacctcaccgccgccgaccagggcggcgccgcggcggtcgtcgccaaccggacgcaggcggcaccctccgcctcggagaccttcaagctgtggcggatcaacgagacgacgttcaactttcgggcgtcgagcggccggttcgtcggcgccgggagcgacggcggcgcggcggtggtggcggtggccgccgcgccggggccgtcggagacgttccaggtggtgcgcgacgacggcgacaagagccgggtgcggattagggcgccaaatgggcacttcttgcagatagcattgggatctaactcagtgacagcagattactacggtgaaagcacaagttggggagacgatgacccatcagtatttgtagtaacaaaagttttggagctgcagggagagtaccagatttgcaatggctatggtacagccaaggctacaccaatactcaggaatcattggagcacatacatagtcgaagacgacttcaagttcatctcagcaagcgggttaacagcagtgcgaattccagttggatggtggattgcgagtgatcccaatcctccggctccatatgtcggaggatccctgcaaaccttggacaatgccttcaagtgggcagagaagtacaagctgggcgttattattgatctccatgcggctcccgggtcgcagaacccatgggagcatagctcatccagagatggcacgcaggagtggggaacatctgatgctaacatcgcagagacagtgcaagtgatcgacttcctcgcatccaggtacgcaaagagcccaagcctcctggcagtggagctgatgaatgaaccgtttgcaccccgtgccaccttggagagtctgatgaagtactaccatgatggatacaacgccgtcaggaaatactcatcgacggcttacgtcatcatgtcgaaccgtctgggaccgcatgatccaactgagtttcttcaatttgccaacggcttcccccgtgccgtcatcgatgtgcactactacacggtgttcaatgacctgttcaataacctgactgtgcagcagaacattgattttatcaaatcaaacttctcaagtgagctaaaaaatgtcacaacacaaaatggccctctcacctttgtgggagaatgggtggctgagtggagagtacccaatgcaacaaaggaagagtaccagagatatgcaaaggtgcagatggatgtttatgggcaggccacctttggatggtcctattggactctcaagaatgttaacaaccactggaatctagagtggatgatcaacaatggctacatctccttgaaaacctaacaactgacatgcctctagctgccattgttacgaggtaatctcgatgtctgaaggatgttgcttatctctcttagattttacttctggttaaaaatgtcttgaaaggagccgtattcatgttgagttttcaagttgaactgctgcatggaagttctccgtagttttgatgtcgaatgtatgcaccacttatattaaattatgtcatatgaagtc

SEQ ID NO: 35013 - DNA, 408 bp, Oryza sativa
  Clone ID: PAT_MRT4530_38975C.1
ctgtcatccgacgacgaggaggagatcaaccaccaccccacgcacgccacatctccacccaccaacgcggctgcctcctcctccgcctacaggcgcgctggattggacaatattccccgcctcgactcctcgagccatccagggcctgatttcgtggcggtggacaagctcaggatgatgccctgctgccacaccttccaccagcgctgcatcttcgactggctccggctggcggctgcgatgcatctgctctctctgccgccgccccctctgcccacacagcacaacaggaggatgataagattgggtgcccggagccaggggcggagccagggtcggaatttcttcagccttcagaagtggcttccactgcaacaacagacaaatcacgcgcaggggaattgctaa

SEQ ID NO: 35014 - DNA, 1310 bp, Oryza sativa
  Clone ID: PAT_MRT4530_38976C.1
tagaattcagcggccactggacgctggtgctgggtccacctgagggatggatatctactgagatagttctctgctccttgctccgagcaagtgaacagcatggaggaaggaggcaggagagggatcccttctctgctaaattcatcgtcatcagatgaacatatcgccactgatatcactcagcttgtaggatggacgccactgatagagctgaaccggatcgtccgaaaagacggggtaaatgcccggattgttggcaaattggagtcataccaacccctctgctctgtcaaggatcgcagtgctctgagaatgattgaggatgcagaggagaaaggtctgatctcaccaggcgttacgacgctagtcgagccgacaagtggtaatcttggaataggtgtggcatacaatgctctgctcaaaggttacaggttcgttgcagtcatgcctgctgagtattcacttgataagcaaatgttgttgacgtatctaggggccgaggttattttaactgatcctacacttggttttcagggacaattagacaaagttgaacagatcaagaatgatatgcctaacgtacatcatcttgatcagtttaaaaatgcagcaaatcctgaagcacactttgtatggacagggcctgagatttggaaggatacggcaggcaaagtagatatctttgtggctggttctggcacaggaggaacaatttcaggtgtagggaaatatttgaagatgaaaaacccagcagttaaagtaatttgtgttgagcctgcggaaagccctgtaatttcaggtggtaagccttcgcggcataaaattcagggaatgggtccaggctttgtaccaaaaaacctggatatctcaatcgtcgatgagatcatcacagtaactgcacaagatgcaatggctaatgcaaagaggctggcaagagaagagggtttacttgtgggcatatcatccggagctaatttggcagcttgtctgaaggtggcatcgaggaaagaatatgagggaaagatgattgtaaccattttccctagtggtggtgaaagatacatgaactctgacctctttgcacaagcaagggaggagtgcagcgccatgaccttttgatctcatggctttttcagttctattctactctgtatggaagccaaggtggcttgtacactgatcagtgagcagagtgtgggggaaaataaagaaaagccggatgtgttgtacttgtttgttgtatgaaaatatgaaataagaggacaagccatttattattttttgtaaagaagactaaaaaaaaaaaaaaa

SEQ ID NO: 35015 - DNA, 134 bp, Oryza sativa
  Clone ID: PAT_MRT4530_38977C.1
accacgtgtccgtccacgcgttcattaggtagagcgtgagccgttagctgatgcgcttgtactggactctgggctacaactgatgcatcaaagcccacacaggggtgtacgctaccagcgttagctctaggatc

SEQ ID NO: 35016 - DNA, 2157 bp, Oryza sativa
  Clone ID: PAT_MRT4530_38978C.1
atggcgatggcgatggcgctgctgctgctgctgcttctgcagctgtggtcggtggaagcgcaggtcgcagcgccgccgccggcgagctgcccggacaggtgcggcgacgtgagcgtgccgtacccgttcggcatccgcgacggctgccacctcccgggcttccgcctcacctgcgacgccacccacaccccgccgcgcctgatgctcggcaacggcaccctccaggtcgtcgacatctccctggccaactccaccgtgcgcgccctcgacctcgccggcgccgtcaacttcacctacgacgtgtcgaagctcgcccccagcggcagcggcacgtggtccagcctcggcaccgtcgccggcgccggcccgtacgtcgtctccgagcagcgcaaccggctcgtcgtcacgggctgcaacgtccaggccacgctcgccggggagaacaccaacatcatcggcggctgctcctccttctgcccggtcagcgagatgttcaccagcgtggcggcgaccgtccccgtcgtccccggcgccggcgccgacaacgccaccgatggcggcttcatctgctccggcaccagctgctgcgagacgcccatcgccatcggccgcccctcctacctcgtgcagttcctcagccttgaccagaaccaggagctcaccggcaagctccccgtcgccgtgcgcatcgccgagcgtgggtggttcgagggcgtcgccggcgagctgctcaacaccagctccgactccgccgccgccctccggacgccggtcccggtggtgctggagtgggtggtgtcgccgacgctggaggcggtgctgcagggcgtcaccgggcagttcgccgacgaccgcaactggtcgtgccccgcggacgcggcgaggagcgcatgccggagcagcaacagcttctgcagcaacgtcaccggcaactaccgccgcggctacgtgtgcaggtgccggcgaggctacggcgggaacccctacgtcgccggcggatgccaagacatcgacgagtgcaagctcgccgggaggtgctacggcgagtgcaccaacacgccgggagattaccagtgccggtgcccgcgcggcgctcgtggcgacccgcgcattccaaacggctgcgtcaaaactaatctaggtttaagtgttggtattggagttggcagtggagctgggcttttggtaatgggactgggcgctgcctttttaaaacgtaaggttaagaaacagagagcaagaatgctgaggcagaagttcttcaagcagaaccgaggtcatttgttgcaacaactagtgtctcagaaggctgacattgctgaaaggatgatcatccccttgtcagaactggagaaggccacaaacaattttgataaatcacgtgagcttggaggaggggggcacggcaccgtgtacaaagggattttatcggatcttcatgttgtcgcgatcaagaaatctaaggaggcagttcaaagagagattgacgagttcataaatgaggtagccattctctcgcaaatcaaccatcgtaatgtggtcaaactttttggatgttgtcttgagacagaagtgccattgctggtttatgaattcatatcaaatggtaccctttaccaccatcttcatgttgaaggaccaatgtcattgccatgggaagataggctcagaattgcaaccgaaaccgctagagcacttgcctaccttcactcagctgtgtcgttccctataatccacagggatatcaaatcccataacatcctattagatggttcactaacaacaaaagtgtccaattttggagcttcaaggtgcattccagctgaacaaactgggataacaaccgttgttcaaggaacactaggatatctggaccccatgtactactacacagggcgtctcactgagaaaagcgatgttttcagcttcggcgtcgttctaatagagttgcttactaggaagaaaccatactcatacagatcgcctgatgatgaaagtcttgtaacacatttcactgccctactcacacaaggcaacttgggcgacatacttgatcctcaggtcaaggaagagggaggcgaagaagttaaagagatagctgtgttagctgtggcatgtgccaagctgaaagtagaggagcggcctactatgaggtag

SEQ ID NO: 35017 - DNA, 1643 bp, Oryza sativa
  Clone ID: PAT_MRT4530_38979C.1
gcacgcggcgccgcttcgcctcgccgcgtctccacgccgtcgtcgtcgacctcaccggcggctgcctccctacccccacctactccggcggcggcgcggcggagaagcacatcacatcatggctcctcctccgcactcggactctgacctgctcaagccgagagacgtctgcatcgtgggcgtcgcccgcacgcccatcggcgccctgctcggctccctctcctccctccccgccaccaagctcggctccgtcgccatccaggccgctctcaggagagcaaatgtggagccggcgctcgtgcaggaggtcttcatggggaacgttctcagcgccaaccttggccaagccccggcgaggcaagccgccctaggcgccggcttgcccgacactgtgccctgcaccaccgtcaacaaagtttgctcctcggggatgaaggctgtcatgcttgcggcgcagactattcagcttgggatgcatgatgttgttgtcgctggtgggatggagagcatgtccaatgcccccaaatatgtcgcggcagcaagacgggggtcacggtttgggcacgacgtcctcatcgatgggatgctcaaggatgggctgtgggatgtgtataatgatttcccaatgggaatgtgtgccgagttgtgtgcggatcaacactccatttcaagggaggagcaggatctttatgctatccagagcaatgaacgtgcaatagcagctcgtgatagcggcacattttcttgggaaattgctccggttgaaatttcttccggtagagggaaaccaccacttattgttgacaaggatgagagtcttgcaaagtgcacctctcttccttctcgtttaccttccaaaattcgcagtgatggtgctgctgcaatcgtgctagtcagtggacagaaagccaagagtcttggccttcaagttattgcaaggatcagagggtatgcggatgctgctcaggcacctgaattatttacaactactccagctcttgctattccaaaggctgtatcaaatgcgggtctccaaacttcacaaatagattattatgagataaacgaagctttctccgtcgttgctttagccaaccagaagcttcttggtattccttcgggaaagcttaacctaagtggtggtggtgtttctctgggccatcctattggttgcagtggtgcgagaatcatagtcactttgctcgggattcttagacataaaaatggaaagattggggttgctggagtttgcaatggaggtggtggtgcttctgcccttgttgtggaactcatataagcaaccatcactatttacacgttcctcgttgtgaagttggcgcgagcaaaaatagcacaaagctgaactgtaaagtacagtagctctatgttttcatcttatattacttaattttactgggcgttcatccatgatgtacaatgatagaaggaacgttgtaaaaataagatggctgtgcactaccgcacgagtcttgtataacttgtatagcggccatagcaataataagggaaaagaaggccagaggaataaaaaaaaaaaaaaaaaaaaaaaaaaaaaaaaaaaaaaaaagcaaaaaaaaaaaaaaagtaaaaagcttaagggtgacagtttaaatgaagttcaa

SEQ ID NO: 35018 - DNA, 1619 bp, Oryza sativa
  Clone ID: PAT_MRT4530_3897C.1
aaaataatccccctcctccctttgggccaagtctggcccaaagtcctccctctctctctcggcccagcccaaagtctccctctcctccctctctttccctcctctccagggcctctcctccccctccgggccaagctccttcccctcccttttttctcccgggcctcccctcctgggccggccgcccggcccaagccgccccctgcccgagccagtcgcgtgcgcacgcgcgccgcacgcgcgctgacgccgcgcgcccgaccggtgggtcccacccacccggtcgtcgtctccttcctcccccagccggcctcttctctctcccgtgcaaacctagcgccgttcctcctccaaatctgccccattcaagccggctctgaacgcccgcgccaactccggccaccttccatggccgccggccgcctttaccgccgccgttccgacctccccggtggccggctccctcccccatcctataaaatggaacccactctttgcgttctatcattttagcctcctcccgcgtcttcccgtggccgcaccacctctccccgccttctccttctctctctccggcgccggccggcctccagccgcctctccctcctcgcccgagcaccgtccggccgcgccgtcttctccctcggcctcgcaggtgcatcctcttccccggcgccgcctccgattcgtggggaaatcgccggagacgcgcccccaccggcgacagtggcggcaacgccactgttccgcctccggccgcctctgccgcgtctcccgtgcgccggccgacgtcgccaccacctccctcggcactgtgacgttgtccactcccctgtcctcacctcctccttgcccaaatctcgccggaacgaagtcctcgccggcatccagtacatcccctcacccggccggctactgttcctcgctagtgcaccggtcgacgtcgtcgccttcccttccggcatcgcagcggcaaggtcgtcctcggcatcgtttcccctccatccaaacccctccgcggtccatcatcgtcgtctccgttcgttctcgtcgtcgacgtcctgtcggtcgcccggctcgtcgtctcgctgcgtcgccaccgtcatcgtcatcgcagcggcgtgttccacgccgtcctcgtctccgtgcagccgctgccagctgccctcgtcgcctcctcgccggccccggcgtcgtcgtcgtcgtcctttcgtcgttcccggtcatcgtggcgttcgtccctccgtcgagccgtcctcgtccgtcctcggtgtttcatcaaggtcgctgcagcccccgtcgtcgtcttcgtcctcggctccgcgtctcaagcctcgtgccggccgcgtctcgccttcgtccaaggatcgccgccgaagtcgtcccctcgccgttcgtctctgtcgttcccggccgcctccgccgcgcccgttcgtcgttgtcattcccacgcctcgtcgcgtggtggtaaggatccctatccctcgctgcaccgtcctcatcctttcggtgtcgcccgtgcccgttgtgcggttgtcggccccggtacccgtgtatcggtgtcggcagtcgttcgccggtctaccgcggtcctttaggttgacatgtggggtccgcat

SEQ ID NO: 35019 - DNA, 2238 bp, Oryza sativa
  Clone ID: PAT_MRT4530_38980C.1
ctgcaggaattcggcacgaggcctggcaactctgtatatatatatttttcccttctgtatattaattgccatccatcgcagtgcttctcgggcaggttctactcctatatatcgtctcgcttctctctctcgatctcaggtcaggggcgctagctggccactggcgactcacacagtcacacacacacacactctctcgtccttgctgctagctatctatcgctgcttgccccggcccatgcatgtgagctcacttattatagatcgatcgccatagcctagcttggtggtggtggtggtgatggaggcggggacgtgggcggtggtcgtggcggccgtggccgcgtacatggcgtggttctggaggatgtcgcgcgggctgagcgggccgagggtgtggccggtggtggggagcctgccggggctggtgcggcacgcggaggacatgcacgagtggatcgccgccaacctccgccgcacgcggggcacctaccagacgtgcatcttcgccgtgcccgggctggcgcgccgcggcgggctggtcacggtgacgtgcgacccgaggaacctggagcacgtcctcaagtcccggttcgacaactaccccaagggccccttctggcacggcgtgttcggggacctcctcggcgacggcatcttcaactccgacggggagacgtgggtggcgcagcggaagacggcggcgctggagttcaccacgcgcacgctgcgcaccgccatgtcgcggtgggtgtcgcggtccatccacagccgcctgctgcccatcctgtccgacgccgccgcggccggtggcggtggcggcggcgccaccgtcgacctccaggacctcctcctccgcctcaccttcgacaacatctgcggcctcgcgttcggcaaggaccccgagacgctcgcccgcggcctgccggagaacgacttcgcctcggcgttcgaccgcgccaccgaggccactctcaaccgcttcatcttcccggagtgcgtgtggcggttcaagaagtggatggggctcggcatggagaccacgcttgcgcgcagcgtccagcacgtcgaccgctacctctcggcggtcatcaaggcgcgcaagctcgagctcgccgccggcaacggcaagggcgacgcgtcgtcggccacgccgcacgacgacctcctgtcgcgcttcatgcggaaggggacctactccgacgagtcgctgcagcacgtggcgctcaacttcatcctcgccggccgcgacacctcctcggtggcgctctcctggttcttctggctggtctccacccaccccgccgtcgagcgcaagatcgtccgcgagctctgcaccgtcctggccgcgtcgcgcggcgccgacgacccggcattgtggctcgccgcgccgctcaacttcgaggagctcgaccagctcgtctacctcaaagcggcgctctcggagaccctccgcctgtacccctccgtgccggaggactccaagcacgtcgtcgccgacgacgtcctccccgacggcacgttcgtgccggcggggtcgtcggtcacgtactccatctactccgcggggcgcatgaagacggtgtggggcgacgactgcctggagttccggccggagcggtggctgtcggccgacggcacgaagttcgagccgcacgactcgttcaggttcgtggcgttcaacgccgggccacgcatttgcctcgggaaggacctcgcgtacctgcagatgaggaacatcgccggcagcgtgctcctccgccaccgcctggccgtggcgccgggccaccgcgtcgagcagaagatgtcgctcacgctgttcatgaagcacgggctccggatggaggtgcgcccgcgcgacctcgccccgatcgtcgacgagctccgcggcgccggggagtacgccgccgcggcgcgcgccaccgcggcctgcgcttagaagatcccgggcgttcgacgaagtcaattggaaatggcaaaaaaatatgtagatagatgagagtccaagatagtaattactaaagggtttgtatggttggtgaggtcatttaaatcacttgcttttacagttcattaccagtcgatagaggaaatgtctaaagaaaactccaaacctaagattcttagatcatgtagtactatgattttggttgtgcagccaccaaaattaaggagcaataattaataattaatctcctgtgtgtaacccaaaaaaaaaaaaaaaaaaaaaaaaaaaaa

SEQ ID NO: 35020 - DNA, 3237 bp, Oryza sativa
  unsure (1)..(3237): unsure at all n locations
  Clone ID: PAT_MRT4530_38981C.1
aatggcgaggcggtcctgcttcttcttcctcctcccgctcctggttgcggcgctcgcggggagcccggtggtcacggcccagcggaatgcgctgccggcggcggcggcggcggcggcgagcgtccgggtcggggtgatcctgaacttgacgtcggcggtcggggtgaggcggcgggtcggcatccagatggcggtggaggactactacgccgcgaaccccgggtcggcgacgagggtggagctccatttcagggactcggccggggacgtcctccccgccgcttccgccgcggtggacctgatcaagaatgtgcaggtgcaggccatgatcgggccaccgagctcggcagcgaccgagttcgtcgcccacatcggcagccactcccgcgtccccgtgctgtcctactccgccacctcgccgtcgctgtcccccgcgcagacgccgttcttcgtgcgcgccgccgtcaacgactccttccaggccgcgcccgtcgccgccgtcctcgacgccttccgctggcgcgccgcggccgtcgtgtacgaggactcgccgtacgggagcggcatcctcccggcgctcgccgacgcgctgcagggcgccggcgccaagatcatggaccgcacggcggtgcccgtcgacgccaccgacgaccgcctcgacgcgctgctgtaccgcctcagggcgatgccgacgcgcgtgttcgtcgtgcacatgctccacaacgtcgccgggaggctgttccgccgcgcgaagatgctcggcatgatgtccgacggctacatctgggtggccaccgacggcgtcgccacgttcatggacaggttctccccggaggaggtcgacgcgatgcagggcgtggtcagcctccggccgtacgtgcaggagaccgacgccgtcaagaacttctcggcgcggttcaaggcgaggctacgccgggatcaccccaccgtcgacgatgtccgtgagccgaccgtcctgaggttctgggcgtacgacacggcgtgggcgatcgccgcggcggcggagtcggccggtgtcgccggcccggcgttccagacaccgcagacgagcgcgccactgacggacctggaccggctcggcgtgtcggccaccggcacggcgctcctcaacgccgtcctgagcacgacgttcgacgggctcgccggcaagttcaggctcgtcgacgggcagctccagccgccggcgtacgaggtcgtgaacatcatcggcaagggcgccaggacggtcgggttctggacgccggagttcgggatcacgcaagacctgaacgccggcagcgccaagacgctgaggcaaatcctctggcccggcgagccgcgcgacacgccgagaggctggaccgtgtcgccgagcgggctgccgctccgtgtcagcgtgccgacgaagcggggcttcacgcagttcgtcgacgtcggcaacgtcacggcgaccgggcggcgaaacatcaccggctactgcatcgacgtgttcgacgaggtcatgaagattatgccctatccggtgagctacgtgtacgacccttaccccgatagcccggaatcttacgagaagctcgtcgaccaggtgtcgtcacagaaggcagatgcggtggtgggggatgtgacgatcacggcgagcaggatggaggaggtggacttcacgatgccgttcacggagtcggggtggtcgatggtggtggcggtgcaaaaggagacgagcacgagcatgtggatcttcctgcagccgctcaccaccagcctctggctcgccagcctcgccttcttctgcttcaccggcttcgtcgtctgggtgatcgagcaccgcatcaacgaggagttccgcggcacgccatggcagcagttcggcctcatcttctacttctccttctccaccctcgtcttctcccacaaggagaagctggagagcaacctgtcgaggttcgtggtgatcatatgggtgttcgtggtgctgatactgacgtcgagctacacggcgagcctgacgtcgatgctgaccgtccagaagctgcagccgacggtgaccgacgtgagggagctcctgaggcgaggcgactacatcgggttccaggaggggaccttcatcgtgccggtgctcgagaagatgggcttcgaggggaggatgaggagctacagcacggtggaccagtacgccgacgcgctgtccaaaggctcggcgaacggcggcgtcgccgccatcttcgacgagatcccctacctcaagctcttcctctcgcagtactgcaacggctacaccatggtcggaccaatctacaagaccgacggcttcgggttcgtgttcccgagagggtcgccgatggtggcggacgtgtcgcgggcgatcctgacgctggcggagggggagaagatggcgcagatcgagaagaagtggttcggcgagcccggcgcgtgccagagccagggcagcgccgtcggctcgtcgaacctcagcttccggagcttcggtgggctgttcctcatcaccggcgtggtcaccagcgccatgctcctcatctacctcgccgtcttcttctaccgcgagcgcgacgagctccgtgcggcggaggcggccgccgccgcctccggctccggctccggctccgggagccggtcgctgcggcggctgcgcgcgtgggcgcggcactacgaccagaaggacctcaagtccccgacgttcaagaggaggtggagcgacgagtccgtgaggaatggcagcgagtacgccgcgagccggacgccgaggtggggcgacgagagcccgtgcaacgtcgccggcgccgccgacgccgacgccggacggatcccggaggaagtcgtcggcggcatgagcccgttcagcatctccacgagctcggaggagaggaacggcgccgtgtctccggcggcggcggagttcgataactcgtccgatcgggcagcggtggtggcgggaacatctcaaccgcggtagatgtacatgtgacatggcaagttctcccagtagacgtgtccggtaggatatgaacattgacaggtcaagtacaagtagtgtgcaaccgtctcctcgcctgtagatngatcctagtactactgtactactaccagtagatgagaaaatcagcaacttgaccgatgaagcattggcagtggctttgtaaagtgtaatatggcaacaataatatgtgattaatgtagatgtattttgggaatcaaatacatacatgaaagcatgttcgtcgg

SEQ ID NO: 35021 - DNA, 480 bp, Oryza sativa
  Clone ID: PAT_MRT4530_38982C.1
gggcaaaattaagcctggtacgtaacaaaggttttttcttaaacccccgttccgggccgggcttgcttacagatacatacggggcctccattttttttacaacctttcccacttttcccctggaggtcccaaataaaactggcaacagacgccggccttgatcattttatatgcatgatcgcccctagtcgtagattggaaattggacaacgaaatcaagaacaatttttcaggcgggtggtcgatcttttgtttaaaaggaacattggggttttccttaccccgtcccgctggtgctcctgaacaagctgagcgccttggggggcttgccgggcaaaaccagtttggggtaccccccccccaaaaacgccccgatcaccggccccacccaaaagatccagggggtttttcaagctgggtgctggttgtacaaaacgggggggcccagggttctcgccgggtttatgcccctgccgggga

SEQ ID NO: 35022 - DNA, 345 bp, Oryza sativa
  Clone ID: PAT_MRT4530_38983C.1
ctgtctttcttgccctaaaagccaccattggccgctgcctctactgggaacatacacgccaccatcccatagcctcacaccttctcaactatacacactccataatcatcacacgcacactgacttattaccactgctttactcaccgaaaatattacaaaccacacatagagagacggattacttatatgcaaaaactctagacaagatagatgatactccaaaaggatgcaatcttagaaatggagtacttacactggatcatttacaattccctatccgataagaagagtagagcgacaagggaccaaatgtacaaacctgccgttgcccactgggtagcct

SEQ ID NO: 35023 - DNA, 202 bp, Oryza sativa
  Clone ID: PAT_MRT4530_38984C.1
gtttttgctaccgactatgacgatctcggtaggggggtttttgcgtgccatgatggagactcacatcgtgtgcgacattattggttgagctactagccactagatttgaaaactactttctcctccagaaagctgcagcggatgaccaccagtggtgagatgaagaggctcgcgacgaccatggaggcgatgtccctgatgg

SEQ ID NO: 35024 - DNA, 170 bp, Oryza sativa
  Clone ID: PAT_MRT4530_38985C.1
tcgcgatctagaactatgtcgggaagagcacctttatgcgctggctgaccagtgtctacggtcttgccgactgaccatgaaacctgaaaggttcttgctccttcgtaccttgagctacccatcctgttgctattggtggcgaagaagatgacctgattctgcctgaagct

SEQ ID NO: 35025 - DNA, 634 bp, Oryza sativa
  Clone ID: PAT_MRT4530_38986C.1
cagagaacgaattcttgcgagaatgtatggggcaattttctggggtttttctcattcaactgaatgtaaaccttacaactgaaataaagagctaagacaactacttatactcaacaaacaaatttggaatccgaggctaaaatcgcgccatcccacgatccgctttttctgaactccacgcacacacgcacgccactcccagcgctcgactcggtcacgatcaactgattcgcgacttatttgcatctctaacaaactcctgctagactaattcgtcctcccgatcagctccgagagaatcggcttgcattgggccacagctgaaataaatcaacaccgccggcagagtgctagcacctcatcctgtcctccctttcgcctctgcatccccctgggtcaccagcagtgtcatcggcgtcgggcatcctccttcctggtcctggtcctcgtcggtgcccgcgggggaggagctcgctggccagccatgcgcggggggatagttgtcggccgaccatgtgcggggggaagagatcgatagccggtcgcgcccggggagaggagtcgtcggccggctacacgcgggggaaggacctcgccggctagcgctgcgcagcctcgtgccgaattcctgcag

SEQ ID NO: 35026 - DNA, 3429 bp, Oryza sativa
  Clone ID: PAT_MRT4530_38987C.1
ttaggcaagtgatgccaacttcttctccagccgctttgctgatcggagggcctccagagcctctgtctgtttcccttcacgcttcaagtttagagccttcagtttctcagccttaatatgttcctcaagctgggtcttctcactctgaggcttggttgtagctgccacagttggctttgcctcagctttctttgaaggctgtgcgttagaagattgcgcggacagatcagcatcactccaaccaatcgattttaaggcagacatgatctgcggatcaagaagatcctccacagctgcatcgtttgcgtcagacgacttgcctccagaaacctggctttctgattcttccagttggctctccagtgacttagccaactcgaattccgcatctgcttctgcggtctttccttctctccgcaacttgagcgcattgcgtttgtgagcaagggattcacgttggattttgagacggtctcgactagacaatgctttcggaggctgaactggctttatttcttgtgctggaggggcagaggaaatgtcatcggtacagctcttggcactggcagattgttggatcaagttggtctcttgcacaacgggtttcattgattcatccctaccatttgcactgttctcttgagagacttcaagacgtttttctaagagttttgcctgtttcaattcttctctagcttctgccattttaccttccctcttaaaagcaactgcttttctcttatgatgtaagatttcatctttgagagtgtcatgtccgtgcggaatctgaggttctttatgatcatgtacatcagaaggtgaatgcaatctttctgctgttaccagcggatcagtaaaggatggccgggacaaggttgaacgtgttccttcagaatgaacttttgatgcatgatctggtttaggaatgattagttcggtcggtggtatgctttgggaactagcttgagcatccagagatgcagcaagttcagcagcatgcactggcaacgaaataactccctccgttgcatttcttagtttaggcaggtgtgcactagtatcaggactggaggcaggatcaagtagagcaccagacttatttcccctaatttgtccagcagaccttgcactttgttgactagcagtcaagttaactgactcttccatctctgacagttgctgctccaagacctttgccttctcaagttcctcctcagcttctgtgttctttccttcccgtctgaatgcaagagctttcctttttatagcaagtaattccttctgaatctgacccttgctctttgttggtttttgagaaactatacgtgaactatttgatggcatattaattatgctcgcagtgtcagcatcctcatcttcccatcccatatttttcagcacagataacaatgctggatcctgcatgtcattgtcagttacctcaggttcatacccttcatcagcaagatccagagttggaggttcaaccttatatgggggagttgacccaaagttcctattttccttgaccacaggtctcgcagaagaattttcaaggtcttcaagttgcttctcaagaacactgcctttctttaactcttcctcagcctcatccacctttccttcccttctcaacgctagtgccttctttttcaaggccagcagttctctctgaattgcaagcttagattttggtgctgacacaggccgggtattcatctctgcgactgtgatatcttcagtgcgtgtgctcctgtgtccttgtggggaaggaacttttgattctgattgttcagtttccaaatccttctcgaggagctttgccttcctaagcaatgacatggcctctgcaacattaccagccttcttctgtgcaatagcctctcttttaagagcaagcacttgctcctttaatgcctcttgattcaaagaagaaacaggaccatgaccttccatttgtatctcgtcctcttcactccagccaaatgattttagtgcagcagtcatatctgggtcattcatgtcatcatctgtaatatcaaagttgccatcgatgagaagatcatcagaggtgcccagtagtttttcaaaattaaaatcagggaatcttggattgtccaaaagaatgtcatcctgattgccatcgtccatgttacgaataagtgcagccaaatcatcatcagactcgtctgcttcacccagaatctcctgctcttctagttgtctttccaaaattttagccttcttcagctcttcctttgcttcagcaagtttaccttctcttttcagcaacagggcctgtcttttcagagcattaacctgagacttgtctatactactggttttgttgccctctgatgattttggtgttacctctctaagaatctgtgacaactctccttccacactcatagcagttgttcttgtttcatcatgaagatctgcatctgaccagcctaaatctttaagttcagaggcaagatcattcttttctttcctaacccttttcccaggcaaagactttttcgattcagcctcatcagaaccctccagattcttggtactaaccacagcacttacactgggagcttttgtagccattctcctgttctttctcaattctaaccccagtgcggcggcttgcctctcaagctctttaccatgcttgaaagcccgaagtgcttcctcaggtttaccttcagacttcagagttttgtacttttttttctcttctactgcttgctggcgcaattcctctggggtaaaaattgatccagtattgttgagttcataattttgtgcttcaatagagaggctctcacctccattaccatccatactgaaagcaccagaagttcttctggaactggaactagaactagaggcgccaggaagctcaggatccagggactccctgcgagaaaacttggtctgcattccatcccctccaagaatttcactaagaacatcatcctctgggttagaagctgctttagcattagcttttgaagctctgtttttgtgtccatatctcagctcgtaacgtgctgcttcttcaagctttttgcaaggatcacaaattcgaacaggtgaatcaccctgtccacgtaaaaccatcctctgctgggtacagttgctgcagaacaaacctccacatctttggcaatgatgcttcctagtgaacaaggagaattgaacagagcaaccctggcagtgggttgcgtccaccacccagctagcccctcgcatagatggctttggcggcaatccgatcttctccaacatgtttacaagtacgaagagaactctcccacctgcaaacagcaagaacttcacatgattaaatttgcctttcaagataaggacctcaaatctggctttgatagatgggccctgacggatcttggcctgttgcgggtcaggctccat

SEQ ID NO: 35027 - DNA, 2412 bp, Oryza sativa
  Clone ID: PAT_MRT4530_38988C.1
atggcgtcgaggatggcgctccggcccaacgacgtcacgctccgcctcaccccgcccctcgccgccgccgcgcggcgcaaccgccgcgccgccgccggcggtgtcagggtctacgccgtcgcgtccggggccgtctccaccaaggttgagaacaagaagccatttgctcctccacgagaggtgcacgtccaggttacacattccatgccaccccagaagattgaaatattcaagtctcttgatgattgggccagagataatattttgtcccaccttaagcctgtcgagaaatgttggcaaccacaggattttcttcctgatccagcctcagatgggtttcatgatgaagtcaaagaacttagagaacgtgccaaggaaattcctgatgattattttgtttgtttggttggagacatgattacggaggaagctcttcctacgtaccagactatgcttaacactctcgatggtgtccgagatgaaacaggtgcaagccccactgcctgggctgtttggacaagggcatggactgctgaggagaacaggcatggtgacctcctgaacaaatatctctacctcactggtagggtggacatgagacaaattgagaagacaattcagtatcttattggctctggaatggaccctaggacagagaacaatccttatcttggattcatctacacctccttccaagagcgtgcgaccttcatctcacatgggaacactgctcgccatgccaaagactttggcgacctaaaacttgcacagatctgtggcatcatcgcctcagatgagaagcgtcatgagactgcatacaccaagattgttgagaagctgtttgagattgaccctgatggcactgtgcttgcttttgctgacatgatgaagaagaagatctcgatgcctgcccacctgatgttcgatggggaggatgataagctctttgagcacttctccatggttgcacagaggcttggtgtttacaccgccaaggactacgccgacatccttgagttcctcgttagcaggtggaagatatctgacctgactggcctatctagcgagggaaacaaggcgcaagactacctttgcacccttgctgctaggatcagaaggctggatgagagggcacaatcgagagccaagaaagctgtgttactactgtccgtgcttgtcgagacacattttgagaacaataccagatcagataaggtgagtgggaatatgtggacgtcgctctttgctttactaactattctgatctctgaaattaacagagaatatgctattatgctaatccgcttgcttttaggttcgccggaaccggagaagaagaagaagatgatagggtggggagacgtgtacaaggtggtggcggcgacggtgccgctctacttcgcgctgttcctgggctacgggtcggtgaggtggtggcggatcttcacgagggagcagtgcgacgccgtgaaccggctcgtcgccttcttcgcgctccccttcttcaccttcgagttcaccctccacaccgacccgttccaggtgaactaccgcgccgtcgccgccgacgtgatctcgaaggcggtcatcgtcgccgtcatcggcgcctgggcgcggttcatgagcaagggcggctgcgccgtgagctggtccatcaccagcttctcgctgtccacgctcaccaactcgcttgtcgtcggcgtgcccatggcgcgcgccatgtacggcgagtgggcgcagcagctcgtcgtccagctctccgtcttccaggccattgtctggctcacgctgctgctcttcgtgctcgaggtcaggaaggccgccatcgggatgtacgtcgacggcgccgaggcggcggcggcggccggcaaggacgtcgaggccgccggcgccgccgccgccgcaggcacggtcgtcgtcgccgccgccgcgggcaagccgtcgctgtgggcgctggtgaaagtggtggcgcacaagctggcgcgcaaccccaacacttacgccagcttcgtcggcatcacctgggcctgcctcgccaataggttacacatcgcgttgccgagcgccttcgagggatcggtgctgatcatgtccaagtcaggcacaggaatggccatgttcagcatgggattgttcatggcgcagcaggagaagatcatcgcgtgcgggacgagctttgcggcgctggggctggtgctaaagttcgcgctcggccccgccgccatggccatcggctccatcgccgtcggcctccgcggcgacgcagccctacctcaatccatcacatcattcatatttgcgaaagaatacgggctgcatgctgatgtgctcagtactgcggtgatttttggaatgcttgtctccctacccttgttagtcggattttacatagttttagagctaattaggtag

SEQ ID NO: 35028 - DNA, 491 bp, Oryza sativa
  Clone ID: PAT_MRT4530_38989C.1
cccacgcgtccgcccacgcgtccgcacttggttaattaattaattctccattagcagctagctagggttctagggttaatttagttgatcagttcgccggaaccggagaagaagaagaagatgatagggtggggagacgtgtacaaggtggtggcggcgacggtgccgctctacttcgcgctgttcctgggctacgggtcggtgaggtggtggcggatcttcacgagggagcagtgcgacgccgtgaaccggctcgtcgccttcttcgcgctccccttcttcaccttcgagttcaccctccacaccgacccgttccaggtgaactaccgcgccgtcgccgccgacgtgatctcgaaggcggtcatcgtcgccgtcatcggcgcctgggcgcggttcatgagcaagggcggctgcgccgtgagctggtccatcaccagcttctcgctgtccacgctcaccaactcgcttgtcgtcggcgtgcccatggcgcg

SEQ ID NO: 35029 - DNA, 658 bp, Oryza sativa
  Clone ID: PAT_MRT4530_3898C.1
attcggctcgagctctctctccctctaacactgttgtgtcaccctccttatgaaaaataaccaccctcacacttcccaacgcttccttaaccatgagccacgccggcctctggcttccgccgcagttcctcgccggagaccctgacacaaccctttcgaactccgatttcagcttcccttccgagttcccctacgagttcggattgtcttctccggagagcagcgacgacggcgaagaggacttcttcgccggcctcagtcgccgactcggtcagacctcgcttcacgaaactcgcaagcaactctcatccactgtttcggagattccaaggaaaactcagggtttggtcggttcccctcagtccacgctcgccggaataggaagctggtccggtcggagcgccgtttccggcgacggaagccccaacgggtactcgcgtgtcccttcgccctcgacgacgccgtttgacgaaaacaacgacccctgggaagtgatttacgcagccgcagttcaaatcgcaaggatgaagatgaacaacaacaacaaccgagttccagcacagtatgattttcacaataatagaaggttactcactcatcattgccctaaccggagtttcaatcaggtcgtgagagcgaagcaacagtgtggttcgga

SEQ ID NO: 35030 - DNA, 1687 bp, Oryza sativa
  Clone ID: PAT_MRT4530_38990C.1
tagttctagatcgcgcgaccaaacacacccccatcccctctctccgcgcctcgcctcgccacccgcatcgccatctcgcaccgccacctcctccactctcggcggcgggggcctcatcgatggcgtcgaggatggcgctccggcccaacgacgtcacgctccgcctcaccccgcccctcgccgccgccgcgcggcgcaaccgccgcgccgccgccggcggtgtcagggtctacgccgtcgcgtccggggccgtctccaccaaggttgagaacaagaagccatttgctcctccacgagaggtgcacgtccaggttacacattccatgccaccccagaagattgaaatattcaagtctcttgatgattgggccagagataatattttgtcccaccttaagcctgtcgagaaatgttggcaaccacaggattttcttcctgatccagcctcagatgggtttcatgatgaagtcaaagaacttagagaacgtgccaaggaaattcctgatgattattttgtttgtttggttggagacatgattacggaggaagctcttcctacgtaccagactatgcttaacactctcgatggtgtccgagatgaaacaggtgcaagccccactgcctgggctgtttggacaagggcatggactgctgaggagaacaggcatggtgacctcctgaacaaatatctctacctcactggtagggtggacatgagacaaattgagaagacaattcagtatcttattggctctggaatggaccctaggacagagaacaatccttatcttggattcatctacacctccttccaagagcgtgcgaccttcatctcacatgggaacactgctcgccatgccaaagactttggcgacctaaaacttgcacagatctgtggcatcatcgcctcagatgagaagcgtcatgagactgcatacaccaagattgttgagaagctgtttgagattgaccctgatggcactgtgcttgcttttgctgacatgatgaagaagaagatctcgatgcctgcccacctgatgttcgatggggaggatgataagctctttgagcacttctccatggttgcacagaggcttggtgtttacaccgccaaggactacgccgacatccttgagttcctcgttagcaggtggaagatatctgacctgactggcctatctagcgagggaaacaaggcgcaagactacctttgcacccttgctgctaggatcagaaggctggatgagagggcacaatcgagagccaagaaagctggtacattgcctttcagctgggtatatggtagggaagttcaactctgagcatcagacgccattgcgacttcttcgagctccagtgttactactgtccgtgcttgtcgagacacattttgagaacaataccaggtgtgtcttgctacatagttcttcaggttgaccaaatgaactgagggcatatgttcgtggtatctttgcttagagtgatagagagatttgcgtctgtgttttagctctttttttcttttctgccttttcatgtacaacttctggccgtgtggattggacatgtactgaacgtgagtctgtcgttggccgtgtcaatctgctcgtgtgtttaaactggctgctgttcaggtctgaaaattttgtgaaatctgccatgtcgtcagaaaaaaaaaaaaaaaaaa

SEQ ID NO: 35031 - DNA, 637 bp, Oryza sativa
  Clone ID: PAT_MRT4530_38991C.1
caataggtacacatcgccttccgagcgccttcgaggaatcgtctgatcatgtccaagtcaggcacaggaatgccatgttcagcatgggattgttcatggcgcagccaggagaagatcattcgcgtgcgggacgagctttgcggcgctggggctggtgctaaagttcgcgctcggccccgccgccatggccatcggctccatcgccgtcggcctccgcggcgacgtcctccgcgtcgccatcatacaggcagccctacctcaatccatcacatcattcatatttgcgaaagaatacgggctgcatgctgatgtgctcagtactgcggtgatttttggaatgcttgtctccctacccttgttagtcggattttacatagttttagagctaattaggtagacgcagagccaatggtacatcaggaaaacatagtttttccttgagaattccaaaacatacatactgacaacaaatgttgcaaaatatctcctgccaacattcctcattgcataaaactgtaatgggagtattgagttctatggaatacttttaacacgttatgtaacaagaatgtatacttattctgttattcaaaaagaatgtgttacagtaaaaaaaaaaaaaaaaaagggcgcccgc

SEQ ID NO: 35032 - DNA, 246 bp, Oryza sativa
  Clone ID: PAT_MRT4530_38992C.1
atggccattgtcgctgaggtcgaggctggccagataagggaaggacctgaagctcagggtgtccagccctcccacaagatgggcacccgggagggcgatccccgtgatggcatttcttgccgtggttcttccatgtcgtcgctggcgccatggaacgtcgccgcagtggagaagggccgccacttgagctcgcagcgatgtgccacgccgcggcagtggcgccgccgatctggccccatggcctag

SEQ ID NO: 35033 - DNA, 354 bp, Oryza sativa
  Clone ID: PAT_MRT4530_38993C.1
atggccggtggcatggctgctcgagcgcctaccctcctcctcttctggccgctgtggatcggggcagtgcggcagctcaaacgcctcctctcctcctcttctggcccgatccccatccatccagcgccggtgccaccttaccgccggatccccacctcggcgacggcctctggcagtgggagggcaagatttcgatggctaataagccaacgagcaaacgacgatgaagtagttagaggggccactcggattgatgctattagtgttgccaatccgtgcattacagatgctatcatattattatactacaattttaaaattctaaaaatagtcatcgtcgatgctttatcttaa

SEQ ID NO: 35034 - DNA, 2919 bp, Oryza sativa
  Clone ID: PAT_MRT4530_38994C.1
atgcttctactgctcctcttcgctctcacgctaggccatggggccagatcggcggcgccactgccgcggcgtggcacatcgctgcgagctcaagtggcggcccttctccactggaagtccaccttgaagggcttctcacaacaccagctgggaacatggaggcacgatatccacccgtgcaactggactggcatcacctgcggcgacgttccatggcgccagcgacgacatggaagaaccacggcaagaaatgccatcacggggatcgccctcccgggtgcccatcttgtgggagggctggacaccctgagcttcaggtccttcccttatctggccagcctcgacctcagcgacaatggccatctgtcgggtacgatccctcctggcataagttctctgttaatgctttccagtctcaacctgtccagcaatcagcttaccggaaatatacctccatccattggtgaccttgggaggatttcctcaattgatctgtcgtacaataatctgactggggaaatccctcctgcgttgggtaaccttacaaagcttacttatctttctctccttggcaataagctgtccggtaacatcccatggcagcttgggaagcttcatgacatctcgtttatagatttgagcctcaatcttcttgttgggccgatactttctctatttggaaacctcacaaaactcacctctttgttcctcgtcggtaatcatctatctggacctatacctgacgagctaggtgaaatacaaacgcttcaatatctagatctgcagcaaaacaacttgaacggctcaattacatccaccttgggaaatcttacaatgctcaagatcttgtacatatatctgaaccaacatactggtactatccctcaagtgtttgggatgctgtcaagtttggttgagttggacttgtccgagaaccatttgaccggctcaattccctcaagtgttggaaatcttacttcgtcagtctacttttctctttggggtaatcacataactgggtcaatccctcaggagattggaaatcttgtgaatctccaacagctcgacctctcagtaaatttcataactggaccagtgccatcaactatagggaacatgtcttccctcaactatatattaataaatagcaataatctctctgcaccaatcccagaagagtttgggaatctggcaagtttgatatcatttgcatcctatgaaaaccaattgtctggtccaatccctccgagtttgggaaaattggagagcgtgagcgaaattctactgttcagcaaccagctatcaggtcaattgcctccagcactcttcaacctcactaatttaattgacatcgaattagacaagaactacttggttggcccgttgcctgatttgtgtcggggtaaaaagctagagattttacatctttctcataacaatttgaatggttcgatgccaaagactttgagggattgcatttccctgcgatccctcggcattagctacaacaaaatggatggagacataactgatgcattaggagtgtacccccatctatggcggttgactggggagataccacctgaaattggcaagttagtcaatctaaatttgatagatttaagaaacaatcaactttctgggaaggtcccaaatcaaattggccaacttaaaagccttgagattcttgatttctcaagcaatcagctgagtggagctataccagatgaccttggtaattgttttaagctgcagtctttgaaaatgagcaacaacagcttgaatgggagtataccaagtacattgggccattttctttctctacaaagcatgcttgatcttagccagaacaatcttagtggaccaataccatccgaacttggcatgctcgagatgctcatgtatgtaaacttgtcacacaatcaatttagtggtgctatccctggctcaattgcaagtatgcaaagtctatcagtgtttgatgtgtcatacaatgtcctcgaaggtcctattcctagaccgctccacaatgcatcggcaaaatggtttgtccacaacaaaggtctttgtggagaacttgctggcctatcacattgttatttgcctccttaccacagaaaaaccagactaaagttgatagttgaagtcagtgctcctgtattcttagctattatttctattgtggcaactgtttttcttctttcagtttgccgaaaaaaactctcccaagaaaataataatgtggtgaaaaaaaatgatattttctctgtatggagttttgatggtaaaatggcatttgatgatataattagcgcaaccgacaattttgatgagaagcattgcattggagagggagcatatggtcgtgtatacaaagcagaacttgaagataagcaagtgtttgcggtgaagaaactccatccagatgatgaagatactgtacacgatgaagagagatttcagattgagattgaaatgttggcaaaaatccgacatcgtagcatagtgaagttgtatggattctgttgtcatccaagagcatatgtctcggattttggcattgcaagaattctaaaaccggattcatcaaattggagtgcattagctgggacctatggctatatagcacctgaattgtcctacacctccttagtcacggagaaatgtgacgtatatagcttcggtgttgtggtgcttgaggtgctgatgggcaaacatcctggagatatccaaagttctattactacttctaaatatgatgattttcttgatgaaatcttggataaacgtcttccagtacctgcagatgatgaagcagacgacgtgaataggtgtctctccgtggcgtttgactgcctacttccatcgccgcaagagaggccaaccatgtgtcaagtttatcaacgacttgccatctga

SEQ ID NO: 35035 - DNA, 199 bp, Oryza sativa
  Clone ID: PAT_MRT4530_38995C.1
caaaagccactagatagattttgccttaatcccggttttcatgacctccctcctttcctcctgagggggatcccctgttccccagcagacctttggttcgttttgttttcgaccaaccctcaccgggctttcaaatcaaatgagccctatttatgattcaccttctctcaagaagataccccagtttttatttcggccc

SEQ ID NO: 35036 - DNA, 362 bp, Oryza sativa
  unsure (1)..(362): unsure at all n locations
  Clone ID: PAT_MRT4530_38996C.1
cagggaaacaccaattctcccttcttccctgggtatagagtttctgtttcagatccatgattgtgtagtacaagtgaacttacacggctaatcatcggataatactggacgcttaaatatactagttttagttagttgcctatttcccattacagggatgaatatgatgatgatctttgatcaatcttgatattggttagtaggaattcctagtatttgggttagtatgtgaggttaatggaatgcattggttattagacggaggaaaaggaagaagagggcggggcggcgttggcgttggcggaggtgggcatggacctgtgactgtgactgtccatgtccagcccccccgtncccgtccg

SEQ ID NO: 35037 - DNA, 498 bp, Oryza sativa
  Clone ID: PAT_MRT4530_38997C.1
atggcggcagcggttctcccttcgctgctcccgacgccgcccgcgagcaagttgccggcgctgctcccgaccccgctgaggagccagatgctgccgctgctcccgacgccgtgcctcatcatcctcccgcctccttccgcgcgccgccggtctccgatcccaagcccggccgcgccgacgccgtcgagagaacaagaaagccggcggctcggcagcctcgtcgtcgacgtcgaaggccagcggcgggatcagcccggccgcgccgactcctgcgaacgctgggacgcgcacaagacaccgggcagccctgcgtcgtcgaccggcagcagcgggagcccctgccgcgcggactccgtcgagcgatgggacagcaacaagcggccgctgagccgcgcgtcgtcggccgagcgctgggacatcaacaagaagcctcgcccaagaaagacgctgtcggcagcggcaagaacaactccacaagccagacgacgacgatggtga

SEQ ID NO: 35038 - DNA, 387 bp, Oryza sativa
  Clone ID: PAT_MRT4530_38998C.1
tgtgtttttttaattttgggtggttttttttttttttttttttttttttttttttttttttttttgcaccccgcataacaaaattccccctgccctgggcgggttatttttttcacaagcaaaaaaggggacccggggccatattataaggatgggtcccacttacaaggggggggaggggaaaacaaaaggcaacccattttcccaactagcattaacaggggggggggggcctgaaaaaccccccccccgttttatttttagcataaacaaagcataccgggttttccgggtcgggggccatggaataccctgggaaggaaaagggttttcctggggcttggccctgggggggatcagggggaagacaccggtggtggaaccccc

SEQ ID NO: 35039 - DNA, 768 bp, Oryza sativa
  Clone ID: PAT_MRT4530_38999C.1
atggcggcagcggttctcccttcgctgctcccgacgccgcccgcgagcaagttgccggcgctgctcccgaccccgctgaggagccagatgctgccgctgctcccgacgccgtgcctcatcatcctccccgcctccttccgcgcgccgccggtctccgatcccaagcccggccgcgccgacgccgtcgagaggtgggacgcgcgcaagaaagccggcggttcggcagcgtcgtcgtcgtcgtctagctccggcagcgcgatcccctgccgcgccgacgcttgcgaacgctgggacgcgcacaagaacaagaaagccggcggctcggcagcctcgtcgtcgacgtcgtcgagagccagcggcggtagccccgggcgcgccgactcctgcgaacgctgggacgcgcacaagacacccggcagccctgcgtcgtcgaccggcagcaacgggagcgcctgccgctccgactccgtcgagcgctgggacagcagcaagcggccgctgagccgcgcgtcgtcggccgagcgctgggacatcaacaagaagcctcgcccagaggaagactacgctctctgcagcgggaagagcaactccacaagccgcacgatgaagacgacgacgagtgcgcagatgatcagcaagcctcacacggagacagtggtgaagccgccgccggcgctgctgccgttcgctggtcctgccgcctacttctctgctccggacccgagcatgcttcccgtgcccaccttcttgttggctcgctgtcgctag

SEQ ID NO: 35040 - DNA, 228 bp, Oryza sativa
  Clone ID: PAT_MRT4530_3899C.1
atggtggtccatccatctgtctcccccacgacggggccacccaccaccaccccgcgcgcacctgcacgccattcctcctcccccaactccgctccccacctcccctccacgcgcttcccgattcaaatttcgtcggcctctcgcttcgcaacggcccacccacctcaccgcgcgccctctctctcgaaccgcttcgacatgggcatccgggcgaaggatggtatatga

SEQ ID NO: 35041 - DNA, 491 bp, Oryza sativa
  Clone ID: PAT_MRT4530_389C.1
gaaatgattgctgaccaaagtaccactcatcgaaaatacagaggatcttgaagattttgaatccgtcttcattaatctttcaacattgcaatcagcaacagccaactttgatgaaagcaacaggcttggggaaggaggattcggtgttgtttttaagggtgttctccctggtggacaagaagtagcagtaaagaggctttccaattgctccatacaagggctaggacaattgaagaatgaactatctctggtagccaagctgcagcacaagaatcttgttaggcttattggcgtctgcttggaagaaggagagaagatccagataaaagcaaacaacttgattggggaaagagatacatgattctgaacggaattgctcgaggcctgcaatacttgcatgaacattctcaattgaagataatccatcgggacctgaaagcgagcaatgttttacttgatgcggatatgaaacccaagattgcggattttgg

SEQ ID NO: 35042 - DNA, 247 bp, Oryza sativa
  Clone ID: PAT_MRT4530_38C.1
atgaggggaagagttaccttcgtcccttgggcttcgtctggagctccggacggcgccgctagctggtgctggcgcatacactggaggcgccgagacaggctagagagcgggcgccgcctgagctggcgcgtggaggggccgaagcagcgaggcggcgaccgcgcgacggggcgacaggcgggcgaagtcacctccctggtggcctcggcctggcggctggacagggaacgagatgagggtttaggaa

SEQ ID NO: 35043 - DNA, 2133 bp, Oryza sativa
  Clone ID: PAT_MRT4530_39000C.1
ctagtagcttctagacaagtagagaaagagggaaggtaaagatcgacaaggaaccaagcccggttccaggtcgccaccgccgccgaggaacccctcagccgatcctattcgttctctattcgataccctctgtgctgcagccatgtccctttttgatgattcttcttgggcttgcttgggccgttgtttggcgagacgctgctccagcccataatacagccacaagtccttaacaatccctcttcttaaaattcggcttgtccccgagccgatgagaagcactgccaatcccaccaggatcccaagttgtttgaaggtcttcgatacaaggtgcaaatttatcatcaccaatgagattcttagtttggagcatctcagagtaaagtagactaactcttgttcaacaatggcaatcacattgttaccagaatgtgcaacaccaaaatcttctcctctttgatcttgagtgtattctgcaatttcttcaataacaatgaaaattataccacctctgtgaactacttgtagagatttgagtaagaataatggatcttcaggatacacgaatctgaactcatgcccactaatccaatttagaacgccctccggctcacccatcatggtttggcacgtgaccctggcatggtatgcgccacccttgacaccaaggcctaacgtcgaacatttagcatgtgtcaccttaggatagtccggggtgttgatgtaggcgattctggttgtgttcttgttagccaccaactccatagaagcagcggctgtgctggcgaaggtaaccctctcaaccatggtgagattgggctcgatgtcggggatggaacatttcatcgaacacgtggtgagcgtaacctcaggaaaatccttggtgatgatgtaagggtcatgaaccttgtcctcaccattcccaagctccaggacgcccgtcggagtagtcccctcgttgatgtagatgaatctctcaattgtgctcgggctgccgccattggggcacttcgtcgaacaggtggtgggcgtcaccttggactccattcgcctctgctcatactcctcgatctgcctcaaaatcaaatcgaacctatcatctatggcgagaattccaacgaaccaaatagctcccgctggagcacggagacgtcctgccccgatctgaccagcgacgacatgagcgcgctgtagctcgtcagcggcgccggagtcccggcgcgttgtccccctgctctgctcgaaggcgatgagattcatcagctgcgtcaggttcgcaagatggatctcgatgcgtagcaactccatgactcccctcttcctgtcgaatgttacgtcgaacatatcccggggcgacctcttcttcctgaacgtgacgccggcctctcgcagcagcgatacacagggtatcagcagcagccgaggcggcgacggagatggcgagccattggttaccgcaggtaactccagctcctcgagcttgggcacgaacttgtcgtgcaaaagatggagtaaatggtcgaactgcccggtgaactccggacgcagtggttgtctgggcacgacggtgccgttaagcttgagctggatgagcagaatcttgactagattgtcctgcgttacggcgccacggaagaaggtgtcaaagaggcgctcgagcacgaagaaggggatctggttctcgaggaggaggaggtccgagtgcagcagcgtgaggccccagccgacgtcgcagagcgggtcgggctcgcccctgttccacttgaagaagaactcgaggatgaagtagccgtcgaagacgctcgtcctctcgctgtagcagcagcgggcgcgccgctcgacggcccgaaccgcccgcacgaagtcggagagcgggacggtcgccgctcgctggaggaaatggcggaggaggcgcaacttgtgctgctccatggcgcggagcgcgtcgcggccgcggtagtaagggccgatggacaccagctgcggctcatacagcttcttgttctcctcgcggatgtgggcggggacacggaagattgtgaaggagctgccgtcgtcgtgagcagggaagagcttttgctccaccgcggtttccaaggagtctttcggagggatgggttcggtctgttccat

SEQ ID NO: 35044 - DNA, 1646 bp, Oryza sativa
  Clone ID: PAT_MRT4530_39001C.1
atatagaataaattagtacaaaactgggtagtcgaagtcatcgactgtttttttttttttttttgtgagagaataaataattattttgggatcataaaatttcttatattttgatacaaatttgaagaccaaaataccaaataccttacattatatggcggatagagtaattaaagatttaaatgcacatgcaaatatgcaatgccaccctttatcattggacactccacacactcgacctatcaacttcaagtcttcaactagtccactgttcgggaatgatccaattatttatttgtaactactcaaacgcgtacctaaacactgatgcgtacatgatatcggcttgacatggacagcaagccacacacaaggtcaagctcaggccaacgtatggcggacagtcatgacacgagacgagaaacaatcacaacctggaaggtgctacacgtacggtggagaagatgcgcttctctgatctccacgtctagtggcggtcgacgaagctcttgatggcgtcgacgagctcccgggtcctctcgccggtggccgggtccatgtcgacggcgtacttgttgaggtagaaggagtggctcatgccgcggttgaccagcacctccacgtccttgccggcggtgcgcagcgcgtcgcagtactcgaggttggtgtcccggatgaggtcgtgctcggcgacggcgaccagcagcggcggcagcgggacggactccagcggcggcgcgttcggccccatcgggcacgtgtacgggtggtccttggtggcgccctcggggagcgccatggcgaggaacttgtcgagcatgtcgagggtgaagaacaccgagtcgggcctcggctccagctccgacttgctccgggtggcgtgcacgaaccccgggtggagcgggatgcctccggcgacgcggaggggcgcccagctgtccgccccgtcctcgccgacgcgcgcgccgacgtggtggacgaggttgccgcccgagctgtccccgatgaggaacacccgcgagaagtcggcggccgtccggaggagctccgccgccgggtcgccgagagcggcggcgtcggacagcgcgatggagcggagccggcggagcccgtcgacgccggtgtcgatgtgcgccggcaggcggcgctcgggcgccaagggcagctcgacggcgaccaccacggccgggagcgcgcacgcgaggcgcgcgtagaagtggtggtacatgagccaggacgggtgggagatgcagaagccgccaccgtggagctgcacgacgacggggaggcgccgctcggcgagggcgacctcggggaggtacacgcggaggttgggctcgccggggaggtcgtgcagcgtgtggccgtcgcgcggctcggcgtaggcgggcaccggctgcatcagcgggagcacctcggggggacccgtccacgtgcggtcgacggtgccgtcgtcgaacacgcgcagccagccggacacctcgtccaccaccttgcgcccgaccgccgccgccgcgacggcgtcggtggcggcggcttgcacctgcgcctgctgcgactcggtggcgatggccattgctgccgtacgtacgtcaggctagtggcgttgcttccgccgtgtgtgcgatgcgatacgatcctcgtgc

SEQ ID NO: 35045 - DNA, 789 bp, Oryza sativa
  Clone ID: PAT_MRT4530_39002C.1
aagggaggtaacctctacgatcctctcttttttttatgacagataaatatttgattagatcatgctagacaagctctactaattgctagatcagccactccgatactgcttggggcaaggacactactatcatactacatgatggcgcaggcggcggagacgtcgtcgtcgttgaacatgttgctgacggcgtcggcgccgcgggcgggctctcgcatccagccgtggcggtcgccgtcgccgtagccacggcggtggtagttgtagctgcccctgtacgcctcgccgtcgcggaagtactccttctccgacgtgaaccgccgcggcgtgccgccgctgggccaaaactccgccttcttcccgctccgccgcacctcgcgcagcaccctccctcggtccacgtaccccgtcaccctcaccttctccatcgccacgtccacctccacgctatccacccctcggaggttggcgagggcgctccggacgacgcgctcgcagccttcgcagcacatccgcaccttgagctccaccgtctggagcgacacgggcggcctgctgctgcttcggccggcgccgccacggcggcggcgcaaggcggtgtcgttgtgcgcgccgacgccgcggtggccgccgggagggtagtagcagcagcagaagaaggacaggaacacgtcggagacaatgtccgccatttgtgcttgggtgaagcagagctaattaaccttgaggtagatcacgctagtatagttatagcccacgcgtccgcccacgcgtccgcccacgcgtccg

SEQ ID NO: 35046 - DNA, 516 bp, Oryza sativa
  Clone ID: PAT_MRT4530_39003C.1
taattgcgaagaggaggagcaggcttgaccatgggaccgacctatactacttctgtgataagaatgtctcttagatttaaataaaaatcccgatatcaattgctagaatcttcgataaaggaaagggatgctgagtatgaatcactcaactattaaaatcctgatatcaattgctagaaccttcgataaaagaaagggatgctgagtatgaatcactcacctattcttctgaattatacgtatccacacgattaattttttgtttcgatatgcaaaagaaaaccatttccaatggaagcattcctataatgaattccttagcaacctttataataaatggaatataccaaattgtgatcaatcaaatattactaagtcctggtatttactaccgctcagaattagaccataaaggaatttctatctacaccgggactataatattagattggggatgaaaatcttcaaaatatgtcccttaaaaatacaaaagtaaaagtaaggttagttggaaga

SEQ ID NO: 35047 - DNA, 847 bp, Oryza sativa
  Clone ID: PAT_MRT4530_39004C.1
ccggaattcccgggtcgacccacgcgtccgcaaactcactccacacacattaactactgcacaaacgcagccagcgacagcgaggatggccggccgagccagctgcgtactcatcctcctcctcgccattgccggcttcgccgacgtcctcgccgccggcggcgcgacgccatcgtcgtcgtcgtcgcaggtgagcacgacgacggcagcggagttgaaggaggtgaacgggatgcttgcgtgcatgatcgggtgcttcacgcagatgttcgggtgcgccttcgggtgcatggcgaagggccccgacacgacgctctgcgtcgtcagctgcaaccagaacagcatcgtctgcatggtgcgttgcgccctcacgccgccgccgcccaagcccaagcccacgccgccgccgcccgcgcccacgcccaagcctcccgcgccctcgccgtcgccgccgccgcccaaagccgccggccacggcgtcgctggcgaccccttggcctagacatgtacagctcagctcactctactatacccctacaagtgctagctcctgatacgacattataaatgtgcctagctacgtgatatataatcaagaatcaagaaaatacaaactgataaaagaaaaaaaaatcaagaaatacgtatctatgtagatctcatagttttcatatatgcatttatgtggctgaacatgtgtttgtgccagccatatgtaacaaatgaaaatgggtcgtcagtcatactgagtgtatgtatttagtatgacctgagaaatgtactcaattgtgtaatgttccataattatgttctggaaatgaaaattcccagattatattttaacccc

SEQ ID NO: 35048 - DNA, 672 bp, Oryza sativa
  Clone ID: PAT_MRT4530_39005C.1
atggcgggcggacggcggtggggcggatggcgtgaacaggagccgcctcgccgtgccggcagcagtgcagccgtgcagcgcttccaccgctccgtgatcaagtcattctcctacctgctccgtgacgtagccattgccgcgggcctcctcaactttgcgctggtcggcatccctgtcctccctgcaggcgtcctccggccgcctcgtcgcctggccgttctactgggccgcgcagggctgcttcctgttcgtggtgtggatcatcgcgcacgagtgcgggcaccacgcgctccaagacgacaccctcggtctggtcctgcacttgtggcttctggcaccatacttctcgtggaaatacagccaccagcggcaccactccaacaccagctcacaggagcgcgacgaggtgttcgtccccaggttcaagtccgatctgccgtggaactccccgtacgtgtacaagtacaacaacggcccgtcgcccggctactgctcctcggcatgcagctcactgtcgggtggccgatgtatttggtgttcaacacctggggtcgctggtacccgcggttcgccagccacttcgatccctccggagccatctacatgaggcgggagcgcgtcttcatcgccatctcggacatcggcatgctggccgtgtcgctcgcgctgtaa

SEQ ID NO: 35049 - DNA, 153 bp, Oryza sativa
  Clone ID: PAT_MRT4530_39006C.1
ttcttttttttttttttagcactagtaaacattgcatcctatgagtgccaggaggataccaaaatgtaggactaaagatttagaagtccaagttatgcatgcctagaaaccaacggcagactgctagatatgtaatcagttctaatgcatcca

SEQ ID NO: 35050 - DNA, 166 bp, Oryza sativa
  unsure (1)..(166): unsure at all n locations
  Clone ID: PAT_MRT4530_39007C.1
ctcacctaacacgggaactacgccttgcggtttgctttngttttttatttttatttttatttttatttttattgggacggacggactacgcttacacttttgcaccactagtaccacacgaccgggaactaccccacacccatgacgataccgtgacacacttacc

SEQ ID NO: 35051 - DNA, 206 bp, Oryza sativa
  Clone ID: PAT_MRT4530_39008C.1
aggcgtcacgtggcgagtatggcttggctcgccgggcccggcgggagagggtggctggaccacgccgtccggccggcaagcggcaagctcgccctgcatccgcatgccccctgctgtcctgcggcgacgacgacgtagcccccgtcgctgctgcgcctgtgcgccgtggaccggggcactatgatgatcgctacgagtcagattag

SEQ ID NO: 35052 - DNA, 435 bp, Oryza sativa
  Clone ID: PAT_MRT4530_39009C.1
ggtaattccatatttattttaaacctgttggatttcctttgcatctggaaaaatccaagacaagttttgtagaatttcatccaaaatgagttttaaaaaaaatcatgtgcatcgaacttcaaaaggccaacagcagttctctgaaatgctcaagcctattattgctttacgcctttacttgcatcttgtagtagcaatctataagttcagctggggtcagcctgcacgttgaagacgatatatgaactaactgaggacaaatctttgctgtagaaatcagagactatagtcttcacattgtttgctggttcatcattgtacggtattatgtgctcagagactacagtcttcacattgcttgctagttcagcatcagcattgtaacgtattatgccttctctatccctactatactgctattttgggcgagaattc

SEQ ID NO: 35053 - DNA, 862 bp, Oryza sativa
  unsure (1)..(862): unsure at all n locations
  Clone ID: PAT_MRT4530_3900C.1
gngatcacatgttccctcaggaatgatcacactaagaaaacgagcgtttcgctacctgaagcaaggggatttgaccgtcacagagtacctgcacgagttctatcgtttggctcgctatgcaccagaagatgtggaaacggatgaagaaaaacaagagaagtttctccaggggttaaaagatgagcttgcagtgcaactactcctagaggattatgaaaattttgagaaacttgtggacaaagccatgcaacttgaaagtgagcataatcggatgacgaactgcaagagaaggattgtcaacatcctagtatttccaggtggtaaccaaagacagcgcactgagccacttccgatcatcggatcttctgttgggtatcacgagttcctgccccaagaagatgaacgcaatgtagacaacaacaacatcattcaccaagatatcgacgatagtatcaatgaaggcacccagaatggcaaccctagcaattttgactctgagaaagactccaagggtgatagcaataatggtaccactgatgccgatgttagcaaggatttccaaccaccaattccaactcctagtcaggacgatcgttcccaggcggacaactcagcaaagaagacgttgatttgttacaactgcaaagaaccaggtcatttctcgagagattgtccacagccgaagcgtaacctgcgtcatcactccggccattatgcaagaagaagacaggtcactcgccttgtggtcactggagcaaacgccgtacctgtttcactgaaaggcagcaagccaaaggacctcatcgtcaccagaagcatccacaactctcggagtgaagagtacctggtggacaaagtttaa

SEQ ID NO: 35054 - DNA, 404 bp, Oryza sativa
  Clone ID: PAT_MRT4530_39010C.1
tataattttttttttaatcgcccaacgggggttttataaaaattcgggggggtaacaacattaaccggtttttattttaggcaagcactgtcctaaattttttttaagaactgaaaccttaaacttaatccacatcacatggtatacatgcatccctaatgacccctttttttttttatttgcggaggaaaacaaagaggcgggcacgagtaaacctctttcaaaaaatttttctctaaaaatttaaaggggagaaactttcgggggggggaaaaatttttaaaaaaaaaaaaaattgctcctacctgggttggctccccgaacaaatattcttcaacctctcaaggctgtttccttccaaacagaatccatacaccccaagggcggccccccccccgggattg

SEQ ID NO: 35055 - DNA, 456 bp, Oryza sativa
  Clone ID: PAT_MRT4530_39011C.1
atgtcgacaacagtaggggatcttttgctgcttcaaggtttcgccgagatgggtttgagagatggattctccgacaacatactactcgataacttcagctatggaggatctaacttgaccagagtacgtgccccgataatagcggaaccatcgtcatcaacaacttggtctatcgagatcattcaagcctcaagctccgcggcgtaccaaaagatgtcagatcacatgatatcgaacgagtacgcagcaagatacatccggcatatatctacaaaggccaagccagcccgatgcaagccgcgctcgagctgcctcgcgccaaccctgtgccgcctcgcgtcgcgctcgtgcccagctcgtgccgcccctcacacgccacacgcccgcacgagctctcacgaggacgaacagacgaacgaatgcccagacgacacctccagcttcccacttgcgtaa

SEQ ID NO: 35056 - DNA, 384 bp, Oryza sativa
  Clone ID: PAT_MRT4530_39012C.1
aggagaacagagttgcaaaatgagttgacagccgatgaatattataatctcatggccgatgaaagggaagacttagttcaatctacgttgagagctcttgtaaaagttaccaaggataaggaatgcgttgctcgacgttacaacaaaaaagtggtgccctagtctttttctgaaggtgaacttttttggaaattgattttgccgatagggactcgtgataataaattcggcaagtggtcaccaaattgggaaggaccgttccaaatccataaggttgtgtccaagggagcttatatgttgcaaggacttgatggagaagtttatggacgagcgctcaatggcaagtacttgaagaaatattaccccagtgtttaggttaatgca

SEQ ID NO: 35057 - DNA, 1152 bp, Oryza sativa
  Clone ID: PAT_MRT4530_39013C.1
caccacccggccacccaccgcctcgatccgcgccttctccaccacctaaaacacttcggaatcccccccccctcccccgcccaacaccacgtgggccgcgcccctccgcagccacccccgaggttcccaccgccaccgccgccagcgcgtccacccggccgaagctccgcgacagcgccgcccgccacggccctctcctcctcctcctcctccatcgccgccggttgccgctgccgcagcgccgccgcctccgccaccatctcctccgccaccgccctccccgagcccggtttggccggcccctgctgctgctacatcaccacccaactaccaaacaaaccaaaagagcccccccaacctccacaacgctggatccaccatccccgacctcctcggcgatggatctacccctcccaagggcgccgccggtggatccgctcctcccatggcctctagccgtagatccggcatcaccgtccccaacctcctcggcagaggatctgcccctcccaagaccgttgccggtggatccgcccctctcatggtctctagcggtagacccggcatcaccatccttgacctcctcggtggcggatccgcccctcccgaggctgccgtcgatggatctgcccctcccatggcctctagcggtagatccggcatcaccgtgcccgacctcctcggcagcagatcggcccctcccatagcctctagtgctagatccgacatcaccgtccccgacctcctcggtggcagatccgcctctcccaaggcccccgccggtggatgccttcccatggcctctagcggtagatccggcatcaccgtccccgacctcctcggccgcggatccgcccctcccaaggccgccgccaatggatccgcacctcctattgcctctagcggcaaatccactactcccatggccgccaccgcccaagcctgccgctgttgcagcccaaagccagtcacctccacctcgaccacccgaaccaccttctccggtgccgctcaccccatcacctactgtccaagcgtcgctgctccccaaccttatttgccttcctctttctctcattccaaggtcacttgacacggcgccatacgcttttacacgtggcagatcacttttacacgtggagtataacgaat

SEQ ID NO: 35058 - DNA, 2526 bp, Oryza sativa
  Clone ID: PAT_MRT4530_39014C.1
cctgcctgcgggtggaaccttcttgtttcctcaagcagtgacgaggtcacaaaactccaagcctagggcgccctttgctctcactagtatcttctagtgctgcaaaagggaaatcacacgatagattatcgtgagcggcgacccaatcaatttatcacgaaaaatcatgtcattcctagttagccagagttgccagctcacagctgccaaaaacatccaactcagagtattatgagaattgtcattaggtttcaacattgatgcaaaaaagtgatcaaaggatgaaggaacaaagttccagctaaacccatctctagcaaaacaccatataaaagatgccatgggacaagtaaaaatgacatgttgagcattttcagtgacaccacaaagctcacaagcctctaaaccttcccagtttttttgtcacaattgttcagtggtttggatccgatctttcattgctagctagagaaagtgtttttgcttaagaggaatcggtagtctccacagcatattcattttggggtcaagtatacctctaaaatttaacaactgatataacgatttcgaggtatagactccattctttccatgaacccatttgagcacatcagcctcgtcggtgcaagcaatctcttgtgttagttcagataactccactcagtcagctctacattaccaaaaagtcttctgaaagtaaggcattctaacccctcttgagccacctctttcacaattattctttgttggttgcaaatttcatagagccccaggaacctaattctcggggggcaattacctatccaaacgtcatcccagaacaagatatggtccccttttcctagagcccattctcccccaagaacaaaccactttatgatatttagtaatcctctccagaattgggagatccctacctctgaaccatagaaaaagcctctatctctcatatacttgtttcttaaaagatcaagacacaaactcttttcttttgattcaagtttaaagatccatttggccaggagggctatattgaaagctctagtttcagtgaaacccaggccaccaaactctttagggaaagctaaattcctccatcttatcatgtgatactttcttttagaacttaggcctgcccaatagaatttgcctctaattgagtccattttctggtgaatcccttcaggcagtaaatataagcccattgcataagtagggatagaagagagacaagagttgataagaacagctctaccactatagtacaaggaacatgttttccaaaaaccgagtttcttgaccaacttctgtggtaagaagtctaggtctgcattcagcaacttgtttgggctaataggaagtccaaggtacatcataggaaactctcctaggggacagttaagcatatttgcaacactctctctgataatttattttcatcccagaaagctcttcaaaacaataaaggaggaactttgttatcacaatctctctgtcaatgaaaggaataaagatcacagtgtcgtctgcatactgcaggtgtgttaggcctccagggatgagatggggaatgagcccagacagaaggttagcagcttttgcatcctcaaagatcttcgcaagggcatcacttactaaattgaacagcaggggagagagggggtcaccctgtctaagccctctgtaagtccggaagaattcacttctctccccattgatattaacacacatccgcccctctcccgctgccttggacacaagctttgatccaattaatccaggatggaggaaattttttcctatctaacacctcaaaaaggaaatcccaactaactctattataagccttctcaaaatcaatcttaaacaccactcccttcagattatgtttatgtaattcatgaagagtttcatgcaaagtaatacaaccctctaagatgaatctaccaggaataaaagcagtctgagtatgagaaatctcattgttagctacaacagtaagtctattagtaactaccttagccaagaacttaaagcagtcatttagaacacaaataggcctgtattgtttaatgttagcagcttccttaattttgtggatcagagaaataatgccataatttagtctttttagatttaactcattgttatgtaaaaggattagcatttcaaaaaggtcacctcttaactcttgccagaaagttttataaaattgtacatggaaaccatcagggccaggggcagtgttaagcttggcctctttaatgacgttatccagctcttctagggtaaatggtcttatgatccaagcactctcttcctcagtaaggtgatgtgagtcagtccagaaatcttggctcaagtgtgttttggaagggggcttagcccaaaataactctttgtaaaaagcaatgatgtgttcctttaactccccttcttcagagatcaactcaccctcatgctccaagcttgtgctgtgtacaggtttgatgaccctattttgcactgttatatatatatatatat

SEQ ID NO: 35059 - DNA, 903 bp, Oryza sativa
  Clone ID: PAT_MRT4530_39015C.1
atggaccgcttaagagcccggttgaaaaaaaccaccttttttgcttatgggtctctttacagctctcggggctatcgattgagaaaataccgacaagatataaaaggcaagggctggagcgcggctataagacacaatgtcttactccgacttctcccattctcccatcgcctccctctctcctggtggcttttcctctacttcgccactccaccttccctttgcctctccccatacatagcagcaaccgcttcgggtggtcgaggtggaggtgactggctttgggctgcaacagcggcaggcttgggcggtggcggccatgggagtagtggatttgccgctagaggcaataggaggtgcggatccattggcggcggccttgggaggggcggatccgcggccgaggaggtcggggacggtgatgccggatctaccgctagaggccatgggaaggcatccaccggcgggggccttgggagaggcggatctgccaccgaggaggtcggggacggtgatgtcggatctagcactagaggctatgggaggggccgatctgctgccgaggaggtcgggcacggtgatgccggatctaccgctagaggccatgggaggggcagatccatcgacggcagcctcgggaggggcggatccgccaccgaggaggtcaaggatggtgatgccgggtctaccgctagagaccatgagaggggcggatccaccggcaacggtcttgggaggggcagatcctctgccgaggaggttggggacggtgatgccggatctacggctagaggccatgggaggagcggatccaccggcggcgcccttgggaggggtagatccatcgccgaggaggtcggggatggtggatccagcgttgtggaggttgggaacaacgtctag

SEQ ID NO: 35060 - DNA, 624 bp, Oryza sativa
  Clone ID: PAT_MRT4530_39016C.1
agaaaggatccataaactgcaccatataataaaggatgagcataggagctaaataggttccaacattaacggagctagtgaattagagtctcaaaaggggaaaagatttatacatgcaacgcaggataataacttgaaagggtgaacagaaactaagtcaattacttccgtcaggaatattcacaatcttctcccgctcttcagttaccagctttccgcaattccgcaggttcctttactgcctgtagtactaaacacagcgtcctccaagaagggtgcgaatttctgagatgaacagtctcagttacatcatttcttttgtagaagaattcatacctgaaatcaccaaagttcagcgattacaaacatcttagcgggtttgctttcaccccaacccagcaccatgtttgttgacagtaggctgtatgggttctaccataccctttgtgctcttcccaagggcttcgccttccttccagcccatgttctccatcattttcttggcagaattcaagccactggaacggaagttcatatctactgatgcacctcccatcagatccatgccctcacttgtttcctcatgttcataaaaattggtgctgctactttgtttctgtccag

SEQ ID NO: 35061 - DNA, 255 bp, Oryza sativa
  Clone ID: PAT_MRT4530_39017C.1
cagacgcgtgggaagaccctgtatcttcatcgtcggacgtcgtttgctacatagcaatcgagagggctgtgtgagagctgatctgctcaggtggccagccaggtgcggctagcaagcgtcttcgctaacatcttggcgctaaaatgcattacgacgggaaagggttgctgctcgattcaatactaaaacagctgcggccatcaacatcgccagatcctatgacacgacgccgccttgtcggtcaccaccgatcac

SEQ ID NO: 35062 - DNA, 207 bp, Oryza sativa
  Clone ID: PAT_MRT4530_39018C.1
atggagactgtatctactctttggctccaggctcagttaactgtctatgcatcaccttgttcaagttattattgcaacaagtcccgggctcccggcctctccatgacgctgttgcttttaaggatgcacaatgcaagtggtactcacttgttctacatcaactacagtagttcaaacttcaatgctcagttgggcagaaaaatgtga

SEQ ID NO: 35063 - DNA, 1203 bp, Oryza sativa
  Clone ID: PAT_MRT4530_39019C.1
atggccgatgtcaccggcggccactcctcccctccggcggcggcggcggagaccttgcccgacgacgtcctcgccgagatcctcctccgcctcccgccccacccttccttcctctcctcggcgtccctcgtctccaagcgctggctccgccacacccgcaaccctagcttcctccgccgcttccgcgagttccaccgcaccgcccccgtgctcggcttcttcctcaactcctcgcatggcgccctcttcttccccaccgacgcgcccctctgccgcatcgccgaccaggtcgcctccctccgcaggaacacgggcgatggcttgtggtggctcgtcggctgccgccacggccgcgtcctcctccgcagctgcgactgggccaacctgctcgtctgggaccccatgaccgaggggttcgtctgcttccccgcccccatccagatggtccaagccgacgccgaccgcgacgccgccgtgttctgcgctgcctccgccggcgacgaggaccgccgctccggcgccttcaacgtcgccgtcgtgttcgtcagcggcgaccacgtgttcggctgcatgttctcctcggcgatcggcgcctggggcgacgtgatctcgacgccggtgactttacctctgctgatgatctacgacgagcccgctgcccttgctggggaagccctgtactggattgttaatggcagcagcttgctcgagttcaattgcggcagccaaagtctagctctgatctcgcggccatcggatatgcccgcaacccacaggtggaacatccgtcctgtgagtttggaggacgatttgcttggcctcgcctttttcaacgatttctgcctgcatctgtgggtgcgggaggttgccgatgatggcgcgacgaactgggttccacgcaagtccgttgagatggacaagctcctttcgctgccagtggcgacggaggacagtcggcgccgtatcgtgcctgcttggatatgtgggttctctggggatggaaatgtggtgtttattgggacccctgctggcattttcttggttgagcttgacacgttgaagttcaagaaggtgactgatggttccctactcatcaagactgttcatccctatgagagcttttattatgttccaaatgaaaaaggaggaaaacaggagagtgctatagtggggaaccaggtttctgaggcaggtggcaagtga

SEQ ID NO: 35064 - DNA, 4593 bp, Oryza sativa
  Clone ID: PAT_MRT4530_3901C.1
atgccgcgctacaagcctaaatacttgtttggtgttgagggatttgtccaggagttgcgtacgatgtcctttgccataggatttgggactgcccctttgtatgcccagattcctcatgatcgtcacgaagagaagtgccgagtcaaagtcaccttgaacagtaatagtgaagatatcccatcagtgatgttcgaagctggagaaggaaactacatccatgcatgtcaggaggtggcaaggatcgccataggagagctccgcgatcgctacagtgatcagttggccgacactgagtatcgctaccatcctcgccaaccccagggaagtaaccatggcagctaccttgagactgaggggattgagaatgatgctaccacaaggcatttggttgagatgctgtgggctatggatgaaacccgtgcggaggttgtgctagcagctcaagatcgtgaagactggaatcgtggtaagatttgcaggctagaggacaaggtggatcgtttggagaaggaactagccgcgttgaagggagaagaaccaccgcagaaggccaggattcgtcttaccgcaaggaagagagctctatttgtccctcgctaccaattggcgccaaaggtccgtgtggtggagaaagaagttaccccagccctagcggatcctccggtcgtcaatatggtgcacactcgcagcaacgggaatggccccaacaacaacaataacaacaacaacaatggagagaatcccacacttgcccaagtcctggctcaacaggcacagcttatgaacatgatgatgcagcaactccagaaccaacagaaccagggaaataaccatgcacctccccagaacaagttagcagaatttcttcgtgtgaggccgcccactttctctagaaccactaatcctgttgaagctagcgattggctgcatgccatagagaagaagttggatttgcttcagtgcactgatcaggagaaggtctcatttgcatcacatcagctgcatggccctgcctctgagtggtgggatcacttccgccttaacagaacttctgctgaacctatcacttggcttgaattcaccgctgctttccggaagacgcatataccatcgggagtgcgtcagttcttcaacaacaatgctggcaacaacatccgcaatcaagctccacgccctgttgcagctccaacacagcaacagcctgccaagagggagcaaggtagcaagcccggggtgtgcttcaactgtggagacccaggacattactctgacaagtgtccgaagccccgacgcgtgaaggttgtccctgcccagagcaactctaccacaccagcatcaaaggcccgtgtcaatcatgttgctgctgcagaagctcaaggtgctccagatgtgattttgggtacgttccttgtcaactcagttcctgcaacagtgcttttcgattctggtgctacacattcatttttatctatgagttttgcgggaaatcatgggatggaagtagaagatcttagacgtcctttgatggttagtaccccaagtaatcaagcactctctttgcaacgtagcccctctgtcagaatagaaattcaagaagtaccatttctagccaatcttatcctgttagaatccaaagaccttgatgtcatcctagggatggactggttagccagatataaaggtgtgatagactgtgccaacagaaaagtaactctcaccagcaatgatggtcgagttgtaactgttcatgcattgtcttctgagtctttaaggtcaagactgaaccaaatgactttggaagagattcctatagtccgggagtatcccgatgtgttcccagacaatttacctggtatgccgcctaaaagggatatagagttcagaatagatttggtaccaggaacaactccgatccataagagaccttatataatggcggccaatgaattagcagtagtcaagagacaagtagatgatttgcttcagaaaggatacatcagaccgagttcatctccatggggagctccggttatttttgtggaaaagaaagatcatacccagaggatgtgtgtggactatcgtgcactaaatgatgtgactatcaagaataagtacccgctgcccagaattgatgatttgtttgatcagcttaaaggtgccactgttttctccaagatagatcttcgatcagggtatcaccagttaagaatcaaagaggaagatatacctaagacagcttttaccactaggtatgggttgtttgaatgtactgttatgtcttttggacttaccaattaccccgctttcttcatgaacttgatgaataaggtgtttatggaatatctagacaagttcgtggtggtctttattgatgacattcttatctactctcgaacaaaagaagagcatgaagaacatcttcaccttgcactagagaagctacgagaacatcaactgtatgccaagtttagcaaatgtgaattttggttgtctgaagtgaagttccttggtcatgtcatctcagccggaggagttgccgttgatcctagtaatgtggaatccgtaatcaactggaaacaaccaaagacagtttcagaggttcacagtttcctaggcctcgcaggatattatcggaggtttatagagaatttttccaagattgctaagcccatgacacgattacttcaaaaggatgtaaagtacaagtggtcagaagaatgtgagcagagttttcaagagttgaagaatcgcttaatatcagctcctattttgattttgccttatccaaagaagggttttcaagtgtattgtgatgcatccaagcttgggttaggttgtgttctgatgcaagatgggaaggtggttgcctatgcatctcgtcagttacgtccgcatgagaagaactaccctactcatgatcttgagttagctgcagtggttcatgcgttgaagatttggcgtcattatcttttcggtactcgtacaaaggtatacactgatcacaagagtttaaagtacatctttactcagccagatctgaacatgagacaacggagatggttggaattaattaaggattatgacgtgggaattcattatcacccgggaaaggctaatgttgtagcagatgctcttagcaggaaaggctattgcaatgctacggaaggacgacagctgccattggagttatgcaaggaatttgaaagattaaatttgggaattgtcagtagaggtttcgttgtagccttagaagcaaagcccactctaattgatcaagttagagaagcccaaattaatgatcctgatattcatgaaatcaagaagaatatgagaagaggaaaagctatcggtttcttggaagatgagcaaggaactgtatggttgggcaagagaatctgcgtccccgacaacaaagatttaaaagatgcaattctgaaagaagctcatgatactttatactccattcaccctggtagtaccaagatgtaccaggatctcaaggaaagattttggtgggcaagtatgaagcgtgaaatcgcagaatacatagcagtatgtgatgtttgtcagcgagtcaaggcagaacatcagaaacccgcaggtttgttgcagcctttgaagattcctgaatggaagtgggaggaaatcggtatggatttaatcactggtctacctagaacgtcattaggccatgactctatttgggtgatagacgacagacttaccaaagtggctcatttcatcccagtaaagacaacctattccggaagtcggttggcggaattgtatatggcaaggattgtgtgtttgcaccgcgtccctaagaaaatagtgtctgatcgaggcagtcagtttacttcaaagttttggaagaagcttcaggaagagatgggttctaagctgaactttagtactgcttatcatccgcagacagacggacaaaccgaaagggtaaaccagattttggaagacatgttgagagcttgtgctttagacttcggtggaagttgggataagaatttgccttacgccgaattctcgtacaacaacagttatcaagctagtcttcagatggctccttacgaagcactgtatggtcggaagtgccgcactctgcttttgtgggatcaaacgggagaacgtcaggttttcgggacggatatcctaagggaagcagaagaaaaggtgaaaatcattcaagaaagattgtgcgtggcccagtctcgtcataagagttatgccgacaatcgtcgtagagatctaagttttgacgaaggagattatgtgtactttcgtggcacgcctcttcgaggagttcatcgttttcacaccaaaggaaaattggcaccacgttttgtgggaccttataagattgtcagtagaagaggagaggttgcttatcagttggagttacctcaatctttggcaggagtccataatgtgttccatgtgtcgcaattgaaaaagtgtttaaggattccgacgtttccggagagtccgtttttacaggagaagaatttgaagagttccaaggccagcaaggcaagtcacacagatcccaaacaaccctttgagcatgttgatcctgtttaa

SEQ ID NO: 35065 - DNA, 630 bp, Oryza sativa
  Clone ID: PAT_MRT4530_39020C.1
atgccgccgccgacgcggacgcggcgaggcgtcacgctcgccgagcagatggccgcgtcgtccaacctccgcgacctcctcaagctccgcgacaacgacgacgacgacgacgacggcggcgggcaaggtggtcgccgccagccgcggccgctgcccgacgcggtggtggtggcggcggggcggcgacgcacgctgctcgacgtcatccgcggcgtcgacgacgacgatggccacgaccacccgcccaccggcgtccttgagggacaccgccccgcgacgtcgacgaggacggcggcggcggggggagcgcggggcgggagggtgtcgctgatggcgctgctggagcaggcggagcggcagtggacgacggccgccgccggggacgccagccggaggcgcgtcgcggacgaccacgcggcggcggcggaggcgggcacgaacaagggcttcgccggcgccgccgccggcgtgggagggcggtgctgcgtgtgcatggcgcgcggcaaggccgcggcgttcatcccctgcggccacaccttctgccgcgcctgcgcccgcgagctccgagtcggccgcggccgctgcccgctctgcaacgccgccatccacgacgtcctcaacctcttctga

SEQ ID NO: 35066 - DNA, 1998 bp, Oryza sativa
  Clone ID: PAT_MRT4530_39021C.1
atggaggagtttgagctgcagcagcagccgtattacagcaagctgctcctgggtagcccgctggagatcgccaatgtcgacgacagtgatctgcagcttgtcgccggagttccctcggatccgccgcctgcgccgccgacggccgtgaagaagaagaagaagagaagccttccagggacaccagacccgagcgcggaggtggtggcgctgtcgccgcggacgctgctggcgacgaaccggttcgtgtgcgagatctgcggcaagggcttccagcgcgaccagaacctgcagctgcaccggcgaggccacaacctgccgtggaagctgcgccagcgcggcggcgctggcggcggcggcggcggcgagccgccgcggaagcgtgtgtacgtgtgcccggaggcgtcgtgcgtgcaccacagcccgagccgcgcgctgggcgacctcaccggcatcaagaagcacttctgccgcaagcacggcgagaagaagtggaagtgcgaccgctgcggcaagcgctacgccgtccactccgactggaaggcccactccaaggtctgcggcacccgcgagtacaagtgcgactgcggcaccgtcttctccaggcgcgacagcttcgtgacgcacagggcgttctgcgacgcgctggcgcaggagaacaacaagctcgcgcagccgatgaacatggcggcggtcacctccgctctgcagggccagcagcaggctcaccaccccgtcgccgacgacgatgacgccgcgggcgtcaagagcccgcacctcaagatgttccccgacgtcgacaacatcgtcgccgccgccacggccggaaacccgctcttgccgccgccgcttagcatggcgggatgcatgctgtccagcctcgccgcgccattgtcgtctccgttcctccccgggtgcaagcttggcgtggacgcggcgcgcgacgccgccatggtgttcccgccgccgccgccgccggccgggtcagcggcggcgatcatgtccgccacggcgctgctgcagaaggcggcggagctgggcgccacgacgtcgacgggctgctacggcggcgtcgcgttcccggccatgggcattgccggcggtctcgaccggcttcccgccataggccatcatctcgcgccgtacgacgacgtcgtcgtgccggcggcgctgcaggggcagacggcgacgcagctggtcgggttcgacctgggcgggctgttgcccggccagctctacggcggcggaggcggcgcgatgacgagggccatcgggtcgctgatgcacggcggcgaccagcacgccgccctggatcacagagcgtgctcgaagattcccagattccgaatggaagacggcgggaagcacttcgtgttcgtccatggcctcggccacggcgcgtggtgctggtacagggtggtcgccgcgctgcgcgccgcggggcaccgcgcgacggcgctcgacatggccgcggcgggcgcgcacccggcgcgcgccgacgaggtgggctccctcgaggagtactcgcgcccgctgctcgacgccgtggccgcagcggcgcccggcgagcggctggtgctcgtcgggcacagcctcggcggcctcagcctcgcgctcgccatggagaggttcccggacaaggtcgccgccgccgtgttcctcgccgcctgcatgccggccgccggcaagcacatgggcatcacgctcgaagaggatctgacgctggcgacgatgctggtgaggcctggcaccaactacatcgatgatccgatcatgaaggacgagacgctgctcactgaaggcaactacgggtcggtgaagagggtgttcttggtcgccatggatgatgcttcgagcgacgaggagatgcagcggtggaccattgatctgagcccaggcgtggaagtcgaggagctcgccggagcggatcacatggcaatgtgctccaagccgagggagctgtgtgatttgctgctcaggattgcagctaagtatgactaa

SEQ ID NO: 35067 - DNA, 508 bp, Oryza sativa
  Clone ID: PAT_MRT4530_39022C.1
aataacccaccggctacaggaaaacagaactccataatattactcggatacgtacaacaagcgctatacataagtcacatagtgaccagcgctaactaactaacataactatgatgacggagacaaattaaacaacacgacaacagcgaacaagcttcttaagtattacacacacaagcgtgggacatacgaaatgcagccgtcggggggaatatgaccaggtcgctgagcatcacctggcggatcggaggcggggaaggcgaatgacgaccaccacgacgaccacgggagagctagggagaggaagcaagctaccagatgaaggtcatgtcagccgaggcacgggcggggccatcttcttcgcgggagggggagtggacgtggcggccctcggaggagcgagcaccatgcgggggtcctgcgccagtcgctgcacacgtttattaacccggcagttgtgctgcgtgcaccggtaatagctcctagggtgctgggtgttcctgacgac

SEQ ID NO: 35068 - DNA, 351 bp, Oryza sativa
  Clone ID: PAT_MRT4530_39023C.1
atggaggggatgggcatcgacagtggtgtggccagaggggaggccggcgtcggcggcgatggggaggcacgggggcggtttttggagagcgcaaggcgcaactactcactgttcatcaatatctacttcgtcttcactaacatgtcgaacactggaggtaacggcaagacaaggagaaggaggctccggtcaacaccaacagaggcaatactatctcaaactccagcggagaaccattcttgggaacaaatctggaggccagctgggccggccctggttcggccgaaccaggaccctggtgacgccgactccggctggcctgacattaacaaatatttagctatcacatag

SEQ ID NO: 35069 - DNA, 321 bp, Oryza sativa
  Clone ID: PAT_MRT4530_39024C.1
cttgatgggcgccgtgtgtggggttccataccgcgcggctccgggaggagagtcccctcacgctgatgatgctggagtggaaggattcgagatcgatgggcgggtgatggcttcgcggagctcgtcggcggcgtagtggcgcacgatgaggggtctgtgagcagccgcgacgaactggtgatttatttcctaactattccctgtaaattttattttattttattttcggttcatagagttctcgtgctactgaatatttcgctctagtgaattgtttagcttgttgctgctccacaaatcaaatagcagtaatactgaaaa

SEQ ID NO: 35070 - DNA, 834 bp, Oryza sativa
  Clone ID: PAT_MRT4530_39025C.1
atgccgtatccctgtatcgacgtatcgcgtatccgtatccgtatcaccgtatcgagtgtgataggccaggatgtcttcctcatcggccgcggggccgacgcgctcaccggcgtgactcgagacccaaaacctccccttcggctcttcgcccctcgctacctccgatttccaatggccctagccggagcccctcgccgccggcgagctacacgttcgcgtctcccccccactctcctcctcatcgtcctcctcctcctcggcggggctcctcgtgcttccgcgctccgcgtcccgcttcgcgaggtcgccaccctcctcaacctctcccgctccctcctcaaccgcgtcgccgccgcccgcgcggcccgtggagacgactttgcggcgtcccgcgcgcgcaggatcgcctcccatctctccctcttctcatcccgcggcgcgtgggcactctcttgggactacctccgccactacgccttctcgtcggctgccgggtgcggcctctcctgcgccaccgccgctgctcgcctcctcgctgctgctgcggaggtctcgcgcctgcattccgccaccgacgccgcccagtggctgcgccgcaattacggggacgtccgcgacgcggccgcgcagctcctcaacggtctccttgttgccttctccgagcaggggcctttacgagaggtggtgatggatgtgaagtgggaagtggaggaaggggagctgctgaaggattgcctcaaggtgggagctaaggacttggaggggttgcttgtcattgccaaagatctcttatttggggccacaaggacttcttcgcgccacaacgaactttga

SEQ ID NO: 35071 - DNA, 336 bp, Oryza sativa
  Clone ID: PAT_MRT4530_39026C.1
cccacgcgtccgcccacgcgtccgcccacgcgtccgctgagtatatgttgctcttctcctgaaaggtttctgcgactagaccgaaatgcaattctggaagcaaagccaatcaaaggtactatagcacgtggcagaacaccagaggaagatgaatgcctacgtttgcagttgaaatacagtgaaaaagatcaagctgagaacttgatgattgttgacctcctaagaaacgatcttggtaaggtttgtgaacctgggagtgtgcatgttcctcgcctcatggatgtggaatcatataaaactgtacataccatggtaagtaccattcgtggaaaccaa

SEQ ID NO: 35072 - DNA, 567 bp, Oryza sativa
  Clone ID: PAT_MRT4530_39027C.1
cgcacgagggttaatttccccctctgcaatgccagtgataacttgactgtaagaatttgtcgccggcggttagttctttgtccgtgcaccacgattttcactccagagtccatatacttgagtgcaaattaagctgcgtctccatcttggtatagtagtacttttcaaatgggaatattttacggctaatgtttctcctcttaattgtttgtgggttgtctatcttttgcttgttctatcctccaaatttgtttggatttggttggccaaggtcctcctccgtctggctatctctctcgtttgccaaacttttagatttggaaagattgacgggtggtggcatggtaggggacggcagattgacatatattggagcaagcggcaagtggtgctccggatatgatttttctggacatcatatctgcagcaagcgttttgcgaggaagtgctttgtctttttaacatgtgtcacgggttagcgtaggatgctattactcgcactagctaattattttgtttatctgaaaacgaacgccaccgttgaaatacgagtagatgcagtacatc

SEQ ID NO: 35073 - DNA, 288 bp, Oryza sativa
  Clone ID: PAT_MRT4530_39028C.1
atgcgcgttcctggcgcgcgggcgcacgaggggaagtccacctacgagtcacaaaaagaatggagggatctcacgcgcgtccacgtcgtgagtcgtgacgtgctctccttcctcgggatccccaccggcgcctcgtgcgcacgacagctggggaatagagaaactggacttggcggtggcgagaagcggcagaaatcatggacggcgcttcgtattaagcagcactgcatacaaagttatgttgatcgatggggtagtaactgctccttgcttttgctggtgaaatag

SEQ ID NO: 35074 - DNA, 838 bp, Oryza sativa
  Clone ID: PAT_MRT4530_39029C.1
ttttttttttttttttttttttttttttatcagcaaaagaacgttctcccgtgcttccagacatgctgagctcccaaaatttttgaacattacccttttttagttcgtctcttagaatatgaaaaagatagaaataatactatgtatcctacataatgcttaaaacaaaaatagtagatactacattatcacaactgaaacaactagctaggcaaaggagcaattgtcacaaatatctcgggaaataccacttgaggggaaaaaagttgtacaagctagccggagatgacacacacgccggcgacggcggcggcggcgggcgcgcgatgtgcctcagtcgtcggcggtggcgagctggaccttgagcagctcgtcctcggggatgacgcggatggtgcagtcggagcgcgggtaggaggcgcagagcagcgcgtagccctgcgccacgacgtcgtcgctgagcatgccgtcgctctggtccacctcgccggcgacgaggcgcgccgggcacgtcatgcacacgccgagcttgcagtcgtgcggcacgtcgatgccctcgtcgagcgcccgcgacaggatggtctcgccctcctccacctccaccacccgcgactcgccgccgtgctcgatcgtcaccttgtacgcccgcggcggcggcggcgccggagccgcgcgcagcggcgatctccggccggtggtggggccgacgagcctgacgcgcggcggggagcaggcggaggtggcgaggtggagcagcgaagcggcggcggcagccatggagagatagagcgtggaggaggttttggatggtgtctcctgccgcctcccgcagcccggg

SEQ ID NO: 35075 - DNA, 426 bp, Oryza sativa
  Clone ID: PAT_MRT4530_3902C.1
atggtggcagagtatctgatagtgaagggtcagatcaagtctcctcggatgatgaagatgagtctccccgacatctcggcgaggaagagatggaatcaaaggcatgcacccattgtggagaaattggacacgttgctagcatgtgtctcacagtctgccctcattgtgaagaagaccatccaccaggggagtgtcccacccgcaaggtcgcatgttttctatgcgaaggccgagcaaagggcaatcaacctcaggagggcgataccaagcagaagaccgtcatccgcttcaaccagcaatcagaaggaagtttctctcgtgaatgatagcaatatgcagtcctatcacatcatcacagaaccaatcaaggatgatgtagccactagaacaatgctagctatatctctccagaatcagaatgagtag

SEQ ID NO: 35076 - DNA, 511 bp, Oryza sativa
  Clone ID: PAT_MRT4530_39030C.1
gttagacgctcttagtcaaagttatagacaatatcaactacaatcggatatcctgctacagcaacacgtgctcagcccatgcaatgagatcataaggcaacagcatatcatagtggcaacccccttatgacaaccagctacgttgcaatggataaacaaccaagtcatgcaacagcagtgttgccaacagcatatgctgatagcgcaacaatatcactaccaggccattaataccgatcatgctattgtgcagcaactacaactgcaataagtcattgttgtctactatgatcagactcaagctcaagctcaagctttgctggacttaaacttgacatacatatgtcgtatgtatgctaactactacattgctcctaggagcattcccaccgttggaggaaggctggtactgaattgtaatagatataatgggatcaaacgttaaaaataaattactgcatcatcatgcttgacagatgaaacttgatgtctttgtacaatcagtggaaat

SEQ ID NO: 35077 - DNA, 203 bp, Oryza sativa
  unsure (1)..(203): unsure at all n locations
  Clone ID: PAT_MRT4530_39031C.1
aacgtggcagaaaatttttcatccattatttntccatctngcattccgaaagaagaccgntagttaggggggaaaagtgtaaaaaaagncccaaaacggtcaaaacangngtgtcgttcttccaacacgtacggacggtactccacttggacgtaaaacccnctctagangngggaaaaccggnccctatnnnttgggttgca

SEQ ID NO: 35078 - DNA, 1199 bp, Oryza sativa
  Clone ID: PAT_MRT4530_39032C.1
ataccccggctcgagtatgcattttggggtttttccactgaaaatgagatgagacagtgcagcagcagctactactactacaacagagtagtactagtggggggagaaattacagatatgccctccattagcttaccacggccgcggtgcggggggcaggagggaagggggtcattaattaattaacgcggaactgagcgactagcggctaattaatccatgggatattgctagttgaattagagctaattaaaccctagtgattaagggaactcattagctagctaagctaagctaggctaaggctaagctagtgtgtgccagtgacagtgggtctggctgtctagctagacgctgatcggtgaaggggagggggaggacacggcggcgcggggcggggagtcgtcggtgtcgtcgtcgtcgccgtcgccgtcgccgctgatgccggtgccgaggccggtgccgaggccgatgccggcgccggggttcatgacgccggcggcggcggcggcggcggaggtcggggaggaggcgagctggttcttgtggttgtgcatccagaccttgaggacgtggcgcttgacgccgatctcgacgcagaagcggtccagggcgccgtcgtcgttgcggttgatgcgccacccttgcttctcggcgaactcccgcatccgctccttctgctccggcgtgaacttggtccggaaccgcttccgcccgaagatgccgccgccgccgctcccgctcccgccggcgctgccggggccgaagtcgtccatccgcgggggcgtctccgagccggcgcggcctgccgccgccgccgccgcgtggtgccacgccgcggcgggcacggcgtggtacggcagcgcgagctgcggcggcggcgccggcgccggcacggacgacgggaggaagccctgcagcgcggcgtggtgcgagtgcggctgcggcggtggcggcgggcggaagaacaccggcccgccgccgatgcccgcggcggcgcggcggtggaagctgcggtggcagccgcacgcggcgcacttgagcgagtcgggcgacgccggcatgtactccccgcacccgtcgaacgcctgcccgcccatcgccgccgcgtggttccgcatgcactccttgtacttccctccacctcctcccccgccggcgctgccgccctcgtagggcaccaggctcaggtgatccat

SEQ ID NO: 35079 - DNA, 948 bp, Oryza sativa
  Clone ID: PAT_MRT4530_39033C.1
attgcttatggagaggttctgatataaattctagtaacaaatccttggttctttgggatagagtttgtcagctgaagtcttaaggaggtttaggagtaattgatctcagatttcagaataatgctttgtggatgaaaaatctccatcagatttataataggcatactgttcgtttggtaagtttgatatggtctacttactataatggcaaagtcccacatgctttgtctttaaaagcaagaaatcataaggactcagttcatcagacttccacaaaggatctgtctcaaatctttttgctcccaatgacagagtaggcttatcaacaatttcttgcaatgcaagctgcagatcctttggatcagctctcagatgactgccatatggtcttatgctagggttaatgatagattctcctctcagaaagattaagccataatctttatgcatatacaatctctaattatttaaattggatctcgaagagcaaatgtactatgaaagtcaaggtttttggttggcttcttttgattgatcgattaaatactcgagataagcttgatagaaagcattgtgcccctgatggaagtgatcttacttgtgtgatttgttcatccggagctagggaaactctgcaacatttgttcttccattgcactttcagttcgcaatgctaggcgcaatttggtttagtttgggacttatatttattctttgaagatatgttacaacatgcaagaggttcttattgatcatctcattttgtggagaagattttatatgcggcttggaatatttggaagcagcgaagtaattggctatatttttgataatgtgccatcctcagtctcctcttggatgacattctttaagaatgatctgtcgcttcttgttttttttttaaatgcagatgagagatcaacatttatttcctggttaaaccagttg

SEQ ID NO: 35080 - DNA, 291 bp, Oryza sativa
  Clone ID: PAT_MRT4530_39034C.1
atggcctctgccctagccttcctggcgctgcactcccctctgaaggtggaggattatggcttaatctttctgagaggagaatctatcattaaccctagcataagaccatatggcagtcatctgagagctgatccaaaggatctgcagcttgcattgcaagaaattgttgataagcctactctgtcattgggagcaaaaagatttgagacagatcctttgtggaagtctgatgaactgagtccttatgatttcttgcaaaagaatgtgccctgggatagagtgttgatctaa

SEQ ID NO: 35081 - DNA, 2707 bp, Oryza sativa
  Clone ID: PAT_MRT4530_39035C.1
ggaatcggcacgaggcgccacgacagccgcgcccccaccaccgccacgccgcgacgccgcatgacggtgtcgcgcggcccgccggggcggccggcggcgtcgtcgggctgcctcgggtgctggaggaggcgcccgccgctggggttcggcgccaaggtcaccatcgccatcgcgctcggcctctccttcgccatcgtctggacctccctctccccgacctcctcctcccagcagatctccaccgagcgctcctccttcgccgccgacatcgtcgaccctccccccgcctcccacaaccatactgccactaccaccaccgccgccgccgccgccggcggccacaggaagccccgccccactacctcccgcagccacaagaagcgccatcctcccgccggatcccacccccaccgccccaatgccaccgcctcgccggattccactccggcaaacgcggatcacgccgtgcagtcaaaacccgccgagccggagccggagccagggactgagctagaggaggaggaggtggagcaagatcaggaggagaaggaggcggaattgcccatgcccgaggagagcggagacgggaaggcgcccgaggaggaaagcgagaaggcgccggagctggagctcgacgagctcagcgagggagacgggtacggcgaggaggcggaagaggggcagaagaaagctccaaagaagacgaagaagcagccgcccttgttcagctcgtctgcacattaccactggaagcactgcggcgccaagagcggccaccattacatcccttgtgtggattttgatggggatgggagccagaggcaccgcgagcggagctgcccgaggttgccggcgacgtgcctcgtgtcaatgcccaaggagtataagccgcctgctccgtggccggagaggaaagagaaggtttggtatgggaatattggacatcctaggttgtcaagttatgttaagggtcatggctggttgaaccggactggcgattacttgatgttcccacctgatgagtgggaatttaaaggtggatcaaggcattacgtcgaagcaatcgatgagatggcacctgacattgactggggtaaaaatattcgagtagtactggatattggatgcaagagtgctggctttggtgtcgctctacttgagaaggatgtgataacactatctttaggtcttacgaatgatcaaactgaccttgcacaagttgcccttgaacgtggcatccctgcaacagttggcagtcttggatcaaaaaggttacccttccctagtggtgcatttgatgctatccactgtggtgattgcaacataccatggcattctaatggtggaaagcttctcctagagataaataggatccttcgtccaggaggatacttcattatatcaagcaaacatggtgaccttgagagtgaagaaggaatatcagcttcaatgactgctatatgttggaatgtaatagcttacaacagtgatgatgtcagtgaagctggagtgaagatattccaacgaccaccttccaatgatgaatatgatctgagagcaaaaaaagatccaccattttgtaaggaagaccagaacaaagctcctgcatggtatactctgatcagacattgcctgcataaagctcctgttggcattgaagaacgaggcagtgaatggcctgaagagtggcccaagaggattgagacttttcctgagtggcttggggacttgcaaacaagggtggaagctgatcataaacattggaaggctgttgttgagaaatcatatctggatggattgggaattgattggtcaaatatccgaaatgttctggatatgagagctgtatttggaggatttgctgctgcactggcatcgaaaaaagtttgggtcatgaatgttgttcctgttcatgctccggacactttacccataatctacgagcgtgggctgattggtgtctaccatgattggtgtgaaccatttagcacatacccaaggtcatatgatcttctacatgctgaccacttgttctcacgcttgaacaacagatgcaagcaacctgtctcaatcgtggttgagatggaccgaattttgaggcctggaggttgggccatcatcagagagaagcttgagatccttgatccattagagaaaattctgaaatcattgcattgggaaatagtgatggcattcaggaaggacaaggcgggcatcatgtctgtaaagaagacgacttggcggccatgatctaatctgttgatacgagtctcccgacataccaattttgaagtggtacaggcgtacagctattgatttcttaatctgggttaaagatacacgattgattcattgtttgcaccaacaatatgctagccatctactacctgttgtagaatacttctggagcatcccagttccaggcgcgaggaagagaccctgaaattcaggctggatactgaaaaacagggttgtacaagctgtaacatttagcaattgtttgtatttcttgtaaattgtaacaatatgtaaagattgcaacaattgcttggtgctgtttaaaattgtaaaaatgtgtgaatactgtacgtaagacgagaacaaaaccttttcctgtattactctctgcacttgctcttccacaagaaagcatgcaactcaaattgcatgtaaaatgttggaatacaaacagtgtttcctactgtcc

SEQ ID NO: 35082 - DNA, 467 bp, Oryza sativa
  Clone ID: PAT_MRT4530_39036C.1
aaaaaccaaaaaggggggctttaggcccaaacttttattttgggtcccccataaaaaacaaaacacaaacgaaaaactttgacaaaaacaacggaacataataagaacccatcccccccccccggaaaaaatcccccccggggacaacccccattttatacaggatcgatccagactcaaaacgacccaaaaacaaattcaaacttgccccgaatttgaggggaaaacctccataaatagccccaaggggaaatctttcccggggttaagggacccctccccggcgtctccggggggggggggggggaaaaggtgtccttgtgggccccgtcgtgggggccggccttgttttgggtcatccccagggggctaaaaaccgggtccttggggccaaccaccgggcttttaaccggctcactcccctggggaaggaccctgccggttttgtccttgccgggaagggcaaa

SEQ ID NO: 35083 - DNA, 928 bp, Oryza sativa
  Clone ID: PAT_MRT4530_39037C.1
atgggcgacgccgcctccaaccaacctgttcttgcggcgagcgatcttggccaatcgaacttggacgccggcgccggcgcgggagcagtcggcggcggcgggttcatcgccctcgacgtcagcgccctctcctcgctcgccggcgacggcccggacaccacggcggcgccaccacggacaccgaaggtggtgaggtcgctgtcgaggaagggggaaaggaagccggccgacggcgacggcaatggcgccgccgggacaggcaagaggccgccgctgtcgccgctcttcgtgcatgtggcggccgccgacgacatgggcggcctcggccggctcgtccacacgccggtggccggcacgccgggagggaagtcccggcggctcgggcggcagccggcggcgccgtggctcgatccccggagggtggtcttcttcttcgccacactgtcaagcgttggaacgttgatcctgctttacttcacactctccatgagcaagatgggcggcgacagcggcggcggcggcagcagcgatgctcggtgaaacgccggctgttgaaactgaagaaaaattttcgttttgttctcaaacctcaatgcaatctgtaaaggaggcatgatgttgctacaaagacccaggcatcaaaaaaactgatgctcttctaagggtcaaggaagaatatagagtgaatggcagtgaagagatcaggctgaatggggtctgatggtgaagtatgcgatggtagttgcattctcttctctgttgctgtcatgatttcttcagttatttttctcttctttttttgcataaaaaggggtacatcatacatgtcgctttgaagcgatgatactagatttttcatccttgatgttgttgcagacacacaaacaatcaaaaatacaaatggacacagatgtatttgaaagaattg

SEQ ID NO: 35084 - DNA, 829 bp, Oryza sativa
  Clone ID: PAT_MRT4530_39038C.1
tcaaatgttataccatgagtgttctgaatccaggttattatccgctggttttaaatgcaatataggcacgcgaatctgaaagtgatctattctttgtgtgaataatttcaggatgcagtgactaaactgttggccttcgacccacacaaaggtgatctggtcaacttcttccaggaagtttttccgtcctagctgtagaccaggctgcatggaaccattgtctccaacctcgagatccttaaccctcaccgacttctccacagcttccgtctccgtctctacttcacgggctagaaccgacggcctcgagcacgtcgccactcgccatcggatccagcagatagaggctcgacggaggacgctgccgccatatccaatagagggaggcgtgaaggagctcgctggaggtttcggcgactgcccctctctgcgccaccgcctccaacctcgccggccaccggattcctcctcactggtcacggattccccatcttggctgcttctcttcccttccttcatcagccaaaataccagtggattccggcggccacgagctggatgctgccagatccggcagccgcgggctcatggccaccggatcctgttgctccgacagctccgaacagcagcgcacacacgacggcgaacggcaggtcggggcttcggcggagcggcaggcctagcgacatcaacgaagctcctctcctctctgtttctttttctgtttttttttcttttcttttttcaccgactagcaaaccgtgaccatgaaatgtgggaatataatgatgtttactgtatgcattgctaattatttcacttattttat

SEQ ID NO: 35085 - DNA, 648 bp, Oryza sativa
  Clone ID: PAT_MRT4530_39039C.1
cggatgtcaggggtcctctgttctcatctctggtcagacgctcctttctactgggatacccctccgctaggcgttgagctgtcaacgattaggaccatccgtggccataccgagcgcatcactcctactactgctccaccgactctgcgatgccgccggcgaccgccgacgtcgagctccgcgcggcacagactatatgtatctgtgtatgcatcgcttctggacctggagcaaatcccatacttctagcccgttctttccctgctaaagaacgccgtgctttctgtgcccctctctgagtggcgtccgcagctaaagttgctctggctgaagattacaccgcctggctcaaagtcgagacctacccgcgatgactggactgatcacgccgcgccttgtgaaggagagacaaaacacacaacaaacaaagctgcagtgcttgcgtatctgcagcgcatgaacaagagatatctctacaatattgatcttgttgcgaccattagcctcatcttcgatagccttaggatgaatctgagcatcaattgtgaaagaaacccgccacctctggtgtgcctctggttcagaatggtcacaacagtatctcctccttactgctctgtgactgagatggccgttcaatgaatggat

SEQ ID NO: 35086 - DNA, 787 bp, Oryza sativa
  Clone ID: PAT_MRT4530_3903C.1
gggagaagcggcggggcttggggcggcgcgcggctcggtgtgacggcgatggcgacgcgatgatgacgcgatgcggcagcggcgcggggcgcgaggcggcgacgcgatggcgagcggggcgcgagacggcgcgcggggcgcaaggcgacgggacggggcgacagcggcgatacgataggcgcgcggcgtggcgacgggacagtcgcgcggcgatggaatgggcgggcgacggcggggctcggcgcggctcggcacggggctcggtgtggcgacgacggcgacgcgacgggcgagcggtgcggcagcgggatggcgatggggacggcttggcagcggcggcgcgcggctcggagcgacgaggggacgcgcgcggcgacgggacgggtggtgacggggcggcagcggtggcgcgcggcacgaggagggatgcgatggtgacggcgcggcagcggcgatgagatggcgatggcgacaggcggcgaggcgatggaacgggcggcgcggcgcggtagcagcggcggcacggggctcgggggagcggcgcggcacggggcgcgaggcgatgacggcgacggctcggcagcacgcgcggcctaggggtggtgatgtcggcgcgggctcggggtggctcggcgacgtcggcgcggcggcaggcggcggcggcacgcgcggtgatggcgacgacagaggagaggcagagcggcgcgcggcgcgcggggcgcgggggcacgcggcagaggaggggctagggctagggaacgcgatcgaacacctagggggcaatgaa

SEQ ID NO: 35087 - DNA, 593 bp, Oryza sativa
  Clone ID: PAT_MRT4530_39040C.1
cgaaaatctgttattctctcttgttcttcgtctcttcctcacaaaagcattcatcatgggtttcgctgacattctcaccgacgctggccttgccatgcttgacagctggttgtccacgcgctcgtacatcgttggcaactctgccagccaggccgacgtcgtcacctacaaggccctgagctctgctcccgacgccaccaagtacgccaacgctgctcggtggtacaagcacatcgcctcgttcgaggatgagttctccaacctgcccggcgactccaccaaggcttacaccgagtacggccctgacaagaccgaggctaccctgaaccccgccaaggcccccgctgccgaggaggacgacgacgatgtcgacttgttcggaagcgacgacgaggaggaggatgccgaggctgcccgtgtccgccaggagcgcctcgacgagtacaacaaaaagaaggccgccaagcccaagaccatcgccgagtcggttgtcactcttgacatcaagccttgggatgatgagaccaacatggtcgagctcgaggctgctgtccgcgccattgagcaggacggtcttgtctggggtgcctcca

SEQ ID NO: 35088 - DNA, 316 bp, Oryza sativa
  unsure (1)..(316): unsure at all n locations
  Clone ID: PAT_MRT4530_39041C.1
cactccgatcgcaaatactctctctcgccgatagcagcagcagcagcaatggccgccctcgccggcgcatccaccgccttcgccgccaagccgcgcctgggggcgcgccgtcgtccccggccgcgggttntccgtgtngtgctccgcgtcgggaacaacggcggcgcggcnagatggcgagtcgctggcggcgtcggcaagacgtntccgggcgtggcgtgtcctcggtgtntctctcggcggcgcgtngcgcncccgcgcggcggcatagcagntgacgcgtcaagagtcaagngtcgtaggganaagagtcata

SEQ ID NO: 35089 - DNA, 510 bp, Oryza sativa
  Clone ID: PAT_MRT4530_39042C.1
atgccgtcgcccgcgccggtctcgccctccgcctcgccggagttccttcggcaaccccttccgccttgcccgtacgccgaccgacgtcgccgtcttctccggcatcgcagcggtaaggtcgccctcgggctcgcctcccttccacccgaacaccgccgcgtattccgcgccgtcctcgtctccgtgcagccgctgccggcttccctcgtcgcctcctcgccggcccggtcgtcgtcgtcatcgtcgtcctctcgtcgtcctcatcgtcgtggcgttcgtccctccgtcaagccgttcgcgttcgtcgtccgcattccgtcaagtgagccgctgcagccccatcatcgtcttcgtcctcggctccgcgtcgtgaagcctcgtgccggccgcgtctcgacttcgtccaaggatcgccaccgaagtcgttccctcgccgttcgcctccgtcgtccccgagccgactccgccgtgctcgttcgttgtcgtcgtgccgcgcctcgtcgcgtggtg

SEQ ID NO: 35090 - DNA, 327 bp, Oryza sativa
  Clone ID: PAT_MRT4530_39043C.1
cctaacctgtacctgaagaacttggatgatggtgttgatgatgataagttgagggagctttttgctgagtctggctctattacttcctgctgggtgatgcggcattcatatggtgtcagcagagtgcttctgcatttgttgcgtctaaatctgctgcaaatgcttcccgagctcttgcccaaatgaacaggacgcaggctggcaccacacccctctacgtttcgcttgcccaccccacgcaatacaggaaaccaatgctgtttgcccaatttttacaactgctgccccttcccactttgctcctttcacttttccctctcctcccca

SEQ ID NO: 35091 - DNA, 197 bp, Oryza sativa
  unsure (1)..(197): unsure at all n locations
  Clone ID: PAT_MRT4530_39044C.1
tgttttttaaacaaaagggtactaaccttccttactagccagctaaaccaaaaacatcactattaacacaaataccacaaaacaacaatcacaacaatcagaaaaccgatacatccacatacaaacatggccaagagcacacagccagataaagctatctaaaaccagaactctatgagatggtgccctaangacac

SEQ ID NO: 35092 - DNA, 382 bp, Oryza sativa
  Clone ID: PAT_MRT4530_39045C.1
agcagatgaagatcaggacatcgcggagagcaaggcagcacactaagaggagtacttgaagtacactcgccgaagtgagagcggtgacaacatctacaggtgccaggcgtatgcccagacactggagcagtgttgcggggtaggcagagagatgcgaatgggcggaagaagtggcgctggactgatgtgactcttagcattgtgacgcgggtgatgacgactattatataggaggtgttgatggtctagaggccgccacgatatggtcaaattattccagcgactgtttagtgtgaatgatcgacttgaacaggaaagcccttggtatattatttcagtgaatagggtgtgcttggtgaggacgatgcctcggctaagccgt

SEQ ID NO: 35093 - DNA, 360 bp, Oryza sativa
  unsure (1)..(360): unsure at all n locations
  Clone ID: PAT_MRT4530_39046C.1
cccgaagtcatcatcgacctagagtcagtatcggcttcagagtcttggaatcgatcgatgagagttataaaatcgccagcagttgtgttcttggtggagtnggatcaattaaaggaaatttatttagaagagtccgaattcaaagacgatgcagcatgacaagtgtttctattaattaggaatagtttgtctgttttcttttatctttaggaaggtgtgtttagtatccgataagcactttatgttttccttttatccttagtaaagtctctttcttgtcctataaggactagtatctccccatgagtataaatatgtacatccggggtcattataaaatatcttttgatcaatacaact

SEQ ID NO: 35094 - DNA, 394 bp, Oryza sativa
  Clone ID: PAT_MRT4530_39047C.1
acatcatggggccctcctaaggggtttttaaaaaatcgcagattctagttggccaaagaatatgtccaggaaaaggggcaggggggtttccattttggcagccccaacaaatttaacattgcccaaccaaccccatacaacaaaggtgcggccctacttttttttccccggggaactattcctaatatatctaaggaacccctgcgtttcccatgaaacatatttaatttgaaaacagtcttacccaaggcagctggtaaaattaatggcatctcccttagcaggggaagcatttgtttaatttggcatagccctggctggggggtcttaagttgtcttggatgaagcccccccaagggcaaggttccccaagttcacagccattgcatttttt

SEQ ID NO: 35095 - DNA, 120 bp, Oryza sativa
  Clone ID: PAT_MRT4530_39048C.1
tcctgttgaaattcatcacaaatgccagatccctgcaaacctggactggtttgggtggtgcacttgggatgctttttataaatctgtcaacccagtgggaattgaagagggccttaaaag

SEQ ID NO: 35096 - DNA, 345 bp, Oryza sativa
  Clone ID: PAT_MRT4530_39049C.1
ttggtggtttttttttttttgtttttttttttttaattgttttttttttgttgtgggcagcaaacaaaattggaaaccaccaaagattggcaccagcagctcccagggacgggaatttcggtttgattgcctttggcaggcgatacccatcttatagtgggaatttatttgtgcaaaaagggcacacctgaaaagctggcgctccaaagtggacaattttttcaaggccaaaatgataaaggcaaagggccccttggttggctatacccgcccctataacgaatggtcccagggaggctttggtgggggcggcgcccagggggtcccttggttcagattttttgg

SEQ ID NO: 35097 - DNA, 568 bp, Oryza sativa
  Clone ID: PAT_MRT4530_3904C.1
cccggcggcgcggagttggggagccagcttgccatggctcagagcactctcgccgatatagagcgcttggtgcaagatcaggccagggagattgcggcgacccttctcataacctcccttttacccaaccacaccacacctaaaatttcaccccactcctcgcaaggcagcgggcagtcccctctcgtgcctaggtgaatccggaagccgcataggccgtcgcagggcccatccaaattccatcacacccacccttgcctgatgcgtcggctagaggaaagctacactacaagcccagctgttgcccacgctggcttgtggtaagcacgataaattcttccagggtttcccgtgaccggttcttaattgccatgggcacgactagcaaaaccatgcacccacagcccaccatgaagtcacattttagtggggtaattacgaccatgaagcatggccagatgtctcgagcatgcagctcattctgacactaaaaaggtctaatactataattatcccatcaaccgggctagtggtaattaagcatggctaagcatatagttctagctag

SEQ ID NO: 35098 - DNA, 1535 bp, Oryza sativa
  Clone ID: PAT_MRT4530_39050C.1
gcaggaattcggcacgaggcccccggccacccaagcaggcccccctccctccacgacgggcagcgcgcctcgtggagtgcacgcacgcgtcagcagcagcgtcgtcagcgtcagcggcatcagcatcagcatcagcagcagcagccgcggccggagatcgcctccccgcctccccccgcgttccaacgcgccccgcgcgcggaagctgcagcagagtacattttgtggctagctttatactaagaggggtcgaattggaggagggctacactacttggtggagattttactgagattctacgttgtgtttcaattacatttacatggcatatcttttctaagacatgccgtcctctacgccaccatcagtgcaacctgcaccaactgtgcaaccattaccgtcatccacggcaggacagagcactcgtattgaccttcgtgagattaagtccaacatcattaagaggattgggccagggcgagcaaagaaatactttcagcatctagagaggttcttatcatcaaaattgaacaaaaatgagtttgataagctctgtcttgtgacacttggccgtgagaacctcccattgcacaatcacctcatccgttctattctccacaatgcatgccgtgcaaatggtccaccggcaattgatgcgcccaagttagcaggagatgtttctaaatcagaacagatacttcatcctgtttggaacaatggtaatgtttcaatccagcatgtcaaagacaatagatcattgaccattgagcaggagggagcgcctattatcagggagaatggtgctccaaattttagtgatctgaagagatgccaacaggttcagaacagtgagcatgctgagccacgtaacaagcgattacattatgaaaaggagccaccgagttttcttgagccttcacacagcaatggcccttctgctatatcttatggtgaaaactcgggagaatcttcagccattgcttctgtccctccaaatgatagctctgttagttgctatgaacttggtgagttatgtgatactatgctactgagtaagaggatggaaaaagttgcagaagcagcagctagttggaacaagatcacagcttgggaaactaagccatgcatcactgaagcagcagttgtcacggcaacctgtcagaataagcaaagatctgcttatctactggggtctgtactatttagagtaggacccatccattgtgtgcctctaatcaacagtaacgaggcattagtgcttcatacagaactatggtgctcgactccaaacaaattgaggagccataacacagaattctctctctgcgtgctgcagccatggacttctcgtggttgcccatggggatggaaaaactatgaaaatgggagagcttgtagggggttttttgcaaacttttagttagcaaaagtagggattatttataaggaatatgcgcatagaaaaatgtaatgttcttttgagaaatgaatattccttcccttcaaaaaaaaaaaaaaaaaaaaaaaaaaaaaa

SEQ ID NO: 35099 - DNA, 696 bp, Oryza sativa
  Clone ID: PAT_MRT4530_39051C.1
atgtgggacccacatgtcatcctccctccccttcttcctccccttctctctctctccctcccttatctctctttctcaggactcaggagcggcagcggtagcggtggccgatggggacgaggcggaggggagcggtggcggcggggagcgacagcggcggcggtcgggagcggcgaggtggcggccgttgacgaacatctgggggagggtcacgtggcggcgttgggggaggagcgcggcgagctccaggaggaaggccgagtccatggagaggtcccgctcgtcgatggcggcgcggagcccccacaggatggtgcgcacggcgtggtagtcctcgtaggtcccacggagcgacatgtagtagagcaacacccgcggcccctcgccatcaccaggcttgctccagatggcggccgccgcttgcggctgctaccctgcgggttggaggttgtggaggacgcgcagcgcgcacgcggtgacgcggatgcggtggaagacgtgcggcggcgacagggagagggaggacaacgcggcatgcgagtaatcgaagaggtcgaatgtcctgatgcagtcttgaacgatgccgacgtaaacgatacaattgtctggaccggcggaacattggacttaccccttagctggagatcgaacaccgatgcagccccacgtcaggtgccaagtcccgccgaacgataa

SEQ ID NO: 35100 - DNA, 1002 bp, Oryza sativa
  Clone ID: PAT_MRT4530_39052C.1
atggagggggcaccaaggaggcatggtcggcctggagaggaactgagatatgaagagagggcacatagacatcgggggtgggaggtggggaggggtggcggaagaaccgacgccccccccaagctggtcgacgcgctgccgactcgaagccggaagccgctgcccaccatcagccgccacccaagcgctagactgccggccaccacgagccgcatcgaccatgccgctacgcgccggacacgccgcctctacatcgcgtctaccgccgccgtcatcggagaagatcttatggctgcggggccggatctaccactgccggcgaacgtcgcttcccccgcgccgcatcgtggaggccctgttaccgccatcctagctttgccggtggcgttgcaagatcaaactgactggcacgcccgcatctcatcaatctttggacctgcagaggagttaagcagatctcccaggccggcctttctcttggccagagcgtgggggagagcggcggcggcggtggcggtggcggtgaggagcggcggtggaggcggtcaggagcggggacgggtcaaggacctccagtccctcctcgtcccaaagggcgcccaccacccaccgcatgccgcgttgtcctccctctccctgtcgccgccgcacccgcaagcggcggccgccatctggagcaagcctggtgatggcgaggggccgcgggtgttgctctactacatgtcgctccgtgggacctacgaggactaccacgccgtgcgcaccatcctgtgggggctccgcgccgccatcgacgagcgggacctctccatggactcggccttcctcctggagctcgccgcgctcctcccccaacgccgccacgtgaccctcccccagatgttcgtcaacggccgccacctcgccgctcccgaccgccgccgctgtcgctccccgccgccaccgctcccctccgcctcgtccccatcggccaccgctaccgctgccgctcctgagtcctga

SEQ ID NO: 35101 - DNA, 447 bp, Oryza sativa
  Clone ID: PAT_MRT4530_39053C.1
atgcgctccgtcgccgatggcggcaagtgggtgaagcataagtcaagcgggatgaccaccttcccaaacagccactacaagtcgccgtcgacgccgcacgtggtgcctctccagctagtgtacactgcgaccttcagcctcgccctgcacgactcgaacatcgagggtttcgcgcaatggcgcatcggcggtctagtattcagccttagagaggtgaaacaaggtggcaagacagcaagagcgcccaccactggcaccgatgccgccgtggtcgtcccttgttgctcctccgacaacggatctctactggactacttctatgctgttcaccgcggctccaaagagtccagtactctacggggagcagatacagcatatcatggaggaatgtcttcttcaacgtgctatcttcttgaaaaaggatgcgcctgctgccctgcaccatag

SEQ ID NO: 35102 - DNA, 237 bp, Oryza sativa
  Clone ID: PAT_MRT4530_39054C.1
atggccatcttatgccacgggagccataccggtgtcacaccgtacacgacacagctgaggctgggtagtgtcatatgggagttgaggcgcggagttccttctttcggcggccgacggaggcaccggcgggcgacggctacctgcttggtggccaaccggcgaggtgctccggaggacactccaccggcagcaacaaacctggacctggaggattccatggatggtggaagcttgtga

SEQ ID NO: 35103 - DNA, 243 bp, Oryza sativa
  Clone ID: PAT_MRT4530_39055C.1
atgaggagacgagttcttgccgtgttcgtcgtcgtcatcgtggtgatcatggcggtcgccgcttcccgtgctgacgcggcgaggccggcgccggaggaggcggaggagcggctggtggactgcggcgaggggggatacgagtcgatggtgtacccggcgatggtggagaaggccaaggagacggtggagctgctgctggcgaggttgccggccggaccgagccccaagggacccggtcactga

SEQ ID NO: 35104 - DNA, 181 bp, Oryza sativa
  Clone ID: PAT_MRT4530_39056C.1
cttggcatggaactggcagattggtggcattgtgcccgccgctgttttcagatgaggttggagatgtaaatgtcacaaagaagctcctgatgggggatgttgatgtcaatgaagccgatcctgaaggaaacacagcacttcactggtgccttagtggtagttcaagcacacaggagccaag

SEQ ID NO: 35105 - DNA, 4544 bp, Oryza sativa
  Clone ID: PAT_MRT4530_39057C.1
atgaaatccatggaggagcgcttgttggatgccatgaatgcaatggctgccaaggacgacatcgccacgcacttgatgtagattgacctcaaactcgagcagcagggcgagcggttgggtcgggtaaaaaccaaggtggatctctccttgacctcccttgaccaggtgcagcaagagcaaacttgggtctaacgggctctgaaggcggtcattgtggcaccatcaccaccgccaccgttgccgccggaaacaccacatcaagcgccaacctcgtctgaaccacaaccaccaccacctcctccattgggtaccttcacctcattactctccgggtgattgtgagcattgtgacatgggtcatcgtcagtggactcctaaaatggattttccgaagtttgatggaaatggggttaaggtgtggattgataattgtgagacttattttgctttctatcaaatcacggaagcatttctagtttcagcaacatctatgaatctcatgggtgatgccgcaaattggtatcagacatggaagttagaagtgggttggcatgattgggagatgttgaaaactgctatttctagggaatttgatgtgcacctttggtctgtgaaaatggatgagttactgttactcaaacaaactagcacagtgatagaatattgttcaaaattcagtgaacttgtttatcagattcgtctctatgacccgctcttgtgtggttctgttttggtttctcactttatgttgggactgaaggatgacttgaggtctttcgttcaggcagctcagcctactactgttacccaggattgtcttgttgctttggctcaggagggtgctcatattggacaaccaaggaagaggtttaatcaatgccgagataatgctgttggtagaggcaatgagaaacctaagttggctcgtggtgagttgtggaaagcacagcagctgaaggaatatagaagggctcagggtctgtgtttcaaatgtggtgataagtatgtttctggtcaagtctgtgtcaaacaagaggctgagttaaagttgctgtgcaggaagagccagtgatcttgtttgatgatattttggatgctgtcactgctcctgaattggtagaagaggattttaatctctccttgcatgctctagctggtacctgttcttcggctactgttcagctgagagcgctggtgggtaatcaggttattctgatttttgtggattctgggagttcccacagctttgtgaattctgatttgtgtgccaagttacagcttcctactactgcaactctacctatttcagttaaagtggccaatggagaggtactgtcttgtgatgccaagattccccaatttacttggtgggtgcagggatatcatttctcttttactatgcgtcttctacccatgggatgatatgatgtggtgctaggcatggattggttaacacaatatagtcctatgacctgtgactaggctgcaaagacaattcagttttcctatcagggggctgaaattattttgcaaggagttgcctctcctattgtaattgaagtaactgaagtctcagcaactcaggtggttaaatgggatcagggtaatgatatatgggctatggctatgcttgaacctgttgctgcactgtctagttcttcttctgaatatcctgctatacagcagctactgcagcagtatagtaccctgccccctgatagggtgctgaatcattcaattaccttgttacctaattctgtgccagttaattcatgaccttacagatattctcctgctcagaaaggtgagattgagaaacaagttttcgaaatgttgaccgctggactcattactcccagttgtagcccttttgcatctcctgtgtcgctggttaaaaagaaggacaacagctggagattttgtgtggaataccgcaggttgagttctttaacaattaagaacaaattcctttgcccatagcggaggaacttttggatgagctagctagtactaagtttttctccaaacttgatcttaaaagtggatatcaccagattagaaagttggaggctgatgagtataaaactgctttcaaaacccatcatggtcatgtccaattcagggtgatgccatttgggttaactaatgcccctgcaacctttcagtgtctcatgaattctatctttgctcccttcttgagaaaatttgttttagtgttcatggatgacatattgatatgcaacaaatctttggaggagcatggtcaccacttagagctggtgttgtagttgttacagcagcatcagttatgtgctaagttgtccacgtgttcatttgccacttctcaattggaatacatgggccacattatctttgctgaaggtgtagccacagatcctgagaaaactcaagctatggcttcttggcctattcctactaatgtcactcaactaagatggttttttgtctcactgggtattatagaaagtttgtgcaacactatggcattttggctaaacctctcaccatgttgcttcagaagaacactaagtttgtatggactcctcaagctcaggaagcttttgcagctctaaaaactgctatgtgtactacacctgtccttactctccctgacttttccaaaccttttgttctggaaatcgatgcttgtgctactggcattggagctgtgctatctcaagaagggcatcctgtggcttttacaggaaagcattgggcattgctaatcagaaattatcaatttatgagaaggaatttttggctattataatggttgtggataagtaaagatcttatttactcactagtccttttgttattaaaactgatcataaagccctttatcatttggatgatcagagtttaggtacagatttgcagaagaaggccatgactaaactgattggtctgcagtacaaatttcagtataagaagggggtggataataagtctgctgatgctttctctagagtggggcatctttttcctatttcagttgttcaacctgcttgggttcaggaggtccctaattcatatgtggtagatctttttgctaaataattattgcaataattggccattacctctcctaattctcaaggttttaccttgtcgcatgggttgataaggaaagctgataaaatctggattggagttaattctgctttgcagaccaaactaattgcagccttccactcttttgcaataggacgtcactgtgggattcaagctacataccagcgagtgaagaaattgtttgtgtggaagggtttaaagaaatccatggaagaatttgtctagcaatgtgcagtgtgtcagcaagctaaacatgagcactgttcttatcctgggttgctgcaaccattaacaattccatatggtgcatggctagatatctcaatggactttgtggagggtttgcccacttctaaggggagcagtgttatcttggtggtggttgacagatacactaaatttgctcattttctgcctcttaaacatcccttttcagctttgtaggtggctgagttatttctgaacaatatggcttctctctatggtatgcccaagtccattgtttcagatcgcgataaggtgtttacaagtaatttctgggcagactttgtttaagaggtttgaagtgccattacatctctctactgcataccatccatagtctgatggccataccgaacgtgttaaacaatgcctgtagatgtctttgaggtgtgcggtctcctcttccccacattagtggtgtgcttggctccctttagcacagttttggtataatacaaattaccactttgccttacaatgctctccttaaaaatcactgttggcactgatccttcgtatggtcttcttcctgccatgtcagttaatgcctttgcatctactgactctgattctcctgtagctgatgctttgctcagagaacgtgctatgttttcttctttgctgaagcatcatctcacctgtgctcaaaataggatgaaaaaaacagctgatctgaagcgtactcgtcgctcatttcagattggtgatctggttctcctgaaacttcaaccgtatgcccagaagtctgttgtttctcaaccttttcctaagctggtgtttaagtactttggtcctttcccaattgtggataagattggttctgtggcatatcgattgcaacttcctgatcacagtgggtttcatccagtgttccatgagtagcagctcaaacaatttgtccctgatgccaagcctgtcttttcttcgttgccctctccattgcagctggacattactgaattggttccctctgcaattttggatcaccgtatgttcaaaaaaaggtaatgccttggtggttcaagagcttgttcgttggggctctctggcaccagagtgggctacatgggaagattatgaagtggtccgtgccaggtttcctgagccaatcgcttggggacaagctcctgctcggagggggaagggggggggggggggcaaatgtcacgccagacactctgatg

SEQ ID NO: 35106 - DNA, 186 bp, Oryza sativa
  Clone ID: PAT_MRT4530_39058C.1
atggctctggcgccccgatattgggagagaagaggggaggagccgccaatgccctccccagcatcagctccgcgccgtcactacctccttcccggcctctctagtctctacttctaccggaagtgtgagaggagaaagaggggagagatgaaaaagagtggagagataatgaagaagatgagatga

SEQ ID NO: 35107 - DNA, 882 bp, Oryza sativa
  Clone ID: PAT_MRT4530_39059C.1
atggcgacgggagggaggagaggccgcgctgtgccgctgtccaagagcttctcgaggaggctaaggcacggccgcacgggttttggaggaagcggacacgcgagggggatgatgcagctccatgtggcgtccgcgccatccagatgccggcgctgctggccgacaggtggggaagagaccgatggtgcgaggtgggagaggaggtccggcggccggcgatatggcggcagtgatgacggagacgacgcgggagcaggggagcaaggcggcggcggcggcggcgagatgtccatggtgaggtactggaggcggagctccgtcggggcggggagcgggtcgacggcggtggatggcgggcacgggatagcgtcgcggcccaacgccggcgccagcgccggcatcgcccgcccgcgcgcgatctcccccaccgccgtcatgaactgcaacgcgccgagggccgagggccaatgcggcggcgacggcgtcaccgatggctgccatcgaggcggttcgggagaggcagcagaggaaggggagatcgaggatgacggcgccgtatcggcgggcgtggcacagcagtcgatggagatgcccatgcgcacgttcctcaattggtaccgctgtgccgactacacggcgtacgtcttcaacacgcggcccctggcgtgccaaccatgccaaatgccgcaggtgtactacatgcggcagtcccgcctcgaccgccgccgcaacaccaccgtcaccgagtacgagcgccaccgcgtcgcgcccgtcaattgcggctggcgcatccctgaccttgccactctgctcgaccgcgtcatcgtcctcaagaagcccgaccctgacctctggaaaagggtaatcaaacacacaccgtag

SEQ ID NO: 35108 - DNA, 196 bp, Oryza sativa
  Clone ID: PAT_MRT4530_3905C.1
gcatgccaaagaccaagtagaaacgaaatgtaaaggacatgtgtgacagtgcgagacgcccacagtaagtagtacttagcacacttagtacaaccgagatggcagagtcctttgcatacatacaaaattacattagttgcatagcattactgttacataacaacatcttatttaagatcaggaacgtggaataagc

SEQ ID NO: 35109 - DNA, 542 bp, Oryza sativa
  unsure (1)..(542): unsure at all n locations
  Clone ID: PAT_MRT4530_39060C.1
gtaccgccctggcaggttaccatcggtgccggnacatctcccgggcgtcgaaccccacgnccgctccggatggggcgcaataaggcgaaaacctccgaatcccaatggccagaagaaaaaaagcacttgcctggtaagcgaagaagaaaagaagggaaacataaaagagggaaggaaaagctcaaagcattgtagattccttcgacccaggtagtagctgctagctgcgagtgtgttgcattgcattgcactgctgctgcttcactccactgcgcactgggaggagtagtagtagaaagcaagaagagcagctgtagctgtctccctttcttttcatcctcctttgttcttgctcctctttgcacgcaaagaatcggtagccgcctttgtttgctgctctctgaaatctctctgagttttgtgctttcactgcactgttctggttcttggactccctgttcttggttcctgcatttcttttcttttttgcctttgtttgtcccatttttgttgggttcttggaggtggtggaggatgggccg

SEQ ID NO: 35110 - DNA, 186 bp, Oryza sativa
  Clone ID: PAT_MRT4530_39061C.1
atgacgatagcggcaacagaggtgcggtacatgagtgggaggctggcaatggtgtggcttagggggaggatggacaacaccgccaacattgtcagcagcgggtggggcggcgttagcgggttctcccacggcaggtccggcagcggtgaggtctcccacaacagattgggcgttggcggcaggtag

SEQ ID NO: 35111 - DNA, 408 bp, Oryza sativa
  Clone ID: PAT_MRT4530_39062C.1
tggagcaagtctggtcgtcagtcgtcagtcggagtactacggcaggcgaggggtctgtcagtcaggagccaggggtactacgtgtcgaggggtcagtcaggaggagggctactacggcgaggcatgcaaacagcagcacaggggatgacacacagcagtgaggctgacacagggcgatgcaagtacgcaggcagcagctgccactcagatgtgcacagggttgagcacccatgcaagtgcaagcatcttcgcacagccaggccagtactaggctactggcttcctcatagctagtaggatcacaccgttgctgtttgcatgcaacgagatagtgatcaaaacaaataatgaataaggaaatgttcttgaaaacaaaatagctggtgataaagtaaaaaaaaaaaaaaa

SEQ ID NO: 35112 - DNA, 447 bp, Oryza sativa
  Clone ID: PAT_MRT4530_39063C.1
atgaggaaggaggacgaagaggggattcttgccagtgttgaagaaggggaaatggggataggatatagcagagggtgccagcgcaaaagaaagaggaaagaagagaggtacatgggtaacatcatatcgttttatctccccaagatgaaaggcaatgacacctttgcttctgaaggtgacaaactctctacattacgagtgaaaagagagctttttcatgatcgtaaagggtcttccccattccagaagctagcaattaaggtgaggagttctcccacttgtatattaggcctctcccccttcacacattggtgcccctcagcccttcgcggccacttcaccgtttccccatggttcctcaggtatacgagccctgtaggccgcaggcactcacggtccattaggccttcacacactacgtccctcgggccagagatattgaattag

SEQ ID NO: 35113 - DNA, 234 bp, Oryza sativa
  Clone ID: PAT_MRT4530_39064C.1
atggcggatccaccctcgtgtgcagcggagatgaggcagaagggcggcgcagtgaccacgacaccgggagcgaagaccatggccacggtggcgccgtgtggtctcaggaatggcagatccgccctcgcacgccgtatagaggatgtggaggactgggatcggcgaccacaaccattgcagtggcgggctcacaggctacgtttgcggtacctgatggcggcggccttacaatga

SEQ ID NO: 35114 - DNA, 360 bp, Oryza sativa
  Clone ID: PAT_MRT4530_39065C.1
gtttttgttacacaaagcaatcagccagattggcttatgcctaaaggggggacttgaagctaggaactactacgacggttaaaaacgtaattccaaacagcgggagggggcaaagccacgctacactcccaataaatccccaaaaaaagcaacgccgactaaagaccacagctggccctccgagcggatggactccagaaccactgcgaccgaagcgagcgcagagtcgaaaaccctggagtttcgttccttccacagctaccaggagactaggaatacctggagtcgaagcttgagtattctatagtgtcacctaaatagcttggcgtaatcatggtcatagctgtttcctgtgtgaaa

SEQ ID NO: 35115 - DNA, 201 bp, Oryza sativa
  unsure (1)..(201): unsure at all n locations
  Clone ID: PAT_MRT4530_39066C.1
ccacgcgtccgaccagataaacgctagggtttcctcgacttcgacttcgtcttcctcctcgagcagagcagcagcagagatgatgctcgcggggctaaagtcggtggacggggccacgaggagcctttggcggcggcgtgggtgcccncnnnggaccaccgccccgcggcgctgctcctgacgggcgccctcgacgagacc

SEQ ID NO: 35116 - DNA, 819 bp, Oryza sativa
  Clone ID: PAT_MRT4530_39067C.1
atgtcgccgctgcgcccgccgccgacgccacgcactcccctcggcggcgcggcgaccaccccggatcagctgcctccgccctcgccgcacacgccacgcccggcgatcacgctcaccgcgcccccttccaagaagaagcgccgcggcggcgccgccgcgcgctccctccgcgccatccgcgccgtgcgcgcgctgttccggtcgctcccgatcctcgccccggcgtgccgcttccacggcgccatccgcgcccccggcggcgcgtcgcgggcgcacgacggccacgtcagcggcgcgtcgcgcacgacggggaccctgttcgggtaccgcaaggcgcgggtgaccctggcggtgcaggagacacccgggagcgtgcccatcctgctgctggagctcgccatgcagaccggcaggttcatgcaggagatgggcgccgagcacctgcgcgtggcgctcgagtgcgagaagaagccgccgggcgccggcgccggcatcggccgcacgcggctgctcgacgagccgctgtggacggcgtacgtgaacgggcgcaagatcgggtacgccatgcgccgggagcccacggagggcgacctcaccgtcatgcagctgctgcgcaccgtgtcggtcggcgccggcgttctgcccaccgacgtcatgggaggcgacgccggcgccgaggtgcaggacgccggtgacctcgcgtacatgcgcgcgcgtttcgaccgcgtcgttggctcccgcgactccgagtcgttctacatgcttaaccccgacggcaacaatgggccggagctcagcatcttcttcattagaatatga

SEQ ID NO: 35117 - DNA, 370 bp, Oryza sativa
  unsure (1)..(370): unsure at all n locations
  Clone ID: PAT_MRT4530_39068C.1
cagcaccggcaagtttgaaaaccgtaatttagaactggcagaaatctcctctgagttgaaaaagttggcgaaagaaaccggttgtccggtttatgccttatcacaacttaatcgtagcctcgagcaacgtgccaataaacgtccggtcaattccgatttacgagattccggttcgttagaacaagacgccgatgtgatttatcacctctaccgcgatgaagtttataacccacagtccgaacaacgcggttgtgttnnnnnnnnnnnnnnnnnnnnnnnnnnnnntccgttagcgacggttaccgcaaagtttttaggtcaatactcattatttgagaacatggataataaggatagccgttatgagtaa

SEQ ID NO: 35118 - DNA, 450 bp, Oryza sativa
  Clone ID: PAT_MRT4530_39069C.1
gtattcatgcgtgcttcatgccaagctagctgctgcatccaactaacctatgtatatatctctcctgatcaagctcttgttgatgcgaaaaacatacactggcctggaagatctgcttaacttcagtgcaggtccaaaatcttgcttttaggttcgtgagcgtgccagttgatttgatcaaaatatgtccttgtcggacacgactcttatctctaacaaactctaagataccaaaagtctttgtggtagacttttgcccaaacgtatcacattatcgggatcggcttaatcggctaaccttgtccgactcgaactctgccaatcctggtcgcagctgattcggactttagccgattcttgcactgtttccggaacgatctctatcttggattccgcttcggctttatctctatctccaatacttgaattaccaaatttggttgttaacag

SEQ ID NO: 35119 - DNA, 360 bp, Oryza sativa
  Clone ID: PAT_MRT4530_3906C.1
atgccggaggtggtagtggtgcagcaagccgacgagccggggaggaggaaggggcggccgaaaggacaccggcgacgaagaggatggagaggccggcgcggcgacggcgttccggcgaaaccgaggagcagccggggtggaggacgacgctgcgacgtcaacggaggagacggcgacgtcggtcggcgtaccggcgacgaacagcagccggccgtagacggagaagtggtggctacgccactggacgccggcgaggacgcgtctccggtgatttccccgcgaatcggaggcgaaagccggggaaaagaaggaggaagctgcgacgccgggagaaggtgggggcgcaagccggagggttga

SEQ ID NO: 35120 - DNA, 882 bp, Oryza sativa
  Clone ID: PAT_MRT4530_39070C.1
gcacgcggcacgaggctgcagttctgattccatgcttgcaagttctaggtatacacaatcttctctttgttcctgtttttttttcttgcacaagtctagttgagttgttgataacttggtatggagaaggggatcgactcctccacctttctgcagttctgattccattcttgcaagttctagaactacagaaagcagggagtaatggcgtccaactacgtggacactgctggggaggaaggcaggttccacggccacggccaccacagcagcggcacgacgccgaccggcgcggcggcgtcgccgaagatgcggaggagctggtcgtccgccgcctcggcgtcgtccggcggcggcggacacgggtccggccccaagtgcgtctgcgcgccggcgacgcacgccggctccttcaagtgccggctccaccgcagcagctcgcacggccacccgtcgtcctctcccaccgccgccgccgcgccggcggcggccgtgcagtcctcgtcctcccgcaccgtcgcggcgcagtgacgcaagaacggtctctcggaccaagaaacgcccaacaagaagagaggagaaggaaaaaagaaggaaagaacataatctaaaccaaagaatatttgtgtcattcataagaaaagggatattatttggttcctcccttgatgtggtgccatttggaaaaaaaaaagtcccttttttcccgttctttttcccatctttttgtttgggatctccattgaagaagttgtctgcttttcctctgtcctctcgactattggaaattggaagcattttagtcatattgttaagagtatgtgtggtgctctactatgtaattaacatttcagcaaaaaaaaaaaaaaaaaaggggcggcc

SEQ ID NO: 35121 - DNA, 209 bp, Oryza sativa
  Clone ID: PAT_MRT4530_39071C.1
attacctcggcttccaccatctacgatctgccgtcactcccttcctcatcgtcactctcttctttcttccttacccctcttacgacgaggcgacggggatggataagagcaacgccgacatgggcaaggaggaggagaacccgttatgtggtgcatcgaggcctgaggaccctctcgatctggcagcaacattactctatggcgcttga

SEQ ID NO: 35122 - DNA, 193 bp, Oryza sativa
  Clone ID: PAT_MRT4530_39072C.1
acccacttaagggttaaccttattgggtgccaccaccaagtacccatttaccaccccctttggccggtttcttgtaatgattttaacaagtatattgtttcgggaattaaaaataagctcagatatcatcatatgtgacatgtgaaactttgggtgatatcatagaaataagtatctttcatgtttaaaaaaa

SEQ ID NO: 35123 - DNA, 245 bp, Oryza sativa
  Clone ID: PAT_MRT4530_39073C.1
ctctgttgccaatttgagttagctgggagatgctaggttatagaacgcatggggcagacttgctgagttcagatgtacgggctcttgtgccacagagagtagtgtgcacatacacggttcatgcgagatctgacatttgccagaacgaccacttccacaagtgactattgctagagcgatttatacgaaacattactcgaaaatagcctgcattatatcggttactgaaagcttctgtactagga

SEQ ID NO: 35124 - DNA, 451 bp, Oryza sativa
  Clone ID: PAT_MRT4530_39074C.1
gtaccggtcccgagattcgagccacgcgccagcgtccggaagaatactctatgatgcaacaaacaaattcaacatttatcctgagcaaatccctgggtggcttgttgactggattcctgaaaaaggtgtctatctcatcggcaacctgcattcagctgacatggacatcaggttcttctattttggcaaccgttgcatcaaagcttgatctcttactactcacaaataggcagaggaagtactccgcgcaactaatagatagactcgaccctgatgggagggtgattacacaccgcatttatcgggagtcatgtatatatctgtgagggttgctatacgaaggatctgacaataatagaagaggacctgccataagtaggaatcaaggtcacttccgcatacatgctacatcatagagtgtctatagtgttaccaaaatacaatttactgg

SEQ ID NO: 35125 - DNA, 149 bp, Oryza sativa
  Clone ID: PAT_MRT4530_39075C.1
agcttcgctcgcccgctacctcactcactctcgggtgagcgcggccaccgctgccggctgacgaggtagtggagtgaggagtggcaagatgttctgggctggtgacccgtggggctgggcctgctggagatctcgaatgcggactcggc

SEQ ID NO: 35126 - DNA, 2021 bp, Oryza sativa
  Clone ID: PAT_MRT4530_39076C.1
aagatatcaagtgaagttttgttataacggcagcgatacttcgctcccaataattccggagcatctatcacacacaaaattgataacatcgaatgagggaaagaggatgggagggcaatttcatagttcaggactgctcttgtcttcaggaactaggaatctaggtgttttttttaactctgcttccaacaacactaatcagaaagatcagccatgcaagtaggcaaaccgatcactcagtcgctgtcctccgtcttggacttcttctttttcttcttcccttcagtggccgtcttaggctcagcgtcctccgagacttcacggttcttcttcttcttcttcttgggagtaccgttctcctcggcgtcgccattggcatgcgccacgctcttctcctgctcctgtggctcctcctccagcttgtgcttcttcttctttttcttcttctcagttccaggctcagcttcatcagccacattggaaggcttgtccaggtccattgcttcgccgtcagcttcagctttagacttctttttcttacttttcttggcagatgcatcgaccttctcgccatcatcaacatcatttgtggcatcattaaccatgctgtctatcgcagctttcatcacatcaaggtttttacgaggtgcaacacccttgtcatagaagtctaaccgctcctcaacttgctcacgaagcttttgcccaaagactgcggtagctgactctgaataacaatcaatgcgtgatgcaatggagcacttgttcgccagatatctagccattctgcctttgttcttggttgaagcacggccaatgaaggatgagtggaatataaggccatactttggcgtattccccctagttttcaatgccctgaaaagtgccttttcagcaccaagtatctggagagtggaggcaggacacttagcaaggtttgaaagactgccagcatgagagataaggcgtgctccaacaacttcaccaattaatgatgttagattcggtgcaatatcattcatcttggtaacaagatactcataaaggtttttacgatattcagacagattcatgactctttgagcaaactgcttcacattcatcaaatcaacttctgacagatcctgacccattgaagcctttgctgcttcgacaacttcctttgccttatcttcatctccaatcagatcagctaacttcgaaatatctttttccgccaactcagatttgtcctttatataatcagcaagcttagcatagatgtagttgtcattgacaattttgaccaactcaggaaaatgccatccaaaccattccctcactctcatggagaaagaattgatgtccttgtcaagtgtatccaacaggaagatagcctgaatcaccatgttgtcaacgcggttcacattgaacttcaccttcgccctgctgtagctatgacccaggccaagctgcgccttctccaagtccgatttcttgagctcgctgatgaagcggtcgaagtggaggcggacgccgcggagaagctcctggacgaactcgttgctctggcacgggatgccggtgacctcggagatgtgggagccgaccttgggctcgacgacgccgaggctgtacttggccttcttcccctccttgggcttgggcaggttcagctccaggaagctcctcagctcgtcggtcatgatcccttcggagatggcgttgcactggttgagggcgtccacggcggaggagaagggggtgaaggcggcgagcttgacggccttgccgaagcggtcgaggtcgacgacggaggcgcggacggcgtccacgctctgcccgatctcgtcgatgccgtaggcgtggaagaggccgtagccggacgccgactcgaagagcaggtacagcgccatctcgccggcggcgtcggcggcggcggcgggttgaggtttgggggcggcggcggaaggggggttagggttttagcccagtgctcgacagtttcttctcctccgcttattatatgctcggacgcgtgg

SEQ ID NO: 35127 - DNA, 1859 bp, Oryza sativa
  Clone ID: PAT_MRT4530_39077C.1
atgccggcgccgaccgcctcgtcgctggccgccgcggcggaccctgcgctccccgccgcgttcctctcgctcccgtccccgctcctcccggcctcccctcccctccccgcggcccccgccccctcctccaacgccttctgcgtcccccgcggccccgcccgcgcggtcgccgtctccgtatccgtctcggcctacggcgcgggctccaccgccgcggcgtcgcggctccaccggatgtgggccgagttctcccgcttcgtgcggctgcacgggaaccaaatcgcgccgctcgggttcgcgtccctcggcctgggcgttggaggcggcggcggtgggagcggcgaaggggccggcgggggaggcgggggcggaggtggggaggtggatgggttggttgaggaggaaggggtggcgcgggccgaggcgccgaagaaggtgctgatcctgatgagcgacacgggcggcgggcaccgcgcttccgccgaggccatcaaggcggcgttcatccaggagttcggcgacgactaccaggtattcgtcactgatttatggactgaccataccccatggccattcaaccaactacccaggagctacagtttcttggtgaaacatggacccttgtggaagatgacatactatggtactgcaccacgagtagttcatcagccacattttgctgcaacatcgacattcatagcaagagaggttgcaaaaggtctcatgaaataccaaccagatgtaattatcagtgtccatcctttaatgcagcatgtcccactccgaatcctaaggtcaaaaggtttactggataagattccgttcacaacagttgtcacagatctgagtacttgtcacccaacatggtttcacaagcttgttactagatgttactgtccatcagctgaagtgtcaaagagagcactaaaagctggattgcagccctcgcaaattaaagtctatggcctcccagtacgtccatcttttgtcaaacctattcgaccagaggatgaactgcgaagggagttaggtatggatgaatatttgcctgctgttctactaatgggtgggggggaagggatgggtcctattgaagccactgctagagcacttggtgatgctctatatgacgaagtccttggtgaacccactggtcaaatacttgtgatttgtggccgtaataagaagctgactagccgattgcagtcaatcaattggaaagttccagttcaggttaagggtttcgttacaaagatggaagaatgcatgggtgcttgtgactgtataattacaaaggcggggcctggtacaattgcagaggccatgattcgtggcctgcccattatactaaatggatatattgctggtcaggaagctggcaatgttccatatgttgttgataatggatgtgggaagttctcaaaatctccagaacaaattgcaaagattgtagccgattggtttggccctaggtcagacgagctcaaaatgatgtctcaaaatgccttgaaactagcgcgaccggatgcagtgtttaaaattgtccacgatctgcatgagttagtcaggcaaaaatgttttgtaccccaatatgcgtgtgcatcataaactcctaccatccttagcgagtttagttaattctattattttttgtgcggcattagtaactagtttatctgtgagaattcataaatatcagttgatttggaaattttctccatgatagaaaaaaaaaaaaaaccaatttggttttcctcaatattttgcttgtacatgactgttgggactagacagtttaggaactgtatgaaagaaaaaagaacaattgaatttccatggtgctatgtaaaaaaaaaaaa

SEQ ID NO: 35128 - DNA, 273 bp, Oryza sativa
  Clone ID: PAT_MRT4530_39078C.1
atggacggacgtcagatattcttcttcccatccgaccgcgaacaaacgaacggccaaggtataaagctggcggctggcaatcagccagctggctgtacgtacggctgcgcgtgggcccgcagtgggtattgtctcatcgaccttattggtgacaatcgcaatgtagcgttgaggctaagcgccagttacatcatggagatagtgtcgaggcatatgctggtggtgagaaatgctaaagtgcgtaccgttgtgtgccagcgtagagaacaactg

SEQ ID NO: 35129 - DNA, 192 bp, Oryza sativa
  Clone ID: PAT_MRT4530_39079C.1
atggctagcggtgatctccaccccatgagcagctgttctggtatcccgctgcttccttccgctgaatcctcgctcgctcgcagcaaaggctgggaatccacggtggagtctggtgtggcttccgtgtcaggatttagcgggttaccagtttgcggctatttgctggcggtggcggtggtggtggcggactga

SEQ ID NO: 35130 - DNA, 971 bp, Oryza sativa
  Clone ID: PAT_MRT4530_3907C.1
aagacggttgctgacgttagcaaaggggagaggcagcgccggcaagcgggccccaccggtcagcgacacaagggcgccggtccaccgtggaccgggaccaccgaggcggtccaccgccggtccacgggaaccgacggcccggatcggcgcggctggggcacggcacggctcaggccggcccagccgagcgatggcgcgcggcagcgcggccatcggcgacgacggccggcgacggcgcggggaggagaggagggatgctcaccaagggcggcgacggcggaaacggcgcagtccggcatcaaccggggaggcggggcgacacagatggagacggcaaacacggcggcgatctcgggttggtggtgaagttggtgctcgggcagcgagaggcaacaaccgagcggcggccgagcttgactttgaggcggcgaaggtactggcagtggtggcgcactggggcgacggctagggcggcggcggcgcgcggctggaggcggtgaaaggggcggcggcctcgggtgtgcggtgggagtggtgctcgaggggtggagagggggaaataagaggcggccggacttccccttgcagtggcgaagctggcggtggcggcggctcggcgtggcgacggctgtggcggcgggaaacggcgaccggaattcgccggagtgtggcagcgcgtgggtgcggcgtggggagagcgagggagagtatgccgggctcgggaaaaatggggaaatggacgaggggagcacggggatgctttttataggctagggaaggcgggatcgagcccgggagaggcggcaaccggcgacggagtggggcggcatcgtggcgggtgtggcggctcggcgtggcgtcgattcccgcggggagagagggggagtggggcgggatgtggtcgcgaggtggaaggggactcgggtccacgccggttgggacgaggggaggcgtgggatcggcggagggag

SEQ ID NO: 35131 - DNA, 312 bp, Oryza sativa
  unsure (1)..(312): unsure at all n locations
  Clone ID: PAT_MRT4530_39080C.1
caccgaatctccatgcaggtcctgctgctgccgctgctcgtcgcggcggccgtcggcctcgcgcgcgccgccgccaccgacgaccccttcctctccggcgcgccggggaaccacagctacaacatcgactgcggcggcgcggcggacttcgtctcggtgttcggccgacggtggctcgccgaccagttcttctccgccggggggcaggcgggcatggtcgcggagccgcaccggttcccgcagnccccgcaggnaagcgcnnnacgctcccggctttcttttcccggccccatcgtcggcggggcaagttca

SEQ ID NO: 35132 - DNA, 366 bp, Oryza sativa
  Clone ID: PAT_MRT4530_39081C.1
atgggggtggcggatcaggcgacggcgctggcgacgacgaggacaacggcgaccacgagggcggcgtatagggaaagacagccggcggtgaagccggtgtcgacgaggtccgcggggaaggaggtggatccaagaggagacagccggaagaggcgagtgacgccgcacagaggtggtggccggcgccgatgcgggccatgcggctggaggagtccagacggggttgaggacgatagggctagtggcgcagtgacagaggggagggcacccggtgttccaggcaaagaagctggcggggagcttggggacacggaggacgacgacggtagcgaaggagattcggtggtcagcggtggaggtccctag

SEQ ID NO: 35133 - DNA, 368 bp, Oryza sativa
  Clone ID: PAT_MRT4530_39082C.1
cacaaatgatctagatccattcctaccaacaatttagtcacaaaacatcgtaattagattgaactaacaatctataatctttgacacaacaatgccacaaaatcctactaatatacatcatcatacatgtgacaaagtccatgtcctacaaaagaatcccttccttgtctttcttccctccatcgcagccatgccatgccatcaccacgtcgtcgccgagctccgccctgagctcctcccacccgaactcctcggcaccgccgtcgccgtcgccgtcgtcgcctccctccagcctcagctagacgagcatcatcgacggcgacacctccgacatctccatggacatggcgacgaggcccgagaggccg

SEQ ID NO: 35134 - DNA, 642 bp, Oryza sativa
  Clone ID: PAT_MRT4530_39083C.1
ccgggctgcaggaattcggcagagggtactacatgcttctccctcacggccttgggaattgtaaccccatgcttgaagttgtcaggctgtagccattatccaaataaaggttcagaaaaagtgagatctgccgtaaggataggagaccaacaggaagatttaagcttgatattccgacaagcaactagaccaaccacttggatggtatgctttcatctccagctgtcatttgtttaggcctttccatgtgggtgacaggcacacttttaagatggtgtaataaaagcttgacgtttgcactgttccactctcctttttagtatagtcaaatcaagtactcctagatccagcctagcggccattttgtatcttagaataatcctttcatgcttatggccttatgcagggccagagtttcttaattcccatcaaaatacaagtacaatgtcttataatttggatatctttgctattttcagttgtgtttctcatgttttgctatttagaatttggccctgttgctgataggtaacaaaattactacgtttatgagatttgtagcatcaggggaaaaaacaaaatctcatggtagccccctcccccctgagatctgtaggatttaacggtagtaagttaagtcac

SEQ ID NO: 35135 - DNA, 338 bp, Oryza sativa
  Clone ID: PAT_MRT4530_39084C.1
ccggccgggatccttgacacaatacaaacattatagacgaagcatagtatgggaatcctacaagaaatgaagatcattatcgcatctgctctccttgctattgctgcatgcaacgcttgtgcacatgttgatgctcttacacaaagacatacacaatatgaactagcaatcgcatattctgctactagcaacatagtgcttaccccatgcagtgagatcgtaagggaacacgcatagcatagtgggagacgccccttgtggccaccagctaccatgtaattgataaacaatcaagtcatgcagcagcagtgttgccaacatgtcacgctggcagcgca

SEQ ID NO: 35136 - DNA, 414 bp, Oryza sativa
  Clone ID: PAT_MRT4530_39085C.1
atggcgtggccaggcctcagcggccgggcagctgggaagctgtcacggtgccttctgcggctaggcccagatggtagtgcaacaggagctagcggtggtgggtcatctttttcgttgttggtcggcaccctcgaccttcctggtgctcctccttttctttgcgggaagtttgtaggctggattgaggtggtagcttgtcagcgggagaagctcaggttgccgaagcaatgccacccagtcccaggttctccttcggtcagatctggtgaggagggcagcgggtggtggaacggaggggtcctgagccagctctcaaggatggactggaagatggccggcggagggacgtcggtcgggtgtggcggaagccattctgttgttactgctcccgggcagcacgaagacggcgactag

SEQ ID NO: 35137 - DNA, 1134 bp, Oryza sativa
  Clone ID: PAT_MRT4530_39086C.1
atggggctgctcagcatcatccggaagatcaagcgcaaggagaaggagatgcgcatcctcatggtggggctggataactcggggaagacgacgatcgtgctcaagatcaatggggaggataccggcgtcatcagccccaccctcggcttcaacatcaagaccatcaagtaccacaagtactcattgaacatatgggatatcggtggacagaagactatccgatcttactggaggaattactttgagcaaactgatggactagtttgggtggttgatagttcagacattaggaggcttgatgattgccgtgctgaacaattcaatcccatgcaacagcctagtgccgcaggcgcttgatgaggggtggtggcggcgaagcaagatattccagtgagtcccacagcgatggggctggctcagggcgtcctgacgacataccagccagtgtatggcgaccccaatctcatgccaggagagaatagggggattatggcgaccccaatcccatgccaggagagaagagggggttatgaggatttttggcttgaagttgtggctttctccaaggctgatctacaacttgggttcgctgttttcaggtactcaatttggaagcgatggacggaagccggcactggcagatcgtagtttgtgcaatctgatggactagtttgggtggttgatagttcagacattaggaggcttgatggtggccgtgctgacctccacaatctcttgaaagaagagagactagcaggagcttcattgctggtgtttgcaaataagcaagatattcaaggcgctctcaaaccttctgaaattgctaaggtactcaatttggaagcgatggacggaagccggcactggcagatcgtaggctgcagcgcgcacaccggggagggccttcttcaaggtttcgattggctcgtccaagacattgcatctcggatctacgtgctagaatgatgtgaacctcgtttctctgtagtatttatgtgctggaacgattgaacctcatttcttatcaacctcttcgtcttgttctgtaacggtgaactattggcatcatgatttttgagcatgatggttctgttttgtgcaccatgaccatctgaaaagtttcattccttatcg

SEQ ID NO: 35138 - DNA, 1548 bp, Oryza sativa
  Clone ID: PAT_MRT4530_39087C.1
acgggcttttctggtcaaaacgtatcttgtctttatcactttatcatgagttcttttccttggttaacaatacttgttgttttgccgatatttgcgggttcattaattttctttttacctcataggggaaacaaaatcgttaggtggtatactatgtctatttgtttattagaattccttctaatgacttatgcattctgttatcatttccaattggaggatcccttaatccaattaaaagaggattctaaatggatagatgtcttcaatttccactggagattgggaatcgatggactttcattaggatctattttattgacaggatttatgactactttagctactttagcagcttggccggttacccggaattcccgattattctatttcctgatgctagcaatgtatagcggtcaaataggattattttcttcgcgagaccttttacttttttttatcatgtgggagttagaattaattcctgtttacttacttttatccatgtgggggggggggaagaggcgtctctattcagctacaaagtttattttgtatactgcaggtggttccatttttttcttaatcggagttctaggtatgggcttatacggttccaacgaaccaagattagatttggaaagattaattaatcaatcataccctgcaacattggaaatactattttattttggcttccttattgcttatgctgtcaaattgccgattatacccctacatacgtggttaccagatacccatggggaagcgcattacagtacatgtatgcttttagcgggaatcctattaaagatgggagcatacggattgattcggatcaatatggaattgttacctcatgctcattatctattttccccttggttagtaataataggagcgatgcaaataatctatgcagcttcaacttctcttggccaacgcaatttcaaaaaaagaatagcctactcctccgtctctcacatgggtttcattattataggaattggttccataaccaacattggactcaatggagctattttacaaatattatcccatggatttattggggctacactttttttcttagcgggaacggcttgtgatagaatgcgccttgtttatctcgaagaactgggaggggtttctatcccaatgccaaaaatttttaccatgtttagtagcttttcaatggcttctcttgccttaccaggaatgagtggttttgttgcggaattagtagtattttttggactaattactagtccaaaatttctgttaatgccaaaaatgctaattacttttgtaatggcaattggaatgatattaactcctatttatttattatctatgttacgacagatgttctatggatacaagctatttcatgttccaaacgaaaattttgaggattccggcccgcgagaactctttcttttaatctgtatctttttaccagtaataggaatcggtatttatccagattttgttctctcgctatccgttgacagggtagaggctctgttatccaattattatcctaaa

SEQ ID NO: 35139 - DNA, 343 bp, Oryza sativa
  Clone ID: PAT_MRT4530_39088C.1
tgtttttgctgtgggccgggcttagcaattggccagaaggtactgctggatataatgttcacatggctatatatgtgttaccttaataattactgatctatctggagatctaacatgtgtatatagagaccaatagatgcctagctgacattaactgtttgcgatagtttcattcaaacgatcgaactacaggcattgacgtagtacacaaatactgaaagagctagcttgtgcactattgtgaatcttgattaccatataagaactttagactgagaagaatttgtcctatgagtaaaattcaggtgagcgctggacccgaaatacaaactgtaagttaatg

SEQ ID NO: 35140 - DNA, 433 bp, Oryza sativa
  Clone ID: PAT_MRT4530_39089C.1
gacgcggagctgaggaggacgaatccaatccgcggcggcggcagagcacgtcgacctaccccgacctcgcatccatggcaaggcgttagaagaagcttctgtttaggctcagtgcgcccaaccattggatgctctacacgcttggaggagcttttgcccacaagccatcttatggcacttacacgtccagggagtgcctgcctctgatcctcattatcaggaacaggctctactgtgctctcacataccgaggaggtatttgtatccttatgcaaagccatgtacttaggtgagggctatgtcaagactgacaaaacctacccagctgggttcatggctgttatttacatccccaagactggtgagaactaacggtcttgtgtgcgaccccataggacgctaccgacttgagtatgtccaggatggcgatgct

SEQ ID NO: 35141 - DNA, 6268 bp, Oryza sativa
  Clone ID: PAT_MRT4530_3908C.1
tacatagaatttacgtaattgatcaatgttccaggaatttgccaactcgcggccatcgccgtctgcgattttgaatgcgcctggccacagaacttgtgtgatcgtgtacggtccttcccatttgcgtgagagcttgttgcgccctgcttggctttgaacccgtcggaggacgtagtcgctgatcgaaagcgtgcgtgctcggatgcgcttctcgtggtaacagcgaagggcttgttggtagctggctgctcgaacgacaactcgtttgcgatgtttctcgagtagattcacatcgtcgtatcactgctcctcctgatcctcattggagtacttctgtattcatgtactttgatgtcgtagctcggtggggagcatgccctctgagccgtacacgaggaagaagggtgtctccttgttggacgttgtcggtgtggtacgcacggcccatagtagggtcttgattccttgtagtactatgccgtttgccctctcgacttgtccattgctctgagggtgagaaaccgaggcgaagcagatctttactcccaacctgatgcagcaatcctggaaatcgacactgatgaactgggagccgttgtctgttatgatacgatggggcaatccgaatctgcagaatatccctttgatgaatttgatggtgttgtcggccttgatttctcctgtgggtgtcgcttcaattcacttggtgaatttgtcgatcgctacgaataggaacctgtagccgccttgtcctcgtgggaatggcccgagtatatctatcccccagcacgagaacagccaagtgagagggatagtctggagtgcttgcgctggcagctttgtgtgtttacatgtcgcaggcatctttgagggcggttggctagaaaaacccttgtcggaaagcttttccgactaatgtccgaccggcggcatgtgacccacagatcccttcacgtatgtcgaggaggaggtgtctgccgtcgtcggacgagacgcattttaggagtaccccatttggtgccttcttgtatagatcgttgccgatcatacagtagacttttgctttacgggatattttctcggcttctgcgtcgtcctcgggcaactcttcgctgcttatgaatttaatgagtggggtgcgccagtcgtccgtggtctcgatatcggcaacggcgcgctctgcctctgtagcccccgaggtggtgtcgggggcgaccgggctatcttcgccgcttgcctctttcactgatggcctcgtcaggacgtccagaaaggtgccaggttcaagtggttctcgtctggacgcacatcatgctagatcatccggttcgatgttgtctttacggtacacatgtcggacctcgatcccatcgaaccttttttctagcttcatgacttctgtgagatacttggataactcggggttagagcacttgtaatctttatgcacctggttcgtgactagtttggaatcccctttcacgattagtcgcttgactctgagtgcagctgcagctcttatcccggcgagtagtccttcgtattcggctgtgttattggttgccctgaagttgaggtgaattgcatgcttgaattgatctcccgaaggtgatgtcaagatgaatcctgtccctgctccctggctgttgagtgcgccgtcgtacgccattgtccatgtttcattgtcgatttggttgtctgacctattatcaggcatggtccaatcgactacgaaatcggcgagtacctgtgacttgatgattgttcgtggcatgaagtagatatcaaattggcttagctcgactacccatttcgcaacgcggccgacaacgtctttgtttctcacaacttcaccgagagggaaggaggagacaactgtaaccctgtgggcttgaaagtagtggcgtagctttcttgatgtcatgattactgcgtagagcagttttggatctgtggatatcttgtctttgcgtcgtggagagcttcgctgacatagtagactagtcgttgcaccttctctctctcgacaacaatgacagtactaacagaatatggcgtggcggcaatatagagaaataattcttcattaggttggggggcaacaagtacaggtggattggataggtagcgcttgaatgcaatgaatgcctcttcggcctcctgtgtccatacaaatttgtcttgctttttcagcagagcgaagaaaggttgtcctcgctctcccatcctagcgacgaacctgcttagtgctgccatgcatccggttagcttctgtacttccttgagtcttgtaggcgacttcatgttctcgattgccttgatcttctcgggatttgcttctattcctctgccagagacgaggaagccaagtagcttgcccgatggtactccgaacgtgcacttctctggattgagcatgaggcgatatcgtcggaggttgtcgaacgtttcccgcagatcgtcaatcaaggagtcgcttgccttggtcttgacaacaatgtcatcgacgtaggcctcgacattgtttctgagctagtcactaagtgcaccttagaccgtgcgctggaaagtgtttcctgcggttattagtccgaacggcatcttaacatagcagaataccccgaacggcgtgatgaatgctgtcttctcctcatcctcttttgccatgcttatttggtggtaaccggagtaagcgtcgaggaaactcaacaactcgcaaccggctattgagtccaccagttggtctattcgaggaagaggaaagtgatccttgggacacgccttgttgaggtcggtgaaatcgacacacattctccacttcccgttggccttccgtaccatgactgggttggctagccactctggatggagtacctctctgatgaaaccggctttgagaagcttgtcgagctcttctcgtatggcttgttttcgatctggtgaaaatctccgcagtttttatattactggcttggcatcgggtcgcaccatgagtttgtgctcaatcacctccctgggtaccccaggcatgtcggacggctgccaagcgaacacgtcagcattgtcgcgggagaaggtgatgagcgcgagttcggtcttgtcggggttggcactggatagtggaacgatcttgattgcgccgtctggtttcggcgtcttgtttgtcttgctcactttcttgggtggctctgctgtggcaggcgggctgggcgtgtgctcgaccatgtcgaggctccgcttgtcgcattgtactgccagcttagcgttcccttgaatagtgattgttcccttcggtcctggcatcttgagcacttgatacgcatagtgagatgcggccatgagcttcacgagtgcagttctcccaatgatggcattgtatgctgtatcgaatgcagcgacatcaaaggtgatctgttccgttcggaagttgtttgcttggctgaaagtcacaggcaacgtaattttgcccaatggtttggacgatgactgaggagtgattccatggaagggttgatcggtgggtgtcaactcgcttcgtgggatccccatcgcgtccaaggtgctggcgaagagaaggttgattgagctgccgccgtcgatcagtactcgggcgaccttgatattacgaatagtgggttcgaccatgatcggatattgccgccgtggaacctccgaagatgtgtgagacatggagatcgtaatctgggtatgctaagtctgattcctgagtaggcgccttagcgtccttctcaaccacgcgtactcgcttgcctttttccgatgccatgtgtttggcgagcgactttttgaagacgaggcaatcttctagagaatgtctgtccgtcttgtgtatagggcaccatgctttcttcgtgtcgctgccttgtgggtctgggcgcttggcagggtccgcgtattctgttgcgagaacttctgattgagctttccttttcccactcttgcgatttttctttttgcttgactcaggtgcgtccttggctggtttcttctctccttcggtctttggtttgtcgttcttgcatctcagtgcgtcatccgcatgagcgcatcggtcgacaatttcgaataatctccgagtagtcatgatgcgcctcgttaccaactcctgagtagtatagcgatctctgacaccggatttgaaagcgcgaattacagaagcatcggtgatctcggggattgtgtttctgcactcgttaaagcgccgaacataatccctcaaggattcgcccgggttctgtgtcaacgcatgtgggtcatcttcgatcgcgtggcgcttgtaagttccttggaagttggctacgaactgctgccacaagtctgcccacgaagagatcgagttggggggaagatgcatcagccatgaacgtgcaaagcctttaaatgcggttggcaagtaattcactaacgcgttgtcgtccgctccggcagcgcagagtaccgtggagtaaacctaaaggaactcttctgggtcggtgctcccatcgtatttctctattgctccaggtcagaatctttcgggccatcggacatcccgaagtgaacaaccgaaagctctacacccaacgctgggggcggtgggttgttggcgatcatgcgtccttcgtggatgtctatccgatgatgaagatgacgaggatgatgacgatgacgatgggtcgtctagttccggcgtacgattacggggacgtcggccgggttctcgagaatcctgtcgtcgtctcccgctgttatctcggtgccgatctccatcatcaccgtcattattgcgacgtcctcgaccagtatcgcccagtacccgccgttcgcgatcgttgtgatcgtggcggttgtggctcctcgatcttcgttatcgtgacgccgtgaagagatatgacgccgggaacggttctcgttgtctcgtgtgcgtcgtgcctctcggcggccattcaggtgatcgcggagatcgccggtgccgcgaggtggaggggttgctcgatgaggtgattccgccgttcagggtcttcaccatttgcatcgcaagttggtggctgtttcgggtgcgctgcagcagcggcctcttcgaacgcgttgctgaggttggtcactaattgcgttgacggctctgatgtgttgggccggagtagtcacttgattctccgcttccgcattggtgcgtgctgacgtgccgacatcgtcgatagccaatacctcacgaggcgtactcgttgtcgatgatccatagtcttcgagtaggtgcaagactgatggttcatggggatcgatgtcgattaccccaacaaatcgatctgaaatcggcgtcgctccttgttccttgtcctcatccctgatggggatgcgtgactgctggaccttaggaggtggcgtcttcatggcgctgagaaagaccttgcagctcgagaggtcgtgattctttgtcttgtgaataggacaatagacatcacgagttggagaggtacactgaattccacgctcttcgcaggcacgaatttcagcatggacgttgagaaagacccagcaggcttgcagggtgtgtttcctggttttgtggataggacaccaggaccttgtcacctcggaagtaatcctcgtcggctcgtgattcctgtcggaaagacaaggcttggccgcactaggatccttctcgggtttggatgtcgttaacgttccgatctccgcttcggtgggaggatccttcgactttttatgattcttttttttcattaaaacatgttttaatccttcgacatggctgagatcggcattgtggtgtaaaccggaaagacgtttcgccgacttgagtccacaccagtgttgttgaagttggaactccttggttgaggttggtgttgacgctgttgtcgacgaatctggatgtcaaagtagtagaaccttgagcaccaagtccccctacctggcgcgccactatcgacgggggatacccgtagaccggatatagagggtattggggtacgctggtacgaggatttcgtaggctgtggtagatgtgttggctctaagatttaatgccttaggtcctcccagggggtcccttttataccgtaggtcaactggtctccatgtcggactcagagacatcggacccgacacgatataatgacggccgatttctatccgagtaggactctttccatctgtagactccatgatggacttccttaacccgtaaccctgatagcgccgggagccggagccgctgtgaacgacaatatcaacggaggcagtttgc

SEQ ID NO: 35142 - DNA, 287 bp, Oryza sativa
  Clone ID: PAT_MRT4530_39090C.1
aaaaagccggtcgcggtgagaatggcggcctgtggagcggaagattttttttgactaaccgtgccgatccctttttattccacggttctgacagactcataatgtcgctgtccaccttacccaccctcccccattaactcgatcatcatatctcgcacatcaattaatcgctcgagcatgaatagtgcggagccgcaaacatgggagaggaagcgaagtgggcatcgaaagcggagcactatggaagaaaggcgccggatgaggaagaatgccataaaccatactca

SEQ ID NO: 35143 - DNA, 1173 bp, Oryza sativa
  Clone ID: PAT_MRT4530_39091C.1
atgtcggccctcttgctcctcaaggggacaattgaagcttttgataaaaaacggcgggcgttcctttggtctgaaaatgattactgtagtgcctccagctgccttgttgtctgggacacagtctgcactgccaaggatgtgggtggcctagggattaaaaatatgcacgatcaaaaatgtgctttgctcgtgaaaagacttcaccatcttcactcggtcgactcctcctggggacgctggatatggcaagaacactccggctcctccctcttttgtgataatcagctcggtcctcactgggaatccttggccactctcctcccggttcttcagcgtttgacgcgcgttcaggtaggggatggcacacgcacttccttttggaaagattgctggtgtggtccgaattctttcaaagatcactttgccaccttattctctcatgccctggatggggaggctacagttgtaatgttcctctcaaggccaatagaagacaattttgctcccaggttatcctccatggctgaatctcagttgctgcaattgcgagaggtgcttcaagacgtctgcctcagtgcctctactgatttgcgaacgccacgtgatgctcctggaatccttcgcactaagagcgtctactcatcctctcaacagaccctgcccctgtgcaagaactggcacttcatttgggacaaccgagctccccccccccccccgcattcaattcttcgcttggcttcttgctaaggatcgtcttcctaccaaagctaacttacttaagaagaacattgttcagacagctgggtgtattgtctgcaaccgaggtgttgagacggcgagtcatctcttccttcattgtcaatttgcccaagacttctggcgagccttacgcatatctgtcgtttcggatgttcatgatctcgctgacctcgccgtcccctgccatctgcctgccaagcacttcagaattttcttcctgctttgtttttgggggctttggaatcatagacatgatatgttgtgttccggggtcttcccaattcccggactaggttagttgtcaaatgtattgaagatgctactctgtgggctgagcgtcttcgccgggaagacagatcggtagttaccgattggaaaaatcttctctcttcctctattcgttctccctaatta

SEQ ID NO: 35144 - DNA, 235 bp, Oryza sativa
  Clone ID: PAT_MRT4530_39092C.1
tttacttcccctcatatcatctctgctggcgagctggttaaccgagcataggttcatatatacaccgatcgatgctgagccacactatcgaaggcgatcgcatgatgtacaactaactaagcttagctgagctgactagttctctagaacgattaggttgctagtgttgacaagctgactacagacgagaagaggaccgcgaacgtgttatgaaggcagagcagtactaggattc

SEQ ID NO: 35145 - DNA, 247 bp, Oryza sativa
  Clone ID: PAT_MRT4530_39093C.1
gcacgaggcacaggcacgtgacatgcttcatccaaaggaaaccaagagttccccagccccaggactgcagataccactttccatgcgttgtttgtccctccctgcatcacatgcaatctgacatgtatctggggttgattccggtatgtggactccattcaatgactgtgtgtgtcctgaatcgactgcacaattgtggttgatggatgattgccagaacaagccgttgatgaggattcttgtgggc

SEQ ID NO: 35146 - DNA, 735 bp, Oryza sativa
  Clone ID: PAT_MRT4530_39094C.1
atggagatggacgaagtcgggggtcgatggacatctctaggacaaatgaaggctacacgagctgcggcccgagatgttgatgacgaggatgtccagcagcgcgggcagcccgagtcaccggcgattattccggctctcgagtttgaacctcatgcgtcgcccgacaacgtagaccagaccctagctacggggacggagatggcgatgacttccgtagatctcgagagtgctcttgctggccaagatcgtcgcatccaatattggaagacgaaatttgaagtagcggaactcgagagaaccatgcttgcagtgaaaaaagagcaggatgtggaaacgctccgaggtcgtgaggtgtggttcaactcgtacttgaagagttgctgcacatccatggctaaggtttgtagagagctccgagtaccccgtggggatcccgaggaatcggcggccggatacatctcgtggctgaacggggcctgtgctcaactcgatggcgtcggcaaacgtatcgacgaagccttgaagcaggagtgtcgtcgttcgagccgatatgccggagggcacgtgttggcttgcctacgagatcatcgcccgcgcctagacctcgattttctccgtgagggttttgttcgttctcggaggactccgtcggagatagaccacctggcgaggtcaatggcgccgttggcggagaagatcttccagcctatggactggcgttggccttcttggtag

SEQ ID NO: 35147 - DNA, 989 bp, Oryza sativa
  Clone ID: PAT_MRT4530_39095C.1
gaaagcggcggtgaagcgagcccaacccaataccctattcttccgatccgcgagtatcactcgtcgacaaaagcttttctgccagattatgcacttgatgaggctccatgggagataaggctacataaatggtacatggaagccagcaagaaaggcctaactaatctaacaattcgatcactggcaaaaactttagcctgtgaaggattcatttggcttgatttcaatgatctgcacgccatccatcgtcgagaaaagatggatgtaaactacgttgttgcatggtgctttatgcaaaacatggatgctgagaatttagggaaacctatcggatttctggatctaacaaggatctgtcaaactcagcataccgtgagactatcaccaaactccgagcagctcaaggacaagactcctacagagatagcggaatacaagaagagcttgcacaagtagaagatgattattgtcgtacagtatattggacgagctttcttgcacttccaaaataagagtcatcatggttgcgtacaacttcaacgatcattacatatgtttcattatctacccgaagaccggcatagtgacagtcttggacccccttgattattctcacaagacatataaataatttctacaaatcttacaatatgcgtataactactacaagttcaggggtggagaacaaacaaaaacaagggagaagcttctatgtcacaagcaacctaagggcactatcatctacgggtactacgcaagcaaattcctccgggttaatgggaggtacagggttaacgcagaggatttgcctagaattgaatgtcgaacaaggattcgacgatatgagtattaaaaatgtgcaacgggacctttgccaattcatccaccatgagtgttgtcatgtcttaggcaattttttcgacccagacagcatcctggtttcaagcgatgaatataaggttcttcgggagtggaataacgcgatgcca

SEQ ID NO: 35148 - DNA, 2487 bp, Oryza sativa
  Clone ID: PAT_MRT4530_39096C.1
atggcaatgtcaggagccacgtcaatgtctccaatcgcaggtgcaagtccaaatgccagcccggaacccaaatcagagtcagagtcaggagttcccaatatcggcaccgaagacccctgtcaaaatgctgtccagatccccgaagataactgtagccgagtcatcgtcagaccaaaggaaagaagtaaccaagctccaagccagtctaccgacaagaaggatggtactttgcagcccaactatggagcgaacaggacagtaatatggaagatggataatggtaggaccatgatcatcactggtttggaatttactcctgaagacgccgcaaggatacccaagcgtcagagaagaaaaaataccttccgtggagtacgtcagctaacccgacacctcataaagtacggcccgcccagacccgaagatgatgaatcaggagagcggttctctgctgacgatgatgataatgacgatgatgatgatgatgaggatgaggcgacacttaacagtttcatggaaagaggaatggagttcaaagcatacgacaacagcagtcacaatccttctgctcttcctccaactccagctccagcggaagccaaccatggaagaagcaacatcgccagggatgttcagaaatcactgcttgttccagtttcagctgccaaagtgcacaatcagaagcctgcaccccgggaccaagcaagtcgattatgtcgcaactgtcgtaaaccaggacattgtttcagcgattgtcctcttccaagagcagcaaaggcagttcatcgttgttcacaagttaccagcactgcccacgacaccaatcgacagctgaatgtgcaacctccgcctcaatggattatcgtcaagggcaccgtcaaaggccgcattgttccaccagcaacagcttcaagccttcagcaccagcgccagcagggttgcccaactattgccaatcctagcaatgcacctcgtattgctccaatccggaggcccatcggcaaatcatcactcggcccctactccatttcccctctccgcctccggaacatcgctgcctcacgcaccacctctctccgccgccgttgtcgcctccagccacgcgccaccgccgctcccgccgctgttgtgctgcgccgcctccactgtcggcttcaccgccacgcgggcaagctcggtctccgcttcgtttccccgttccatcaccggaactccatctcctctgtcagcccgagccgccaccacctcgccgccaccgcgagcgacctccaacctcacactctccttcgtcggctccgcagcaacgatagggagcccgacatcccctcatccaagctcttcgtcgcgggaaatcctttccccgctatccttccggtcgccgtccgccggttcccgctcgcggaacactgccggaccgccgttgccgtgccaccccgaggagtgccgccgccatctcgcctccctttggtgccgtgccgcttgctgagcatcccctctccgctctttccgccgctctccgcgtgccgacccgcgccgccggtgtcgtcgccggtggtcgccgtccggccgcgcgttgccgtcgtcgttcgccgccgctcggccgcgcctgtactttggccacccgtggaccactcctgtggtctgggtccatggtgccgccaggctgcagtggaccgagtccaccgtgcgccctcccctagtcccgctgacgtgtggggcccgcctgtcggcgcgcccttcccctttgatgacttcccgtcgtttcggaagtccgtggtcatgaggaaaagagttcggaagatcaaagtgaagaagcaaggcaaagatgttgatgacgaggatgtccagcagcgcgggcagcccgagtcaccggcgactattccggttctcgcgtttgaaccacatgcgttgcccgacaatgtagaccagacccttgctacggggacggagatggcgacgactttcttagatctcgagagtgctcttgctggccaagatcgtcgtatccaatattggaagacaaaatttgaagtagcggaactcgagagaaccatgcttgcagtgaagaaagagcaagctgtggaaacgctccgaggtcgtgaggtgtggttcaactcgtacttgaagagttgctgcacatccatggccagggtttgtagagaacttcgagtgccccgtggagatcccgaggagtcggcggccggatacatctcttggctgaatggagcctgtgctcaactcgacggcgtcggcaagcgtatcgacgaggtcttgaagcaggagtgtcgtcgatcgagccgatatgccgaaggacacgtgttggcttgcctacgagatcatcgcccgcgcctggacctcgattttctccgtgagggttttgctcgttctcggaggactccggcggagatagaccacctggcgaggtcgatggcgccgttggcggagaagatcttccagtctatagactggagttggccttcttggtag

SEQ ID NO: 35149 - DNA, 3474 bp, Oryza sativa
  Clone ID: PAT_MRT4530_39097C.1
atggctaaggaactcgaacttcttaagtgtgtcttacccgacaaatttgtggccgggtgcattattgcgaaacttcctccatcttggagaagtttcggtactgcactcaaacacaagagacaggaatactctgttgaggggttgatagcgtctcttgatgttgaggagaaagctcggaaaaaagatgatgcgtctaagggcgatggtgggcagtctagtgccaatgttgtgcacaaggcccagaacaagagcaaggggaaatacaaagctcagcagaccaccaacttcaagaagcagaagaagaacaacaacaatcctaatcaggatgagatgacttgctttgtgtgtggccaacctggtcatctggctaggaagtgtccacagcgtaaggggatgaaggcacctgcagggcagacttctaagtctgctaatatgaccattggcaacattggagatggaagcgggtatggtaatttacctactgttttttcagttaatcagtctactaattggtgggttgatactggggccaatgtacatgtttgtgctgacatctcattgttttcttcttatcaggtcgcacggggttccaccgtcctaatggggaatgggtcacatgcttctgttcatggtgttggcacggtagatctgaagtttacttcgggaaagattgtgcagctgaagaacgtgcatcatgtcccttctatcgacaggaatcttgttagtggctcccgtctgactagagacggatttaagttggtttttgagtctaataaagtagtcgtgtctaaacatggatattttattggtaaaggttatgagtgcggaggcttgttccgcttttccctttctgatttctgcaataagtctgtgaaccatatttgtggcagtgtggatgatgaggctaatgtctggcactcacgtttatgtcatattaattttggcttgatgtctcggctttccagcatgtgtttaattcctaagttttccattgtcaaaggttctaagtgccatagttgtgtgcaatcaaagcaaccttgtaagcctcacaaggctgctgaggagagaaacttggcacctctagaactcctacattcagatctttgtgaaatgaatggggtgttgacgaagggtggaaaacgatatttcatgacattgattgatgatgctattagattttgctatgtgtacttgttgaaaacgaaagacgaggctctagactattttaaaatttataaggcagaagttgaaaatcaacttgacagaaagataaaaagacttaggtctgatcgtggtggagagtttttctcaaaagagtttgacttattctgtgaggaatatggcattatacatgagaggacgcctccctattctcccgagtctaatgggattgccgaaaggaagaactgcacactgactgacttggtgaatgctatgttggacaccgcaggactacctaaggcatggtggggggaggcattgttgacctcgagtcatgtgttaaacagagttcctaacagaaataaggacaaaacaccatatgagatatggattgggagaaaaccatcactttcttacttgcgcacatgggggtgcttggcgaaagtcaatgtaccaataacgaagaagcgcaaacttggacctaagactgtggactgtgtctttctgggatatgctcaccacagcattgcctatagattttcaatagttaaatccgaggtacctgacatgcatgttggtacaattatggagtctcgtgatgctaccttctttgagagctttttcccaatgaaggatacacatagtagttctagtcaaccttctgaaataattcccagttcaatcacaccaccagaacaaactgaacatacacatgaacatgtcactgaggaggatgacagtgaagctcctcgaaggagtaaaagacaaaggacggctaagtcctttggtgatgatttcactgtgtacctcgtggacgacactcctaagtcaatttcagaagcatatgcatctcctgatgcagactactggaaggaggctgtccgtagtgaaatggattccattatcgctaacggaacttgggaggtgacagagcgaccctatgggtgtaaacctgtggggtacaagtgggtgttcaaaaagaagctgaggcctgacggtaccattgaaaagtacaaggctcggcttgttgctaagggctatactcagaaagaaggcgaagatttctttgacacttactcacctgttgccagattgaccacaattcgtgtgctactttccctagcagcctcacatggtcttctcgttcatcaaatggacgttaagacagcttttcttaatagagagctggatgaggagatctatatggatcaacctgatgggtttgtagttgaaggtcaagaagacaaggtgtgcaaattgttgaagtatttgtatggtctgaaacaagctcctaagcaatggcatgagaaatttgatagaacattgacatctgcaggcttcgcagtcaatgaggcagataaatgtgtatactatcgccatggtgggggtgagggagttattctgtgcttgtatgttgatgacatactgatatttgggacaaatcttgaggtgataaatgaggttaaatcattcttgtctcaaaaatttgatatgaaggatttgggagtagctgatgttatcctcaacatcaagctaattagaggtgagaatgagattacactcttgcagtcccattatgtggagaagatcttgaatcgctttggctacattgatagtaagccttctccaacgccttatgttcctagcttgttgcttcgcaagaacaagagaattgctaggaatcaactggaatactcccaaatcattggctcgctgatgtacctggctagtgcaactaggcctgatatctcctttgctgtgagcaagttgagctggtttacctctaatccaggagatgatcactggcgtgcgcttgagcgagtaatgcgctatctgaaaggtactatggaattggggcttcactattctgggtaccctgcggtactggaaggatatagtgattctaactggatctctgatgtggatgagatcaaagccactagtggatatgtcttcacactagttggtggtgctgtttcatggaggtcttgcaaacagaccattttgacgaggtcaaccatggaagcagaattgacggcactggatactgctactgttgaggcagaatggctgcgtgatctattaatggatctgcctattgttgaaaaaccagtgccggctatccttatgaactatgacaatcaaacggtaattgtcaaagtgaatagttctaaggataatatgaaatcgtctagacatgtgaaaagacgattgaagtctgtcaggaagttgagaaactccggagttataacgttggattacatccaaacaactagaaacctagcagatcccttcacgaagggactatcatga

SEQ ID NO: 35150 - DNA, 180 bp, Oryza sativa
  Clone ID: PAT_MRT4530_39098C.1
atgcggatggtgagatcaatagacggggcaatcagctggcagcgcaatagtgaagaagaccggtcggcggggccttgcacgggcaacgtcgatgaggccaaattctcgatgggtggcgatggcgacagtggagcaacggtgggcgtcaatgattgtggggtaggcgtggatcgcagatga

SEQ ID NO: 35151 - DNA, 990 bp, Oryza sativa
  Clone ID: PAT_MRT4530_39099C.1
tttggtctccaatcaatttctttaatcattcgtgcattcgttgtggagtccggataagttacgcgcgactaatccagttcggttagcggagtggagatcgtgcgggcgccctgatcaagcgacctatctctatataaaccgagccggtgacttcacgcaacatacgcgaaaccaatctagggtttgcctcctactctgtgctgcgccgtcgctcgtagactactccatcccgctcgccggcgtgcaccggtaatcgggagagcaggtctccggaacctctgccttcgacgtcttgcaccgggagaaggcagcaataaggtttttgaaaagcgttttgcgtgactgctccctgttcgtccgcgacggctcgtcttcctctccgctcgcgtgctgcgcgccttcgtcggcgcccgcaaccgcgagtaattcttgccgagcaacaggtttttccgcaatctcgatgtggaaatctatgccgctgctagtggcctgcatgccaagtgcgttctctgttcctggtatcgtggtctgggaggcagcgaccatctcgaacaatgggcgctcgccatcagccaaggggcctgcgccaacgatgattgcaccagcgccatccccgaatagtccatgcccgacaattttgctttcatcaggggctgagaaacatatcagggtcagctcggagagtgctacaaggatgcgcgcgccacgattgttctcaacgagctccttggcaagctggagtgcccgagcaccaccagagcaaccatagaggctgaggattgtgcgggagacggtagggcggaggccaatgagcgatgctagctgcaggtcggcactaggggcgcagcagccagagtaggtgctaaagatgaggtgggtgatatcagtggctggacggccccactcagtaatggccttccgcgcggcggactcggcaagcttcgggacctcggaagcgacgatgtctacacgagcttcaagggagggcat

SEQ ID NO: 35152 - DNA, 1282 bp, Oryza sativa
  Clone ID: PAT_MRT4530_3909C.1
gcgaagggaacaggacgacgcggggatagcctcgcgaaacgcggaacggcggggctgtcggccgatccgcgtcctccgggctccggcgactccgcggccgcgatctcttcggctctccccgccggagacggccaccgcgtcgcctcccccttcaaccgcctcgatcccttcctgttctttcggtattttggtgtagtttgcactggtttctggatttcttgacaaaatggtgaagctgacaatgatagcacgtgttactgatggccttccactggcagaagggttggatgatggacgggatcagaaggacgctgacttttacaagcagcaagctaaacttctattcaaaaacttatcaaaggggcaacatgaagcctcgcggatgtcaattgagactgggccatactattttcattacatcattgaggggcgagtatgctatctgactatgtgtgaccgttcttatccaaagaaactcgcattccagtacctagaagatctgagaaatgaattcgaaagagtcaacggcagtcaaatcgaaacagctgcaaggccgtatgcgtttattaagtttgacacattcattcagaagactaagaaactctatttggatactagaacccagaggaatcttgcgaaattaaatgatgagctctatgaggtgcatcaaattatgactcgtaatgttcaagaagttcttggtgtcggtgaaaagctagaccaggtcactgaaatgtcaactaggctgacttctggcacccgtttctatgcaggatcggtgtagttttgatgctcttttggttgaagaacaagatgtggtcaactgctaccaaaatgaacggtgctagttttgatgctacaacactggagaaacaagatatggaaactgctctaagctaaggaatctgggccttcattacctggttacgtgtagaaaaaatctgaatattgaagcaagtacttcaaagagatttctaaccatcctccggacacttgtgttatgtaactgcccattcaagcgactacttcagctgccgttcaccctcctcccgacaagctattcaagccaattcgttgtagcatacagtagaccttataacggaactcggacttgattttgtgaacccttggaaccgtatatacaagagctctgtagagttgaatttttttatattgggatgatattgcattttattttgcaaactcatgtaagaattcaggctgaatatcctatattacaatatctctgctgcatgtgactcaaaaaaaaaaaaaaaaaaaa

SEQ ID NO: 35153 - DNA, 430 bp, Oryza sativa
  Clone ID: PAT_MRT4530_390C.1
agatgcaaacaaatattatttttctgaagcataaaaattcgtaacaactcccaggaaatctggactccaacaactattgtcacaaaaaactgggatctcctgttctctccttctctttatcccttcaaaagctcaaggtcacataagttgcaaaataaaaaggaacacaattagtaagcaacaagaccaaatgtcatgccactagtacactgtaataattgtcatgcacttgaaacaaaaatctgcacttcacggaattctgttcgtaatcaaacaaataaaagaattggggtaatcaaggaggcaatatcagcctgatcatttgtttcttgcaactgaagaacaagttcacagaaatcacaaaagttataacccatgagtattcttgcgagcatctgccttgtagatgtgctccaagagcaaagttgtc

SEQ ID NO: 35154 - DNA, 1563 bp, Oryza sativa
  Clone ID: PAT_MRT4530_39100C.1
atggggggcggctccacggcgcccctcctcgcggccttcgcctgcgtcttcctcgccgtcttccctcccgtcgcctccgatcctgggcatgacaaggttattgcaccgattgtaagatttggaaacagaaatgatcagttggttcagccgtcggcggttcttcttcccttaaatcagatgacagatttctttctgagggtatccaatgatccagaactttatcgtaagatagctggcgtactagttgaggcaaatggcgttgataacatgctagagttttcaccggatagaaaatttccacaacaggcttttgcaccatactcaaatcttagccatcattggaatcccacgcttgcggacaagaatgagaagagtgccaatggatatctagcaaatgttgcagaatttgacctcgttatgcagggcagtgtatggacttcgttaccaccaatcagcaattcatctacaaagcatcagaaaccaataataatggtcactgcatcccaagactctgcatcattctttcgggaccgtagtcttggtgctgattctcccatctctggattgattgccttgctcactgctgttgatgctctctctcaccttcatgatataagtaatcttaagaaacagcttgtttttgctgttttcaatggtgagaaaatggtagatgcactccaacagtgccagtgaatcacttggttctgataatgttaaagtaaaaccagcagcttcatcaaatcctggtgttccaccatcttcattaatgtcgttcctaggaaagaattcatcaactcctggacttgtcttggaggattttgagggaattcgtcaatttcgatgaaaatggtagatgcactccaaagtgccagtgaatcacttggttctgataatgttaaagtaaaaccagcagcttcatcaaatcctggtgttccaccatcttcattaatgtcgttcctaggaaagaattcatcaactcctggacttgtcttggaggattttgattcccaattttctaatagattttaccacagcactttggatggccctgcaaacgtcaattcttcgtcaatagcagctgctgctgctttgattgccagatcattatacattcttgctagcgcagacttgcccattgatctcatcacactgaacactattaaagtgaatgtttcactggtagaagaattgattggatgtctactgaaatgtgatcctggtctttcttgcggaattgtgaagagcttcatttctccaagcaactcatgtccaagtcactatgttggtgtttttcaggatttgcctgctggcacacagtttccttcatatgcagatgatatctctcggtttatatggaactttttggcagacagaacttctagtttggcagatcctgtgtggaccgaaagcttctggaatacaattggcctcagggtgtatgcagtgcaagctacatcttatgattggcttgttcttctgatcgggatcattattacggtggcatcatactttgcagtgatcgttggcagatcatacatttcaaagatcataaagcgggactaa

SEQ ID NO: 35155 - DNA, 2655 bp, Oryza sativa
  Clone ID: PAT_MRT4530_39101C.1
atgcccgtgcgttgcaacgggcgacgtgtggcggcggaagtgcttggcgcggtcgtcgggcttctgaacgagcttgacgcaggccagcggcaggaactacatcagttgaaggccaacgactactccatcccgctcgccggcgtgcaccagcgatcgggagagcaggtctccggaacctctgtctttgacgtcctgcaccgggagaaggcggcaataaggcactgtgattttactatggctggttttgccgatgcactgaggccggataaattcaccggtgtgcattttaagagatggcagatcagggtcactctgtggctgacagctatgaaatgcttctgggtgagtactggcaaacctgaaggagttcttactgctgaacagcagaagcaattcgaggaagccactactctctttgtgggatgcattcttagcgttcttggcgatcgtctggtcgaggtgtatatgcatatgaccgacgctaaggagttgtgggatgcactgaatagtaaattcggtgctactgatgctagcaatgatctgtatatcatggagcagtttcatgactacaaaatggctgacaaccgttctgtagtcgaacaggctcatgagatacaagccatggctaaggaactcgaactccttaagtgtgtcttacccgacaaatttgtggccgggtgcattattgcaaaactacctccatcttggaggagtttcggtactgcactcaaacacaagagacaggaatactccgttgaggggttgattgcgtctcttgatgttgaggagaaagctcgggaaaaagatgccgcgtctaagggcgatggtgggcagtccagtgccaatgttgtgcacaaggcccagaacaagagcaaggggaaatacaaagctcagcagaccaccaacttcaagaagcagaagaagaacaacaacaatcctaatcaggatgagaggacttgctttgtgtgtggccaagttggtcatctggctaggaagtgtccacagcgcaaggggatgaaggcacctgcagggcagacttctaagtctgctaatgtgaccattggcaacactggagatggaagcgggtatggtaatttacctactgtcgcacggggttccaccgtcctaatggggaatgggtcacatgcttctgttcatggtgttggcacggtagatctgaagtttacttcggaaaagatcgtgcagctgaagaatgtgcagcatgtcccttctatcgacaggaatcttgttagtggctcccagtctcgtgatgctatcttctttgagagctttttcccaatgaaggatacacatagtggttcgaaccaaccatctgaaataattcctagttcaatcacaccaccagaacaaactgaacatacacatgaacttgtctctgaggaggatgtcagtgaagctcctcgaaggagtaagagacaaaggacggctaagtcttttggtgatgatttcactgtgtacctcgtggatgacactcctaagtcaatttcagaagcatatgcatctcctgatgcagattactggaaggaggctgtccgtagtgaaatggattccattatcgctaacgggacttgggaggtgacagagcgaccctatgggtgtaaacctgtggggtgcaagtgggtgttcaagaagaagcttaggcctgacgcctcacatggtcttctcgttcatcaaatggacgttaagacagcttttcttaatggagagctggatgaggagatctatatggatcaacctgatgggtttgtagttgaaggctttgcagtcaatgaggcagataaatgtgtgtactatcgccatggtgggggtgagggagttattttgtgcttgtatgttgacgacatactgatatttgggacaaaccttgaggtgataaatgagtcccattatgtggagaagatcttgaatcgctttggctacattgatagtaagccttctccaacaccttatgatcctagcttgttgcttcgcaagaacaagagaattgctaggaatcaactggaatactcccaaatcattggctcgttgatgtacctggctagtgcaactaggcctgatatctcctttgctgtgagcaagttgagccgatttacctctaatccgggagatgatcactggcgtgcgcttgagcgagtaatgcgctatctgaaaggtactgtggaattggggcttcactatactgggtatcctgcggtactggagggttatagtgattctaactggatctctgatgtggatgagatcaaagccactagtggatatgttttcacactgggtggtggtgctgtttcatggaggtcttgcaaacagaccattttgacgaggtcaaccatggaagcagagctaacggcactggatactgctactgttgaggcagaatggctgcgtgatctattaatggatctgcctgttgttgaaaaaccggtgccggctatccttatgaactgtgacaatcaaacggccgctgccgccgtccccaaagtcctcatcgccgatgactgctacctctccatgccatctcccatcagctcggctacatcgtcggccacggaatctccacggcctccacatcgacttggaccaggatcctcttcccgtcgcactctgtcggcaccaccgcctgccatccgctga

SEQ ID NO: 35156 - DNA, 3397 bp, Oryza sativa
  Clone ID: PAT_MRT4530_39102C.1
gggagagcactcaaacacaagaggcaggaatacaccgttgaggggttgatagcctctcttgatgttgaggagaaagctcggggaaaagacgtcatgtctaaggacgatggtgggcagtccagtgccaatgttgtgcacaaggcccaaaacaagaacaaagggaaatacaaaccccagcagaccaccaacttcaagcagaagaagaacaacaacaatccaaaccaggatgagagaacttgctttgtgtgtggctagcctggtcacctggccaagaagtgtccacaacgcaaggggatgaaggcaccgacagggcagccttctatgaccattggcaacactgtagatggaagcgggtatggtaatttacctactgttttttcagttaatcagtctactaactggtgtgttgatattggggccaatctatatgtttgtgctgacatctcattgttttcttcttaccaggtcacacgggattccaccgtcctaatgaggaatgggttacatgcttctattcatggtgctgaaacggtagatctgaagtttacttcgagaaagatcgtgcagctgaagaacgtgcagcctgtccctactatcaacaggaatcttgttagtggctcttgtctaactagagacggatttaagttggtgctttaatataataaagtagttgtgtctaaacatggattttattggtaaaggctatgagtgtggaggcttgttccacttttccatttctgatttctgcaataagtctgtgaactatatttgtggcagtgttgatgatgaggctaatgtttggcactcacgtttatgtcatattaattttcgcttgatgtctcagctttctagtatgtgttttattcctaaattttccattgtcaaaggttctaagtgccatagctgtgtgcaatcaaagcaacctcgcaagcctcacaaggcggctgaggagagaaacttggcacctctagaacttctacattcagatcttcgtgaaatgaatggggtgttgacgaacggtggaaaatgatatttcatgatgttgattgatgatgctactagagtttgctatgtgtatttgctgaaaatgaaagacgaggctctagactattttaaaatgtataagacagaagttgaaaactaacttgacaaaaagataaaaagacttaggtctgatcggggtggagagttttattcaaacgagtttgacttattccgtgagaaacatagcatcatacatgagaggacgcctccctattctcccgagtctaatgggattgccgaaaggaagaaccgcacactaacttacttgttgaatgccatgttggacaccgcgggactacctaaggcatggtcgggggagttgtcacgtcctgataaattcatcccgaattaaaaatcattttccaaacagggttaaacgtgcttggcctggagcaatttgggatggccggaagccaatctccaaagaactccagggttaagcgtgcttggcctggagcaatttgggatgggtgaccgatcgggaaattcttcccgggtgcacacgagtgaggacaaaacttgtcgcgtatgcaaatcactaacatgcaaattcttcccgggtgcacacgagtgaggacaaaacttgtcgcgtatgcaaatcactaacatgcaggagctgcaggtaaatgactatctacgagacaacatgctactaaaagtcacagactctgatccgtggtatggaaccatcgtcaacttcatggtcgcaggcatgtaccaccggaagaaaataagaaaaggttaatctacgagagccgcaagcacttacgggatgcacgctatctctacatagtctgttcagacggtctactacgaagatgcgttctggtagatgaaggcatgaagatcattgagaagtgttgtgctgccccatatggaggtcactatggagcattcaggacacacacacagatctggcagagtggattcttttggccatcaataccttccgaaactttttgcaagaacttggggctcagcacaacattgccatccgtatcatccccagacaagtggacaagcagaaatgagcaacaaacaaatcaaaaatattctgcaaaagactgtcaatgatatggggaagacatggaagaacaagctacctaatgcactttgggcatataggactgcttataagacgcccatcggcatgtcaccataccaacttgtccacggaaagacttgtcaccttccagtagagttggaacacagggcgcactgggcaatccggatttggacgtgatgatgaaaaaaaaagaaaagaaaaaaaagatagccatgcactctcccaaatttcaaaagagaaaaaataaatggaggaggaggtatacaaaaggagttattattattagtattttcctttgttcacccacaaatttaccatacacatgcacattcttgaccagaaagtatgtcttgtattttcatggatcctttatttgactttgcagtatatgtggaagtcataactctgttgtagagtccatagccttcactcgggacgagcaaaggttaagtgtgggggtgttgttgacggtacttaaatcataatatttgaccgtcaatacttgcatataatgaaataaaatatggtatccaacttagtggtagggtttattactaatcatttccaccagtgttggtgaaatatgtgtatgcaggtattttgaggaaaaaacacatccgtcaagcgacaaactgcacctccgcgcattcaggacacatttacatggattggaggccccataagtccagaggtattccgtgcgcttgcggatttatctgtggtcgtaagaaataccaacaatgatcattggcgtgcgcttgagtgagtggtctatctaagagatactatggacctggagcttcactatactgggtatcttgcggtactagagagatatagtgatgctaattggatctctgatatggatgagatcaaagccaccagtggatatgtcttcacactgggtggtggtgctgtttcattgaggtcttgcaaacataccatttcgatgaggtcaaccatggaagtagagatactgctactgttgaggcagaatggctgcgtgatctattgatggatatgcctattgttgaaaaaccggtgccggctattcttatgaactgtgacaattaaacggtaattatcaaagtgaacagttctaaggataacatgaaatcgtctggatatgtgaaaatacgattgaagtatgttaggaaattgagaaactccggggttataacgttggattacatccaaataggtagaaacctagcaaatcccttcatgaagggactatcacgaaatatgatagacaattcttcgaatgagatgggtctgagacccatg

SEQ ID NO: 35157 - DNA, 341 bp, Oryza sativa
  Clone ID: PAT_MRT4530_39103C.1
gttaggcattctttttctatttttaccattttaaatggaggaacaagacattgtaactccataacgatctgtgaacataatattggtatgaggccaccaaggtttgtagattgacatttttagagggatgcttgatcatttcgatagacaattcccatacccgtgtagcgttttggagcactttccaggggaacccggttctcgacagggatctacgtgaactcggagagaatcgccctgcagtaaatacacttgaatggttatttaataaggagcacctacacgattttgtccatggcctcccggatgctcctgaactggctaaaagtgatatgttacca

SEQ ID NO: 35158 - DNA, 401 bp, Oryza sativa
  Clone ID: PAT_MRT4530_39104C.1
tataggccaattcgagctcggtacccattgatttcgtgtgtgttgcgtgaagacggcggctcggtttatagagaggatgtggtctttatcggggcgcccgcatgatctccactccacgtaacctaggtggataagtcgcgtgtaacttatccggactccatgtcgttttcacgcaccggatttttcggaacatttccaaaacaaaacaaatccgaatttcccgcagcaaaacaaaactaaaaaaggaggctgcatctgcgcaaggtgaggaatcaatttcagcggaccattcgacgcgtacatcgtgcacaccggatttttggaacatttccaaaacaaaacaaatccgaatttcccacagcaaaacaaaactaaaaaatgaggctgcatctgcgaaggtg

SEQ ID NO: 35159 - DNA, 2912 bp, Oryza sativa
  Clone ID: PAT_MRT4530_39105C.1
atggctaaggaactcgaactccttaagtttgtcttacccgacaaatttgtggtcgggtgcattattgcgaaactacctccatcttggagaggtttcggtactgcactcgaacacaagagacatgaatactccgttaaggggttgatagcgtctcttgatgttgaggagaaagctcgggaaaaagatgccgcgtctaagggcgatggtgggcagtccagtgccaatgttgtgcacaaggcccagaacaagagtaaggggaaatacaaagctcaacagaccaccaacttcaagaagcagaagaagaacaacaacaatcctaaccaggatgagaggacttgctttgtgtgtgggcaacctggtcatctagctaggaagtgtctacagcgcaaggggatgaaggcacctgcagggcagacttctaagtctgctaatgtgaccattggcaacactggagatggaagcgggtatggtaatttacctactgttttttcagttaatcagtctactaattggtgggttgatactagggccaatgtacatgtttgtgctgacatcttattgttttcttcttatcaggtcgcacggggtttcaccgtcctaatggggaatgggtcacatgcttctgttcatggtgttggcacggtagatctgaagtttacttcgggaaagatcgtgcagctgaagaacgtgcagcatgtcccttctattgacaggaatcttgttagtggctcccgtctgactagagacggatttaagttggtttttgagtctaataaagtagtcgtgtctaaacatggatattttattggtaaaggttatgagtgcggaggcctgttccgcttttccctttttgatttctgcaataagtctgtgaaccatatttgtggcagtgtggatgatgaggctaatgtttggcactcacgtttatgtcatattaattttggcttgatgtctcggctttccagcatgtgtttaattcctaagtttttcattgtcaaaggttctaagtgccatagttgtgtgcaatcgaagcaacctcgcaagcctcacaaggctgccgaggagagaaacttggcaccactagaactcctacattcagatctttgtgaaatgaatggggtgttgacgaagggtggaaaacgatatttcatgacgttgattgatgatgctactagattttgctatgtgtacttattgaaaacgaaagatgaggctctagactattttaaaatttataaggcagatgttgaaaatcaacttgacagaaagataaaaagacttaggtctgatcgtggtggagagtttttctcaaacaagtttgacttattctgtgaggaacatggcattatacatgagaggacgcctccctgttctcccgagtctaatgggattgctgaaaggaagaaccgcacactgactgacttggtgaatgccatgttggacaccgcgggactacctaaggcatggcggggagaggcattgttgacctcgaatcatgtgttaaacagagttcctaacataaataaggacaaaacaccatatgagatatggattggaagaaaaccatcactttcttacttgcgcacatgggggtgcttggcgaaagtcaatgtaccaataacgaaaaagcgcaaacttggacctaagactgtggactgtgtctttctgggatatgctcaccacagcattgcctatagatttttaatagttaaatctgaggtacctgacatgcatgttggtacaattatggagtctcgtgatgctaccttctttgagagctttttcccaatgaaggatacacatagtagttcgagccaaccctttgaagtaattcccagttcaattacactaccagaacaaactgaacatacacatgaacatgtcactgaggaggatgttagtgaagctcctcgaaggagtaagagacaaaggacggctaagtcctttggtgatgatttcactgtgtacctcgtggatgacactcctaagtcaatttcacaagcatatgcatctcttgatgtaaactactggaaggaggctatccgtagtgaaatggattctattatcgctaacgggacttgggaggtgacagagcgaccctatgggtgtaaatctgtggggtgcaagtgggtgttcaagaagaagcttaggcctgacggtactattgaaaagtacaaggctcggcttgttgctaaaggctatactcagaaagaaggcgaagatttctttgacacttactcacctattgctagattgaccacaattcgcgtgctactttccctagcagcctcacatggtcttctcgttcatcaaatggacgttaagacagcttttcttaatggagagctggatgagaagatctatatggatcaacctgataggtttgtagttgaaggtcaacaaggcaaggtgtgcaaattgttgaaatctttgtatgatctgaaataagctcctaagcaatggcatgagaaatttgatagaacattgacatctgcacgcttcgcggtcaatgaggcagataaatgtgtatactaccactatggtgggggtgagggagttattttgtgcttgtatgttgatgacatactaatatttgggacaaaccttgaggtgataagtgaggttaaatcattcttgtctcaaagtttccatatgaaagatttgggagtagctgatagataaacattaagctaattagaggtgagaatgggactacactcttgcagtcccattatgtggagaagatcctgaatcgctttggctacattgatagtaagccttctcaaacaccttatgattctaacttgttgcttcgcaagaacaagagaattgctgggaatcaattggaatactcccaaatcattggctcgcttatgtactatgctggagctctgttggtcggcatccacatg

SEQ ID NO: 35160 - DNA, 307 bp, Oryza sativa
  Clone ID: PAT_MRT4530_39106C.1
aagacatgctcacatacgttatttttaaataattgataaaaatctgacctctatgcccaagtgggatatacacagcgcaactatgatgtatcacttccacataacaagattccagacctcctatctgctcttgcaaaaaagatggccattccagccatgccatctggagaggaattcaagccagaggccgccatagtgaactattatggcataggtgacatgcttggtggccacgttgatgacatggaagcagattggagtaaacctattgtaagcataaggttatgatgtcactcgatcttaacaa

SEQ ID NO: 35161 - DNA, 614 bp, Oryza sativa
  unsure (1)..(614): unsure at all n locations
  Clone ID: PAT_MRT4530_39107C.1
gtgccaagcaaggcgggcggagatcgatcgagatcgaagaattagttgcagtgatttaattgtttgcatggcaccgacgacgaccatgggaagcgccttatacccgctcggcgaaatgcggcggtcgcagcgcgccgacgggctcgccgccgtgctcgccatcggcaccgccaaccctcccaactgcgttacccaggaggagttccccgacttctacttccgcgtcaccaacagcgaccacctcactgccctcaaggacaagttcaagcgtatctgtcaggaaatgggcgtgcagaggcggtacctgcaccacacggaggagatgctgtccgcacacccggagttcgtggaccgcgacgcgccgtcgctcgacgcgcggctggacatcgccgcggacgccgtgccggagctggcggcggaggccgccaagaaggcgatcgccgagtggggccgcccggccgccgacatcancccacctcgtcgtcaccaccaactccggcgcccacgtcccggggtgtcgacttccgcctcgtcccgctcctcggnctccgcccctccgtgcgccgnaccatgctccacctcaacggctgcttcgccggctgggccgcgctccg

SEQ ID NO: 35162 - DNA, 3206 bp, Oryza sativa
  Clone ID: PAT_MRT4530_39108C.1
atgggcacaaaaaccaaccctgaccggtggaatggttcactgtcacagggtctgggggagggagggttattttttgaagatgagagcggttatgacgacaaagtgggggtcggctcggccggtcagacagggcgccaggccagtcaggcctctggcactcctgcggtcagaccgacgcatgacgtgggtcagaccggcctgggtcgtcggctgagggttctgttgatgctgctcgagatggtcctccagaaattactacttcggccaatactgatacagaacgtggatcaacttcagaagttactgctcctttgcacattcaccgccgacatccgccggaacacaattattggtaatataggtgagcggactgcaagacttgtctggttgttgcctgtcacaagaccaaattgtggcaagggcgagacatcagtcaaagggaacactggtggcaagacctacatccgcgtcttgggcaaccatgttgaacacggcggtggcgtgctggagctcatcagcaagcctcatattttgaaagctcaagtatcggtgctgtactactactccatcccgctcgccggcgtgcaccagcgatcgggagagcaggtctccggaacctctgcctttgacgtcctgcaccgggagaaggcagcaataagggtcactctgtggctgacagctatgaaatgcttctgggtgagtactggcaaacctgaaggagttcttaccgctgaacagcagaagcaattcgaggaagccactactctctttgtgggatgcattcttagcgttcttggcgatcgtctggtcgaggtgtatatgcatatgaccgacgctaaggagttgtgggatgcactgaatactaaattcggtgctactgatgctagcaatgatctgtatatcatggagcagtttcatgactacaaaatggctgacaaccgttctgtagtcgaacaggctcatgagatacaaaccatggctaaggaactcgaactccttaagtgtgtcttacccgacaaatttgtggccgggtgcattattgcaaaactacctccatcttggaggagtttcggtactgcactcaaacacaagagacaggaatactccgttgaggggttgattgcgtctcttgatgttgaggagaaagctcgggaaaaagatgccgcgtctaagggcgatggtgggcagtccagtgccaatgttgtgcacaaggcccagaacaagagcaaggggaaatacaaagctcagcagaccaccaacttcaagaagcagaagaagaacaacaacaatcctaatcaggatgagaggacttgctttgtgtgtggccaagttggtcatctggctaggaagtgtccacaacgcaaggggatgaaagcacctgcagggcagacttctaagtctgctaatgtgaccattggcaacactggagatggaagctggtatggtaatttacctactgtcgcacggggttccaccgtcctaatggggaatgggtcacatgcttctgttcatggtgttggcacggtagatctgaagtttacttcgggaaagatcgtgcagctgaagaacgtgcagcatgtcccttctatcgacaggaatcttgttagtggctcccgtctgactagagacggatttaagttggtttttgagtctaataaagtagtcgtgtctaaacatggatattttattggtaaaggttatgagtacggaggcctgttccgcttttccctttctgatttctgcaataacatgtgtttaattcctaagttttccattgtcaaaggttctaagtgccatagttgtgtgcaatcgaagcaacctcgcaagcctcacaaggctgccgaggagagaaacttggcaccactagaactcctacattcagatctttgtgaaatgaatggggtgttgacgaaggaagttgaaaatcaacttgacagaaagataaaaaggcttaggtctgatcgtggtggagagtttttctcgaacgagtttgacttattctgtgaggaacatggcatcatacatgagaggacgcctccctattctcccgagtctaatgggattgctgaaaggaagaaccgcacactgactgacttggtgaatgccatgttggacaccgcgggactgcctaaggcatgtgaagctcctcgaaggagtaagagacaaaggacagctaagtcttttggtgatgatttcattgtgtacctcgtggatgacactcctaagtcaatttcagaagcatatgcatctcctgatgcagactactggaaggaggctgtccgtagtgaaatggattccattatcgctaacgggacttgggaggtgacagagcgaccctatgggtgtaaacctgtggggtgcaagtgggtgttcaagaagaagcttaggcctgacgcctcacatggtcttctcgttcatcaaatggacgttaagacagcttttcttaatggagagctggatgaggagatctatatggatcaacctgatgggtttgtagttgaaggctttgcagtcaatgaggcagataaatgtgtgtactatcgccatggtgggggtgagggagttattttgtgcttgtatgttgacgacatactgatatttgggacaaatcttgaggtgataaatgagtcccattatgtggagaagatcttgaatcgctttggctacattgatagtaagccttctccaacaccttatgatcctagcttgttgcttcgcaagaacaagagaattgctaggaatcaactggaatactcccaaatcattggctcgttgatgtacctggctagtgcaactaggcctgatatctcctttgctgtgagcaagttgagccgatttacttctaatccgggagatgatcactggcgtgcgcttgagcgagtaatgcgctatctgaaagactactccatcccgctcgccggcgtgcaccagcgatcgggagagcaggtctccggaacctctgcctttgacgtcctgcaccgggagaaggcagcaataaggtttttgggaagcgcttcgcgcgactgctccctgttcgttcgcgacggctcgccttcctcttcgctcgcgtgtttcgtgccttcgtagacggtaacaatggtggctctaaaggctccagggtgcttttaggtaagttcagccctttcggcaggttttcgtgtattcttctaggcgacaagcctggctccgaactgctcatcagtcat

SEQ ID NO: 35163 - DNA, 374 bp, Oryza sativa
  unsure (1)..(374): unsure at all n locations
  Clone ID: PAT_MRT4530_39109C.1
accactcttacgcatacgcacggtcagacacttggagtgattgtgctgaaaccgccatgttgctgtatggccgggcattgggacggctcggtttcacagtgcaaagtcggactacacactcttgatgcatcccaagtgtgagagcttgttatattncatattcttgactacttggtgaagagttcctactcccttcttggcggtagcagaggtagacgaagcttccggccgtcacaaatcaagatgatcgtgatccgcccgccatacctgttggatacgttgccgcccgacaaagagtatgtgctgtctacgatgtcaagtgcgggcacattaccggacttcaccttgggctgagatcggacgactatgggatc

SEQ ID NO: 35164 - DNA, 492 bp, Oryza sativa
  Clone ID: PAT_MRT4530_3910C.1
cccacgcgtccggttctagatcgcgagcgggggcgctttttcgtctctgggtacctaggtatccaccgcaagccttaacctgtacggctcccaccccttctacatggacgtgcgctccggcggcggcggcggcggcggcgcggcgcacggcgtgctcctccttaacagcaacggcatggaggtcatctatggcggatcctacgtcacctacaaggtgatcggcggcgtgctggatttctacttcttcgccggcccgtcccctctcgccgtcgtcgaccagtacacccagctcatcggccgacctgcccccatgccgtactggtcattcgggttccaccagtgcaggtacgggtacaagaacgtggctgatcttgagggcgtcgtcgccggctacgccaaggcgaggatcccactggaggtgatgtggacggacatcgattacatggacgcctacaaggacttcacgcttgatccggtgaacttcccggccga

SEQ ID NO: 35165 - DNA, 236 bp, Oryza sativa
  unsure (1)..(236): unsure at all n locations
  Clone ID: PAT_MRT4530_39110C.1
atcatcttanatctatagaataccttggaacgatacataacgacaatttcgtgtgcaattgaggcatattcgatcctcatagtngcacaaaacacgcaaaattgcaaggctttgtatggcctcatcgatctgcacaatattgctgaatgtggcatgttcaactttagcagcattgatatattctcactgatataatttggatgatcatgttcccaatcaaagttcagtagagaaag

SEQ ID NO: 35166 - DNA, 4068 bp, Oryza sativa
  Clone ID: PAT_MRT4530_39111C.1
atggctggttttgccgatacattgaggccggataaattcaccggtgtgcactttaagagatggcagatcagggtgagtactggcaaacctgaaggagttcttactgctgaacagcagaagcaattcgaggaagccactactctctttgtgggatgcattcttagcgttcttggcgatcgtctggtcgaggtgtatatgcatatgaccgacgctaaggagttgtgggatgcactgaatactaaattcggtgctactgatgctagcaatgatctgtatatcatggagcaatttcatgactacaagatggctgacaaccgttctgtagtcgaacaggctcatgagatacaaaccatagctaaggaactcgaactccttaagtgtgtcttacccgacaaatttgtggccgggtgcattattgcgaaatttcctccatcttggagaagtttcaatactgcactcaaacacaagagacaggaatactctgttgaagagttgatagcgtctcttgatgttgaggagaaagctcgggaaaaagatgctgcgtctaagggcgatgatgggcagtccagtgccaatgttgtgcacaaggcccagaacaagagcaaggggaaatacaaagctcagcagaccaccaacttcaagaagcagaagaacaacaacaacaatcctaatcaggatgagaggacttgctttgtgtgtggccaacctggtcatctggctaggaagtgtccacagcgtaaggggatgaaggcacctgcagggcagacttctaagtctgctaatgtgaccattggcaacactggagatggaaacgggtatagtaatttacctactgttttttcagttaatcagtctaataattggtgggttgatactggggccaatgtcgcacggggttccaccgtcctaatggggaatgggtcgcatgcttctgttcatggtgttggcacgttttccattgtcaaaggttctaagtgccatagttgtgtgcaatcaaagcaacctcgcaagcctcacaaggctgctgaggagagaaacttggcacatctagaactcctacattcagatctttgtgaaatgaatggggtgttgacgaagggtggaaaacgatatttcatgacgttgattgatgatgctactagattttgctatgtgtacttgttgaaaacgaaagacgaggctctagactattttaaaatttataaggcagaagttgaaaatcaacttgacagaaacataaaaagacttaggtctgatcgtggtggagagtttttcttatacgagtttgacttattctgtgaggaatatggcattatacatgagaggacgcctccctattctcccgagtctaatgggattgccgaaaggaagaaccgcacactgactgacttggtgaatgccatgttggacaccgcgggactacctaaggcatggtggggggagtcaatttcagaagcatatgcatctcctgatgcagactactggaaggaggctgtccgtagtgaaatggattccattatcgctaacggaacttgggaggtgacagagcgaccctatgggtgtaaacctgtggggtgcaagtgggtgttcaaaaagaagctgaggcctgacagtaccattgaaaagtacaaggctcggcttgttgctaagggctatactcaaaaagaaggtgaagatttctttgacacttactcacctgttgccagattgaccacaatttgtgtgctactttccctagcagcctcacatggtattctcgttcatcaaatggacgttaagacagcttttcttaatggagagctggatgaggagatctatatggatcaacctgatgggtttgtagttgaaggtcaagaagccaaggtgtgcaaattgttgaagtctttgtatagtctgaaacaagctcctaagcaatggcatgagaaatttgatagaacattgacatctgcatgcttcgcagtcaatgagacagataaatgtgtatactatcgccatggtgggggtgagggagttattttgtgcttgtatgttgatgacatactgatatttaggacaaatcttgaggtgataaatgaggttaaatcattcttgtctcaaaaatttgatatgaaggatttgggagtagctgatgttatcctaaacatcaagctaattagaggtaagaatgggattacactcttgcagtcccattatgtggagaagatcttgaatcactttggctacattgatagtaagccttctccaacgccttatgatcctaacttattgcttcgcaagaacaagagaattgctaggaatcaactggaatactcccaaatcattggctcgctgatgtacctggctagtgcaactaggcctgatatctcctttgctgtgagcaagttgagccggtttacctctaatccaggagatgatcactggcgtgcgcttgagcgagtaatgcgctatctgaaaggtactatggaattggggcttcactattctgggtaccctgcggtactggaaggatatagtgattctaactggatctctgatgtggacgagatcaaagccactagtgggtatgtcttcacactaggtggtagtgctgtttcgtggaggtcttgcaaacagaccattttgacaaggtcaaccatggaagcagagttaacggcactggatactgctactgttgaggcagaatggctgcgtgatctattaatggatctgcctattgttgaaaaaccggtgccggctatccttatgaactgtgacaatcaaacggtaattgtcaaagtgaatagttctaaggataatatgaaatcgtctagacatgtgaaaagacgattgaagtctgtcaggaagttgagaaactccggagttataacgttggattacatccaaacaactagaaacctggcagatcctttcacgaagggactatcacgaaatgtgatagacaatgcatcgaaggaaatgggtttgagacccatgactgcggtcactgcgggcgggcgttggcggcacacgcggcagatcattccaaaagaatttgtgcagcgtttaaagggtgacatccctggagaaatccaactggaaacacgtaacagaaacagtcacactgttagagttgacaagacccaagaaaaggttatctttacagagggatgggcacaattcgtcaaaacctttgatctgcagatgggtgactccatgatgttcagattcaatggaaattctcagtttgatgtcattatagttgatcaaattggccgcgagaaagcatgttctgctgttgtggatgattctcagaatcctaatgtgcaagaaaggcgtgtagatgctactgaaacattgaacagttcgcgcgctcattctcagcccatgccaatgcagtcaactactgaaactgtgaaccattcacatgctcgtccttgtcccatgcatactgctgttgattgcatgcccctttctcatgctcatcctcaacccatgccgatgcaattccctaccgaaactgtgaaccattgtcatgctcctactggtcccatggaaatgccacttgaaaacgttgccctttctcatgctcatgctaggcccttgcaaatgcagtcacaaccaacggatagattgacacaggtgcaaagaggatattctttgtcctctaaagatcaggattgcagagtaggtgttatacctgatcccatcatcgggcaaaagaccatactaagtcgagttcaggtgaatgtggtgaagcgcaagatccaaaatattggttctcaaattccaatctttgtatctgtcattggaaagaacaacgcctctggaagaatatcctctctaagtatcgccaaccgatatgttgataattaccttcaagacgagaaaactatccgtctttcgcgtcttggggacaagtggaacatcaggctttctgattcgagtggtaacagaaggatggttggtggatgccgaaagtttgcggaagacaatgatgttggagtgggtgatatctgcctgttcgagctgttgaagaatcataaatgcacaatgaaagttcatatcatcagggcaaaggatatctgttaa

SEQ ID NO: 35167 - DNA, 1439 bp, Oryza sativa
  Clone ID: PAT_MRT4530_39112C.1
ggaacgaaatgaccgaaagttcagaaatttcggtccgaaatttccaaccctggtcacatcaatctataaaatgcatcctttttcctttaaattgtacaatattatagagtatgtgtgccgaataattgggcggctagtaggaaggaagaagtacatctattttttcagaaagccccctcaataagttcaaattgtacaaccacaccccatctcctctctctccggcgacattgcggcgcctccggccggccgggttctccggcagccaccgccttcatcggcgggatggaacttccgacgttcggcatgctcggacgcgtccctgtgttctcttctgcgcaggcggcggcctatcgatctctgtctgccatggacggattgaggcggcggccggcggcggtgtgcagctctcgccggagtgcggcgcggcgccggccgtcaacctgactcaacggcggcatgcatgcatgcaggcaagatattcgaactgattggcacattattttgctctaactgcagcaagttcagaactgagcaaaggtttcagtattgaaaattattttcgggaatacgcaaggagcgtattttttccattaaaagaaataaaagttatttacaaggcagtattgaaaattatactactataattaatctatcatattagttcacatgcatgatcttgatttcatcacaagataaacaatgtaggagtacgtatatatacatcagaaacgcagcgagtaaatgcaaatgcatgcaatgcacacagtaatatataattaatctacaaaggctagctatctgacttcagagaaattccaaaaattagactagctcgggcatgcaatgatgtaaatgctgtatatatatatgcactgtcatgttcatatccactgattgtttttttttaactcaaaattcgtgcatgcactagctagatccatgtgaatgattacttaacaagaaaagaaaacaagcattctaaggatatataaaacatgcaatgcaacaagaaagaagagagagatgtagagagagaaagagagaagggaagagggccatgcttggcacctcgcacgccgtacgcagcggccaacaacgagatcgagttcattgggttggcagccatgcgagcggcatacagggagccaggcatatcccctaccttttcatcaccttcacaatcacccaaagtaccaaacacacacacacatatatctcccctccaatgccgccatattgccacaccaaactaactacatctaaattaacaccatgaacactacctatatctatatgtctctcttaaaactatgtcactctttcttttctccctttcaaagtggatatgcatggctagctagaagagaagatggatggatggatggatggatatggatatggatacatggaggatagagcatggtgtgtttgttgtg

SEQ ID NO: 35168 - DNA, 652 bp, Oryza sativa
  Clone ID: PAT_MRT4530_39113C.1
aataaagtagtcttgtctaaacatggatattttattggtaaatgttaggcctgttccgcttttccatttctgatttctccaataagtctgtgaaccatatttgtagcagtgtggatgataacgctaatgtttggcactcacgtttatgtcatattatttttggcttgatgtctcggctttccagcatgtgtttaattcctaagttttccattgtcaaaggttgtaagtgcgccaagtgccattgttgtgtgcaatcaaagcaacctcgcaagcctcacaaggccgccaaagagagaaacttggcacctctataactcctgcattcagatctctgtgaaatgaatgggggtattgacgaagggtggaaaacgatatttcatgacattgattgatgatgctgctagattttgctatgtgtatttgttgaaaatgaaagacgaggatctagactattttaagatttataagacaaaagttgaaaatcaacttgacaaaaagataaaaagacttaggtctgatcgtggtggagagtttttctcaaacgagcttgacttattatgtgaggaacatggcatcatatatgagaggatgcctccctattctcccgagtctaatggattgctgaaaggaaaaaccgcacattgacttgttt

SEQ ID NO: 35169 - DNA, 881 bp, Oryza sativa
  Clone ID: PAT_MRT4530_39114C.1
atggggcggcccacccgcgccgcaggaaaagaccgaccgagtaaatctcaccgcaagaaaagaaaaaaaatcctattcaaatcgaaacccctctctttgatctcgtcgccgagggaattaggaggagagagagcaatggccgccgaggagggagtcgtgatcgcctgccacaacaaggacgagttcgacgcccagatgaccaaggccaaggaggccggcaaagtggtcataattgacttcactgcttcctggtgtggcccttgccgcttcatcgccccagtgttcgctgaatacgccaaaaagttccctggtgctgtcttcctgaaggttgatgttgatgagctgaaggaagttgctgaaaagtacaatgtcgaggcaatgccgaccttcctattcatcaaggatggtgctgaggctgacaaggtcgttggcgccaggaaggatgacctccagaacaccatcgtgaagcacgtcggtgccactgctgcatctgcttctgcctaagaattctcgcaggcgcaagttatcaaataagggccagcacctggtgttgtagtaggtattagcgttagtcatcgttatcgtcagtttggcttgggtgtcctcgaatatcatgcgaaatcgattccgagttctctttttaaaattcctgatgatgatatatagtttgtggaaatttggatctggctattctgtacgagtttgctgactattaaagcaattattataatatgatgatgctggcaagcttgtagatagattgaatttgtccagaaaaaaaaaaaaaaaaaaaaaaaaaaaaaaaaccccatgcgcggcgtttgctcatgccttgaatttttaaaaaaaaaaaaaaaaaaaaaaaaaaaaaaaaaaaaaaa

SEQ ID NO: 35170 - DNA, 3600 bp, Oryza sativa
  Clone ID: PAT_MRT4530_39115C.1
atggcgagttcctccatcagcgccggcaatcccttctctggccatgccgtccctaagaagctaaccaggacgaatttccttttatggaaagggcaaatcctcccggtgatccgcggtgcgcgtttggaaggttacctcacaggtgcaacacaagccccgtcggctgtgattgacgccaaggaaggagaagccactgtcaagaaatccaatccggcatttgaaacctggattgcggcagatcagcaggtgttggggtttcttctctcaaccctatccaaggaaattttgactcaagtcatccacatggaaactgcggctcaagtttggaaggcaatcaacgagatgctgtcctcccagtcgcgtgcgcggtctctgaacacgcgcctggcgctagcgacgacccagaaggtcgatctcagcgtctcggactacatcaacaaaatgaagatcctcgccgacgagatgacgtccgccggcaagccaatggatgatgaggaattgatgtcctacatccttgccggtcttgatgatgattgggaaccagtggtgtcttccctcgtcgggagaccagatgcagtttccttctccgagttctactctcaacttctgagcttcgaatcaaggcagaaacttcgccatgcagcagcgcatcagtcctccgccaacagcgccaaatgtggtggtggaaggggcggctacacccccttcaaccgcggcggacacagcggcaacaatggtgggcgcggcaacagcaacaatggcgggcgtggtggtggtcgcggcaacaacaatggaggccgtggcggcaaaccgcgccctgtttgtcagctctgtggaaaaacggggcacgtcgtcgctgactgtttgtataggtatgatgagaactttgtttctgataataagatggcagctgcagcctcctatggtgtggacacaaattggtatgttgacaccggagctacggatcacataactagagagttggacaaattgacgacccgggagaagtacaatgggaaggatcaaatctacatggcaagtggtgcaggtatggacattaaacatattggccattccgttattcatacccctactcgcaatttatatcttaagaatattttacatgttcctaaggccaagaaaaatctcctttctgcacgtcgtttagcccttgataatcatgcctttgttgaagttcactctcgtttctttgccattaaggatcaggtcacgaggaatcttcttcttagagggccttgccgcaatggtctctatcccattccacagtcgtcgctatcttcatccaagcaagtttttggagccatcaaacccactatttcgaagtggcatagtcgtttgggtcatccatctttgtctatcgttcaaaaagttgtgaacaataataatctcccatgtttaggagatattaatgaattaggtgtgtgtgatgcttgtcaaaggggtaagagtcatcaactcccctatcctaagtctttcagtgtgtccaataatcctttagagcttgtgttttctgatgtttggggtcctgcccctgactctgttggtggcagaaaatattatgtcagtttcatagatgatttcagcaagtttacttggatctatttgcttaagaaaaaatctgaggttattcataagtttcatgagttccaacaacttgttgagaggatgtttaatcgcaaaattattgctatgcaatctgactgggggggagaatatgaaaaacttcattccttttttactaagataggaattactcatcatgtctcatgtccccatgctcaccaacaaaatggctccgcagaacgtaaacatagacacattgtggaagttgggctttctttacttgctcacgcttctatgcctcttaaattttgggatgaggcttttcttgcagctacatatctcatcaatcgcacacctagcaaagttatacaatactccacgcctttagagcgtctcttgcatcaaaaaccaaattactcctctttgagaacttttggatgtgcttgttggcctaatcttagaccctacaacactcgcaaacttcagtttcgctccaagcaatgtgtgtttcttggctatagcaatattcataaaggattcaagtgtctagatgttgcaactggcagagtttatatttctagagatgttgttttttatgaaaatatttttcctttctctaatctccactccaatgctggagttaggctcaaatctgaaattttactcttgccctcaacactgttgaatcctgaagttgctagtaggggtatacaagaaaatggttatatgtttaatagtcctcctgttgagtctaatatttttgatgagcaagtatctgaacagggagaagaaggagagcaaaattcatatgctgcacatgatacagaaaatcctgatgatggtggcaatgatttctctgttgcttctgatgctgaaaatagtggttcagaacctgcagcaaatacacacggcgcagaaaatgaaaacagtgctactgctgctggaagtaccacagccgaacctgcaaatggcagtggtggtggcaagtctgcgagtcgcagtagcagcagtacagcaataggtagcagtgttactgctaatcagtcggttgatgactctgtgcaggtacaacagcagcaaactagacctaccactaggctgcagagggggatacgtaaggagaaagtctataccgatggtacagtgaggtacagttttcttgcttcctctagtgaagagccacagagtttaaatgaagctttagctgattctaattggaaacaagccatggatactgaatttacagccttgattcataataaaacttggcatttagttccaccacaacatggtaggaatgttactgattgtaagtgggtatataaaattaaaagaaaagctgatggtagcctggatagatataaagctcggctggttgcaaagggttttaaacagcggtatggtattgactatgaggatacttttagtccggtggttaaggctgctactattagagctattttgtctattgctatatctaggggttggtgccttcgacaacttgatgtgcagaatgcttttcaacatggtttgcttgaagaagagtcatcaaaggctgacacttcattatttttctatagtaaagggagtgtgactatttttgtccttatatatgtggatgacataattgtggctagttcaactcaagatgcagctgaagcgttgctaagagatttaaaacaagattttgcccttaaagatctaggtgatctgcactattttatgggtatagaggttaacaagaacttgactttgactagaccagatatttcttttgcagtaaataaggtctgtcagtttttacatgctcctactttacaacattggatggcagttaagaggatactgagatatgttaagtcctctgttgatcttggcctaaagattaacagatcttcttctactcttgttagtgctttttctgatgcagattgggcaggatctgtagatgacagaagatctacaggaggtttttgcagtatttcttggatcaaatctagtgtcatggagtgctag

SEQ ID NO: 35171 - DNA, 1152 bp, Oryza sativa
  Clone ID: PAT_MRT4530_39116C.1
atggcggcggccgcgacgaaaaaaatccagaagatgaggagaggctgggggcaggtatttgcggccgccggtggcagggctcgagggcgacaagcggaggcggcagccgatggctgggcgcgggcaacggtggcaagcgatgcggggcggagtagccccctaggcgtgagggtgacgggcggatgcgacaggcggccgggcacgagggtgacaggcggaggaggcagggattctactacaggtggggcagggcggtcgccgatggtagggcgcgatggcgacggtcgtcggcggcaggcgatgcgcggtggagtagcgccgaggacggggattattggatatcattatttgtggttatatgctgcggatacgtcgaggtgggccgctgatggtgacagcttagcactggctggcggctggccggcgggtggggagaaggccggcggggtgatgcgggagaggaggaggacatcagtggccggcgacgggcggcgacgcggcagcaggccaccgcaccgggtggggaggaggcctgctgacgacgtgcagttgcgcgtggtcaccgcggagaacgagctagaggacgcggctgcggcgggaggccggtgtcgacggtgtcatggcggacgtgtagtggggcatcgtcaagggcgccgggccggcgcggagtacctcaccatcggcgtggatgaccggcctctgttccacggcagaactcccatccagttgtatgccgatttcatgaagcgattcagagagaacatggccggcttcttggactctggcctgattgtggacataagaggttgggcttggccctgcaaagtggcggcgacagaagccgggcacccgaagtgggagctaccggacgccgccgccggagagtacaacgacacgccggaggacacgtttttcttcaccgcggacggcggcacgtacctcaccgaggcggggaggttcttcctcacgtggtactccaacaagctggtcgagcacggcgacaagatcctcgacgagatgaacatgggccccgccggcctcctcactccgcgtggtggcctgtggccgcgtcgccagccaccgacgccctccttctctcccgcctcgccccgcaggccttctctccacccgccaacctgcgcagagaagtga

SEQ ID NO: 35172 - DNA, 455 bp, Oryza sativa
  Clone ID: PAT_MRT4530_39117C.1
cccacaggtaatatatatcacagatcacacaacttatgtaacaatatacatcacacagtaatgattcccatcttaacaaactacaaatccacacaagcaatcaagatatagcctaatctgaaatttggcaatgaaaattagcaatgaatatagccaacctaatcggaaatggggggggggcttgggggtgaaggagatgtggaggacgtcggcggtcggggggacaagccgaaaacaccaacagttggggatggaggcgggggacgtccaccaaatctggccgttggtcggcggggaaggcggaaggcggcgccggttggcggtcaggaggcaagggaggtggttgcaaacgctggcggtcggcggttggtcggcgggggaggggggctgccgccaaatcccgggtcctccaaatttgttggagggtcggaatccgggggtttgggggtcaggag

SEQ ID NO: 35173 - DNA, 993 bp, Oryza sativa
  Clone ID: PAT_MRT4530_39118C.1
atgctaagccgccgccaccgcctcatcggcgttgcctcgccggcggcgaccgagctccggcgagccttccgctcggaggcggccctcgaggccatccgcgcgcactccaaggacgccgacggccccgcgcacctcgcgctytacaactaccccaccttcgccggcggctacgccgcgctcgccgccgacctcttccaccgccgcctccgccgacgcctcctcgtgctccccttctcctccgtcgagcccttcagtgtaatcgcatttgatcaccggcgaagtacactagcaagaatcccccatttgggtcattgcccaagtaatcttgagcttaacattgacacaacaaagagcagtgctcgagctacatttgattatttctccaggaaccttgcagagataaaatccgattctgatatgtgtgagaagctgttggaccaagaagatgaggagagggtttttaatgttctcaaatacatagaagatgctgacctgcgccagtggaagctgcccaatgctaaggaatttcagacagcactcagggatgagcgcgctaagttgaactgtatcacaaatcctcttgtatttgaacagctgcagcaacttgatgtttgcaatctgctttctagggggaagtcacttgctcacgatcgcttcgaagctgcagggaagttaatacacaagccatttaggattcatctcggaagaggattgcacggtgaatgccttgcgatcagagcagacgggaattcaaaattaagccatgaaattggcttggagttgagcaagatgagtactgctgctggattaagacctatcggagcagtggtcttcatgcaacgtggtctcctgaagatctgcttgaggacaacagacagtagtaccaatacggcagagattgctaaggcatatggtggtggtggaaaaccaagctcaagttcgtttgcgctaagaatggacgaattcaacgcttggatctctgtgaactcatga

SEQ ID NO: 35174 - DNA, 165 bp, Oryza sativa
  unsure (1)..(165): unsure at all n locations
  Clone ID: PAT_MRT4530_39119C.1
acgaggatgaaggaaggccagaacgacatatactacatcaccggcgaganaagaaggccgtggagaactcccccttcttggagaaatctgaagaagaagggttacgaggtctctacatggtttgatgccatcgacgagatatgctgttggccagctcaaggagct

SEQ ID NO: 35175 - DNA, 1255 bp, Oryza sativa
  Clone ID: PAT_MRT4530_3911C.1
gggctctcgaaacttccgggctccggcgactccgccggccgcgatctcctcctcctcctcctctccggctcttcccggagacgaccaactccctccttcctgttcatttggtattctggtgcagtttgcagtggtttctggccttcttgacaaaatggtgaagctgacaatggtagcacgtgtcactgatggccttccactggcagaagggttggatgatggacgggatcagaaggacgctgacttttacaagcagcaagctaaacttcttttcaaaaacttatcaaaggggcaacatgaagcctcgcggatgtcaattgagactgggccatacttttttcagtatccttatgttctttacatcattgaggggcgagtatgttatctgacaatgtgtgaccgttcttatccaaagaaacttgcattccagtacctagaagatctgaaaaacgaatttgaaagagtcaatggcagtcaaatcgaaacagctgcaaggccatatgcctttattaagtttgacacattcattcagaagactaagaaactttatttggacactagaacccagaggaatcttgcgaaattgaatgatgagctctatgaggtgcatcagattatgactcgcaatgttcaagaagttcttggtgtcggtgaaaagctagaccaggtcactgaaatgtcaactaggttgacttctgacacaagaatgtatgcagataaggctaaggatctcaatcgccagttcactatctatgggcagctgcgtctcatttatggtatgcacaaaccttttggatttcaggccttgattcggaagtatgcccccgttgccattgtgatcggtgtagttttgatgctcttttggttgaagaacaagatatggtaaactgcaccaaatgaaggaagctgggcctgcgttacaacactggagaaagaaaaacaaaaaaattaggttgattctggatcaatagtgctttggtgacgtgtatcccgtatctgcccattcaagcgagtacttcagctgcccttttaccctcctcctcactacaaagctattcaagtcaattcgttgtagcataggccttatgacggacttgattttgtaaatccttggaactgtacatataagagctctgtagagttgagttttcggtattgggatgggattgtattcttttgcaaactcaactcatgtaagaattcaggctgaatatcgtatactccatatctcttggacttcatgcccatgttgcct

SEQ ID NO: 35176 - DNA, 680 bp, Oryza sativa
  Clone ID: PAT_MRT4530_39120C.1
gcacgaggccacgcacacatttccccatgcacatctccctcaatctctctctctctctgcatagaggctgctactcctacttgctagccctactactccctaccacacggccacacacacagcaagcagagcagacggcttcgctttgcatggccactggagttgttgctgttcttcttccctttgagcagcagcagcagtgagccgtcctgtggtgtgttggttgtcacagtactgtgtggtggtggtggaagtggaggagcaaaccttggacatgaattgagaggcccctatcttttcctgtccatctctcagtagcagtgagctgagtgagtgagtgagtgacagtgagtgatggattgatgtgtgatgcctcactagctgagccccccctcctcctcctccttcctttgtggcaaatctcatcagcaacagggacctcttggtgtgactactttgtttacacggtggttctctccttttcttcttctcagcgtcgccgtcgtcttctttctccttcattcattcagacttcatcagagtagtagtagtaggaaggagatagtgtagacaacaagtgtgtgtgtgtgtgagagagagaggtagagggatggagagggggaacgaacccccttcttgcttttcttcataggtggtgggcttcaacctttcggcaagat

SEQ ID NO: 35177 - DNA, 1500 bp, Oryza sativa
  Clone ID: PAT_MRT4530_39121C.1
atggcgggggagctagggcagcagacggtggagctaggcgcggtggtgcggcgggcggcggaggattcgtacctggcgctgcgggagctcgtggagaagtcgcgggtggaggccgaggggaagaacgggcagcagaggtcggacaccgagaagaagatcgacctgctcaagttcatcgaccgcacccgccagcgcatgctccggctccatgtcctcgccaagtggtgccagcaggttcctttggttcattattgccagcaacttgcatcaaccctctctagccatgagacatgcttcacccaaacagccgattcgctgttctttatgcatgaagggttgcaacaggcccgcgctcccatttttgatgttccatctgctatagaagtcctacacacagggagttataggagagtgccaaaatgtgttgaggaaattggtactcagaacacactttttcaagatgaacaaaagcctactttgaagaaattaagcacccttgtacgggctaagttacttgaaatctcacttcctaaggaaatatctgaggtttcggtgactgatggaatagccaatgttcaggtagatggagaatttaaagttcttattacattaggttaccgtgggcatttctcactatggaggatattgcacatggagttacttgttggtgagaaggctgggccaattaagcttgaagagacaaggagatatgctcttggtgatgatattgaacggagaatggctgtggctgacaatcctttcatgattttgtatacaatactccatgaactatgtatttcacttgttatggatactgtaattagacagacaaatgttctacgacagggcaggtggaaagatgcgataaaatctgaacttatctcagatatcggcacaggacaaggtggaagtaatgctgtaatgcagcttggtcaagatggggagcttgattcaagtgggtctaggatacctggtctgaaaattaattactggctagaggaaaaaaacaatgcttcagctgaatcagattcatctccatatattaaaattgaggcagggcaagatatgcagataaagtgtcagcacagctctttcgtattggatccatttacagataaagaagctgatctttctattgatctgagttgcattgatgttgaagctctaattttgaaagcaattgcttgcaataggcacacacgtcttctggaaattcaaagggaattgatgaaaaatgttcagatgtcacaatcatccactgaggttatcctgaagcgagaagttcatggagagggctttcagaagagagtacatagaagagactccaatgattgttgtacaaatgaaatgcttcaagttagggcatatggacaatcatatattgaccttggaataaatatcagcaatacattagtaaaagttccaaacattctacattatgaaagtattgtaatcttgattagagcgggtacaataattggcgacaatagttccatgtag

SEQ ID NO: 35178 - DNA, 159 bp, Oryza sativa
  Clone ID: PAT_MRT4530_39122C.1
atgccgatcagcaccgcaaaccagcggcgcctctaccgtgtcaccgttgtcgagggggacgacccgaccgccggcggcgaccaggagatcgtggtgctcttccgctacacacgctactcgaggacatggaacaggcgcaagggcattgcgattcgatga

SEQ ID NO: 35179 - DNA, 487 bp, Oryza sativa
  Clone ID: PAT_MRT4530_39123C.1
gcgcgatgaacttctctgcaagtagctcatcacggtggaaaaggcggccggcggccatggaagttggccggagttggcgcgggcgttcagagccggcttgaatcgcgtggatttaggggaggaaacgacgctaggtttcacgggagagagaagagagagaggatgccgggcgggaggaggacgacgacctggcgcgtgggccccacgcgggcgcgcggcgtcagcgcgcgtgcgacgcgcgtgcacgcgggaaggaggggcggctcgggcagggggcggcttgggccgggcggccggcccaggaagagaggagggagaggcggcccgggggagagagggaggaggagggagtgggccgggagggggaggagaggcccgggagagagaggggaaagagagggaggagagggagactttgggctgggccaagagagagagggaggactttgggccagacttggcccaaaggaggaaggaggattatttt

SEQ ID NO: 35180 - DNA, 249 bp, Oryza sativa
  Clone ID: PAT_MRT4530_39124C.1
gtgccgccgcgccgctgccctcggtgccgccgcgccgcaccgtgtgccgcgccaggcgtcgcctcgccttgcgccgccgtcgaacccgagggagttgcggatccgaacgagggtcaagacccgcaggactacgagcaaggcaagtcatcactattccttgaacatattgatcccaattgcgaaattgttttgtttacaaataaaattgcatgcaatgataaacatcctacttgttattatgccatgcct

SEQ ID NO: 35181 - DNA, 2267 bp, Oryza sativa
  Clone ID: PAT_MRT4530_39125C.1
atggagacgcgtcgtcttcctcttcgcacagccgcctaccggccgctggctttgcctgcgccctggagtggcgtaggcatgcgacgccgctggctaggaaacggcgccggggtggctgcagcgaggcctggaaaaggcggggacgacggtagcagcgacgtacggggacgggagggggggaggacggagcacgcacgacagcgcatgcgcgtggcgtgggctgacggatgggtggacggaagtcggaagggactgacgagcggactgactgacccaacgtgcgagcgcagggaggagcgccttccgttttgcccgactacaggatggacgttgtttcaaagggcatccagatttggacgttgttctaagaagtgtccagaggtggacgttgtaccgaagcacgtccaggctcggtttggggcgcccatgccgccatgcggagaggcgccatcgtcgactctcctctcctcgggcccaatgttggtgcagggctcgggcaaggtgctgccatgcccgccgttcacctcgactctgggagactgcaacagccgccttccggcttccgcctccacaacgtcaggaatctgccgttgcagttcacctcaactcacctcgaaggctctcgaatccggagaggacgccgccgctttctgccttcacgccgggaggtcgcagccgctatccacgttctggttgagtcatgctggaacaataacccactcgtgccggcttgtgttgcgtcgtctgtccgcccctcttggttcctaacagcaagtccaggcatcgcctcactccaggtggctggccgagcaatgtctgaatttttgacaggcagttttcagggtgagcaggccctgctgaaagaagaatctactgaaagggtatgcattgacaacagcacctgcagcgactgcaccttagtgaaggtcgacagcatgaacaagaatggcatcctgttggaggtggtgcaagttctgagcgatctcgatctcgccatctcgaaggcgtacatcacctctgatggtggatggttcatggatgtgtttcatgtggtggacaagcaagggcagaaggtgactgatgagaagaccattaagcacattgagaaggcgttaggcccagacagcaacctgctgggtggcgcgaagggcgggtcgtccccggtgaggtcggtggggatgcactccatcggcgaccacaccgccatcgagctcaaggggcccgaccggacgggcctcctctccgaggtcttcgccgtgctcgccgagctcggctgcaacgtgctcgccgccgaggtgtggacgcaccgcgcccgcgtcgcctgcgtcgtgtacgtgaacgacgtcgcgtcggggcaggccgtcggcgacccgtgccgcctgtcccggatcgagcaccgcctccgcctcgtcctccgcggccacgccggcggcgacgacggcgacggcgacgacggcccggcgcacgccaacttcttctcctccggcggcgccgggtcgaacacccacgtcgaccggcggctccaccagttgatgcacgccgacgtggacgccgacgacgacgtcggcctcgtcagccgcgccatcgtgtcgggccaggccgggaacgcggcggcgccggaggagaggccggtggtgacggtggagcactgcgaggagaaggactactcggtggtgaacgtcaagtgcagggacaggtccaagctgctgttcgacatcgtgtgcacgctcaccgacatgcactacgtcgtctcccacgcctccgtctcctccgacggcatctacggcatccaggagctgtacattcgtcggaaggatgggcgcacgctacagaaggacgaagcagggagggtgatcaagtgccttgaagcggccatctccagaagagtatctgagggattcaccctggagctgtgcggcagggacagggtcgggctgctgtccgacgtgacgcgggtgctcagggagcacggcctgacggtgacgagggccgacgtcacgacggtcggcggccaggccatcaacgtcttctacgtccgcgacgcctccggcgagccggtggacatgaagaccatcgagggcctccgcgtccaggtcggccacaccgtcatgctcaacgtcaagaaggtgccctcctccccctcctcctcctccgccgccgccgccgccgccgccaacggcaagtcgccggggcagcctgcctccggcgccctgtccaggaccagcttcttctccttcggcaacctcttcgccaagctcagagcatga

SEQ ID NO: 35182 - DNA, 1095 bp, Oryza sativa
  Clone ID: PAT_MRT4530_39126C.1
atggctgacaaccgttctgtagtcgaacatgctcatgagatacaaaccatggctaaggaactcgaactccttaagtgtgtcttacccgacaaatttgtggccgagtgcattattgcaaaactacctccatcttggagaggtttcggtactgcactcaaacacaagagacaggaatactccgttgaggggttgatagcatctcttgatgttgaggagaaagctcgggaaaaagatgccgcgtctaagggcgatggtggacagtccactgccaatgttgtgcacaaggcccagaacaagagtaaggggaaatacaaagctcagcagaccaccaacttcaagaagaagaagaacaacaacaatcctaatcaggatgagaggacttgctttgtgtgtggtcaacctggtcatctggccaggaagtgtccacaacgcaaggggatgaaggcacctgcagggcagacctctaagtctgctaatgtgaccattggcaacactggagatggaagcgggtatgggggcaatgtcgcgcggggttccaccgtcctaatggggaatgggtcatatgcttctattcatggtgttggcacggtaggtcgagccgaaccaactaactgctacagccaaaaatgcaagggcaatttcacattacgaaaatgcagcctccgcctagccgccgaggatgagatccatgccctcctcgccatcatggagctcggcgcattccttcactcactcctcctccgcccggctgccagggatgagatcaatgccttcatgtcggcatggagttcggcgcgctcctccgcttactcggcccctgtctggcaaagcccacttctaataccatcgagttcgacgtgggttccgtcgagtttgatcgacgtgctcgcctccatactcacagaactcatcgtcgggccttgctgccccatcatcaccctcgaccaggcggaggtcaccgaggccttcagggcctttgactgcaagggcaacggcttcatctctgccattgagctcacacgctccatagctgacacggcgacaccgacagcctcatcatccttttatttgactgtgggtcccatcacccactga

SEQ ID NO: 35183 - DNA, 5135 bp, Oryza sativa
  Clone ID: PAT_MRT4530_39127C.1
cttttgcagttttgttttgctgcaaattcggattcgtttttgttttggaaacgttccgaaaaatccggtgcgtgcaaacggcgtggagtccggataagttacgcgcgacttatccggttcggttacgcgcagtagagatcgtgcgggcgccctgatcaagcgacccttctctatataaaccgacccgccgtcttcacgcaggatatacgcaaaatcaatctagggtttgcctcctactctgtactgcgccgtcgctcgtagactactccatcccgctcgccggcgtgcaccagcgatcgggagagcaggtctccggaacctctgcctttgacgtcctgcatcgggagaaggcggcaataaggtttttgggaagcgcttcgcgcgactgctccctgttcgttcgcgacagctcgccttcctcttcgctcgcgtgtttcgtgccttcgtagacacctgcgaaaagtttcgaccaagcagccggtctttccgtcacctcggtgagtactggcaaacctgaaggagttcttactgctgaacagcagaagcaattcgaggaagccactactctctttgtgggatgcattcttagcgttcttggcgatcgtctggtcgaggtgtatatgcatatgaccgacgctaaggagttgtgggatgcactgaatactaaattcggtgctactgatgctagcaatgatctgtatatcatggagcagtttcatgactacaaaatggctgacaaccgttctgtagtcgaacaggctcatgagatacaaaccatggctaaggaactcgaactccttaagtgtgtcttacccgacaaatttgtggccgggtgcattattgcaaaactaccttcatcttggagaagtttcggtactgcactcaaacacaagagacaggaatacttcgttgaggggttgatagcgtctcttgatgttgaggagaaagctcgggaaaaagatgccgcgtctaagggcgatggtgggcagtccagtgccaatgttgtgcacaaggcccagaacaagagcaaggggaaatacaaagctcagcagaccaccaacttcaagaagcagaagaacaacaacaacaatcctaatcaggatgagaggacttgctttgtgtgtggccaagttggtcatctggctaggaagtgtccacagcgcaaggggatgaaggcacctgcagggcagacttctaagtctgctaatgtgaccattggcaacactggagatggaagcgggtatggtaatttacctactgtttttttagttaatcaatctactaattggtgggttgatactggggccaatgtacatgtttgtgctgacatctcattgttttcttcttatcaggtcgcacggggttccaccgacctaatggggaatgggtcacatgcttctgttcatggtgttggcacggtagatctgaagtttacttcgggaaagatcgtgcagctgaagaacgtgcagcatgtcccttctatcgacaggaatcttgttagtggctcccgtctgactagagacggatttaagttggtttttgagtctaataaagtagtcgtgtctaaacatggatattttattggtaaaggttatgagtgcggaggcctgttctgtttttccctttctgatttctgcaataagtctgtgaaccatatttgtggcagtgtggatgatgaggctaatgtttggcattcacgtttatgtcatattaattttggcttgatgtctcggctttccagcatgtgtttaattcctaagttttccattgtcaaaggttctaagtgccatagttgtgtgcaatcgaagcaacctcgcaagcctcacaaggctgccaaggagagaaacttggcaccactagaactcctacattcagatctttgtgaaatgaatggggtgttgacaaatggtggaaaacgatatttcatgacattgattgatgatgctactagattttgctatgtgtacttgttgaaaacgaaagacgaggctctagactattttaaaatttataaggcagaagttgaaaatcaacttgacagaaagataaaaaggcttaggtctgatcgtggtggagagtttttctcgaacgaatttgacttattctgtgaggaacatggcatcatacatgagaggacgcctccctattctcccgagtctaatgggattgctgaaaggaagaatcgcacgctgactgacttggtgaatgccatgttggacaccgcgggactgcctaaggcatggtggggggaggcattgttgacctcaaatcatgtgttaaacagagttcctaacagaaataaggacaaaacaccatatgagatatggattggtagaaaaccatcactttcttatttgcgcacatgggggtgcttggcgaaagtcaatgtaccaataacgaagaagcgcaaacttggacctaagactgtggactgtgtttttctgggatatgctcatcatagcattgcctatagatttttaatagttaaatccgaggtaccagacatgcatgttggtacaattatggagtctcgtgattctatcttctttgagagctttttcccaatgaaggatacacatagtggttcgaaccaaccctttgaaataattcccagttcaatcacaccaccaaaacaaactgaacatacacatgaacttgtctctgaggaggatgtcagtgaagctcctcgaaggagtaagagacaaaggacggctaagtcttttggtgatgatttcactgtgttcctcgtggatgacactcctaagtcaatttcagaagcatatgcatctcctgatgcagactactggaaggaggctgtccgtagtgaaatggattccattatcgctaacggaacttgggaggtgatagagctaccctatgggtgtaaacctatggggtgcaagtgggtgttcaagaagaagcttaggcctgacggtactattgaaaagtacaaggctcggcttgttgctaagggctatactcagaaagaaggcgaagatttctttgacacttactcacctgttgctagattgaccacaattcgtgtgctactttccctagcagcctcacatggtcttctcgttcatcaaatggacgttaagacagcttttcttaatggagagctggatgaggagatctatatggatcaacctgatgggtttgtagttgaaggtcaagaaggcaaagtgtgcaaattgttgaagtctttgtatggtctgaaacaagctcctaagcaatggcatgagaaatttgacaaaacattgacatctgcaggctttgcagtcaatgaggcagataaatgtgtgtactatcgccatggtgggggtgagggagttattttgtgcttgtatgttgacgacatactgatatttgggacaaaccttgaggtgataaatgaggttaaatcattcttgtctcaaaattttgatatgaaggatttgggagtagctgatgttatcttaaacattaagctaattagaggtgagaatgggattacactcttgcagtcccattatgtggagaagatcttgaatcgctttggctacattgatagtaagccttctccaacaccttatgatcctagcttgttgcttcgcaagaacaagagaattgctaggaatcaactggaatactcccaaatcattggctcgttgatgtacctggctagtgcaactaggcctgatatctcctttgctgtgagcaagttgagccgatttacctctaatccgggagatgatcactggcgtgcgcttgagcgagtaatgcgctatctgaaaggtactgtggaattggggcttcactatactgggtatcctgcggtactggagggttatagtgattctaactggatctctgatgtggatgagatcaaagccactagtggatatgttttcacactgggtggtggtgctgtttcatggaggtcttgcaaacagaccattttgacgaggtcaaccatggaagcagagctaacggcactggatactgctactgttgaggcagaatggctgcgtgatctattaatggatctgcctgttgttgaaaaaccggtgccggctatccttatgaactgtgacaatcaaacgacatgtgaaaagacgattgaagtctgtcaggaaattaagaaactccggagttataacgttggattacatccaaacagcgagaaacctggcagatcccttcacgaagggactatcacgaaatgtgatagacaatgtatcgaaggagatgggtttgagacccataaagaggaagcaaacaagagattgcaaggggttcaaataactaccacagctccaattataagccaccttttgtttgctgatgatagcttgttactattcaaagctactagtgtttgtgcagatgcagtgagtagagttttaactaactattgtgcagcttccggacaactggtcaacttttctaagtcctgcattttcttcagcaagaagtgtgatatggccatccgtgaggacatcaaacgaaaggttggaatgactaatgaatctataacagatcgctatttgggtttgccaacggatgtgggtagagccaaggaaggaaaatttaaatacttgaaggacagagtgtggaaaagagtgcagggatggatggagaaaacactttcagttggaggtaaagaagtccttattaaatcaatagttcaagccatcccaacttattcaatgagttgtttccgtttacccatgggcctttgcaaccatataaattctttaatccggaaattttggtgggcaagtaaacaaggttcaaggaaaaccaattgggtagcatgggacaagatgactgtgcctaagtttcttggtggaatgggatttagggacataaatattttcaatctagtattgcttgccaagcaagggtggagaatcttgcagtatcctaattcactagcagcaagagttttgaaagctgtctatttttcaaatggtgacttcctgaatgctggtttgggaagtaggccatcacatacttggcgtgctattattgaaggtcgtgaaattcttaaactaggaattattcgaaggattggaagtggaaaagatacttttatctgggatgataattggattccaagagattggatgcttcgaccaatcagggcctaa

SEQ ID NO: 35184 - DNA, 399 bp, Oryza sativa
  Clone ID: PAT_MRT4530_39128C.1
cttcacatcacgccaccattttttcactttagtgttgcgcagtagtacaccaccatcaccaccaccaatgcatgcaaactcaaccagcagtctcgtcttaacccctagcagctaccgcctaaaggcctagagctagaagaagcattcagagctcaggaaagggaggagcaagctggactgctgctgctggtggtggtggtggtgtgtaggctgcagctgcatttcatcccgggagaagatttcgttgggtttttctctgttacttgactaatacttgtgaagctggatttgtgatccccggtgcggttggtgcgcttcttggcgctcaattcggtccaagattgtaggctcccggatcaaaagctgttattggagccaaatttgttgcgagatttgagg

SEQ ID NO: 35185 - DNA, 3633 bp, Oryza sativa
  Clone ID: PAT_MRT4530_39129C.1
atggctggttttgccgatgcactgaggccggataaattcaccggtgtgcattttaagagatggcagatcagggtcactctgtggctgacagctatgaaatgcttctgggtgagtactggcaaacctgaaggagttcttactgctgaacagcagaagcaattcgaggaagccactactctctttgtgggatgcattcttagcgttcttggcgatcgtctggtcgaggtgtatatgcatatgaccgacgctaaggagttgtgggatgcactgaatactaaattcggtgctactgatgctagcaatgatctgtatatcatggagcagtttcatgactacaaaatggctgacaaccgttctgtagtcgaacaggctcatgagatacaaaccatggctaaggaactcgaactccttaagtgtgtcttacccgacaaatttgtggccgggtgcattattgcaaaacttcctccatcttggaggagtttcggtactgcactcaaacacaagagacaggaatactccgttgaggggttgattgcgtctcttgatgttgaggagaaagctcgggaaaaagatgccgcgtctaagggcgatggtgggcagtccagtgccaatgttgtgcacaaggcccagaacaagagcaaggggaaatacaaagctcagcagaccaccaacttcaagaagcagaagaagaacaacaacaatcctaatcaggatgagaggacttgctttgtgtgtggccaagttggtcatctggctaggaagtgtccacaacgcaaggggatgaaggcacctgcagggcagacttctaagtctgctaatgtgaccattggcaacactggagatggaagcgggtatggtcgcacggggttccaccgtcctaatggggaatgggtcacatgcttctgttcatggtgttggcacggtagatctgaagtttacttcgggaaagatcgtgcagctgaagaacgtgcagcatgtcccttctatcgacaggaatcttgttatgagtgcggaggcctgttccgcttttccctttctgatttctgcaataagtctgtgaaccatatttgtggcagtgtggatgatgaggctaatgtttggcattcacgtttatgtcatattaattttggcttgatgtctcggctttccagcatgtgtttaattcctaagttttccattgtcaaaggttctaagtgccatagttgtgtgcaatcgaagcaacctcgcaagcctcacaaggctgccgaggagagaaacttggcaccactagaactcctacattcagatctttgtgaaatgaatggggtgttgacgaagggtggaaaacgatatttcatgacattgattgatgatgctactagattttgctatgtgtacttgttgaaaacgaaagacgaggctctagactattttaaaatttataaggcagaagttgaaaatcaacttgacagaaagataaaaaggcttaggtctgatcgtggtggagagtttttctcgaacgagtttgacttattctgtgaggaacatggcatcatacatgagaggacgcctccctattctcccgagtctaatgggattgctgaaaggaagaaccgcacactgactgacttggtgaatgccatgttggacaccgcgggactgcctaaggcatggtggggggaggcattgttgacctcaaatcatgtgttaaacagagttcctaacagaaataaggacaaaacaccatatgagatatggattggtagaaaaccatcactttcttatttgcgcacatgggggtgcttggcgaaagtcaatgtaccaataacgaagaagcgcaaacttggacctaagactgtggactgtgtttttctgggatatgctcatcatagcattgcctatagatttttaatagttaaatccgaggtaccggacatgcatgttggtacaattatggagtctcgtgatgctaccttctttgagagcttttttccaatgaaggatacacatagtggttcgaaccaaccctctgaaataattcccagttcaatcacaccaccagaacaaactgaacatacacatgaacttgtctctgaggaggatgtcagtgaagctcctcgaaggagtaagagacaaaggacggctaagtcttttggtgatgatttcactgtgtacctcgtggatgacactcctaagtcaatttcagaagcatatgcatctcctgatgcagactactggaaggaggctgtccgtagtgaaatggattccattatcgctaacgggacttgggaggtgacagagcgaccctatgggtgtaaacctgtggggtgcaagtgggtgttcaagaagaagcttaggcctgacgcctcacatggtcttctcgttcatcaaatggacgttaagacagcttttcttaatggagagctggatgaggagatctatatggatcaacctgatgggtttgtagttgaaggtcaagaaggcaaagtgtgcaaattgttgaagtctttgtatggtctgaaacaagctcctaagcaatggcatgagaaatttgacaaaacattgacatctgcaggctttgcagtcaatgaggcagataaatgtgtgtactatcgccatggtgggggtgagggagttattttgtgcttgtatgttgacgacatactgatatttgggacaaaccttgaggtgataaatgaggttaaatcattcttgtctcaaaattttgatatgaaagatttgggagtagctgatgttatcttaaacattaagctaattagaggtgagaatgggattactctcttgcagtcccattatgtggagaagatcttgaatcgctttggctacattgatagtaagccttctccaacaccttatgatcctagcttgttgcttcgcaagaacaagagaattgctaggaatcaactggaatactcccaaatcattggctcgttgatgtacctggctagtgcaactaggcctgatatctcctttgctgtgagcaagttgagccgatttacttctaatccgggagatgatcactggcgtgcgcttgagcgagtaatgcgctatctgaaaggtactgtggaattgggacttcactatactgggtatcctgcggtactggagggttatagtgattctaactggatctctgatgtggatgagatcaaagccactagtggatatgttttcacactgggtggtggtgctgtttcatggaggtcttgcaaacagacaattttgacgaggtcaaccatggaagcagaactaacggcactggatactgctactgttgaggcagaatggctgcgtgatctattaatggatctgcctgttgttgaaaaaccggtgccggctatccttatgaactgtgacaatcaaacgacatgtgaaaagacgattgaagtctgtcaggaaattaagaaactccggagttataacgttggattacatccaaacagcgagaaacctggcagatcccttcacgaagggactatcacgaaatgtgatagacaatgcatcgaaggagatgggtttgagacccatagcattcttgaaggaactcacctttgtgagcttgactgttggtcgcagtctatgaagattttgggtgaatcttctaggaagcttactaaagacctaggagtatga

SEQ ID NO: 35186 - DNA, 249 bp, Oryza sativa
  Clone ID: PAT_MRT4530_3912C.1
atgggtccagcggcagcaatagaaggggatttagggttacagatcgatccagacgtcaccgccagctcctttttctctcacactcgaggagatacgccgccgcggtgctattcgcctcctcgctgctgcttctcaccgtcgcaatctcctctgctccctggacgacatgtctcctcctctgctaaacactcctgctcgtggtcttccctagaagcgagctgtgccgccgccgccgaccctaacgcctag

SEQ ID NO: 35187 - DNA, 165 bp, Oryza sativa
  Clone ID: PAT_MRT4530_39130C.1
atgccgcccaagtggagggtggcaaggtttacgtattgtgcactgaggtctcttgccgccctctacaagggctgcaagggggcttccagcatggagaaggtcaacatgtcacgtcacgccacgcaaatcgccaggtcgcccactccacgaatgggccgaggatga

SEQ ID NO: 35188 - DNA, 4938 bp, Oryza sativa
  Clone ID: PAT_MRT4530_39131C.1
atggcagcgatctgcggggagacgatctccgtcgacgagttgtggcgggagatcttgctcagggcgccaaccaaagacgtcgcccgttcatgctgcgtctcgacgcagtggcgcggcatcgtcagggacccctccttccggaagctccaccatgacaggcatgccgtgccgtccaaggacgacgtcccggacgctctgctcgtcatcacggtcaacgccgacggccaaagcgtctccaccgtcgtcccagctatggtctctccggtgtcgacgagccagcgggcgcccatgtaccgggttattaagaacggcatcagctatagcctcgccaatgtctgcaatggcttcctctgcttcgcgtcatggagcagggccaaggtcgtcgtgtgcaaccccatcaccggcgagaagctggcgatccccagggctcctcccatcgggccagattataaatcgtcgcgtgccaggatcgacgtgtacacgctgcccacaagcggtggcaagatatgcgtgatgaccgctactggcaccccgagctggcacccacccgaaattcccacactcggtccggtgttggtggtcgacgtcgcgagcgagaagcatcgcatgtatagcccaccggacaacgggtgcccagcggctgacgaaacgtcgttcactgcctttgagctgcacggacggttgtgcctggccatcaggatatccatgaccaacacagtccagttctggactttgtcggttgaagaagacgacgacgacgacgacgacctgccgtggcagcttctctacacgatcaaaatcaacatgaaagatggctataataatggattccaggaactagagcctatgaatgattggttcaatggcggcaataatggatttatccaggtaccagagcccatggatgcttggctcgacggcgagacccacacccttgctacagagagggcagcacattgtactttagactactccatcccgctcgccggcgtgcaccagcgatcgggagagcaggtctccggaacctctgcctttgacgtcctgcaccgggagaaggcggcaataagatctaatgatgcgttcatgctagttttcatctgtgatgtcatgatttatttatggaataaattaaatccttatatgcccataatctcaacaatccaaaaaccttattataggcactgtgattttactatggctggttttgccgatgcactgaggccggataaattcaccggtgtgcattttaagagatggcagatcagggtcactctgtggctgacagctatgaaatgcttctgggtgagtactggcaaacctgaaggagttcttactgctgaacagcagaagcaattcgaggaagccactactctctttgtgggatgcattcttagcgttcttggcgatcgtctggtcgaggtgtatatgcatatgaccgacgctaaggagttgtgggatgcactgaatactaaattcggtgctactgatgctagcaatgatctgtatatcatggagcagtttcatgactacaaaatggctgacaaccgttctgtagtcgaacaggctcatgagatacaaaccatggctaaggaactcgaactccttaagtgtgtcttacccgacaaatttgtggccgggtgcattattgcaaaactacctccatcttggaggagtttcggtactgcactcaaacacaagagacaggaatactccgttgaggggttgattgcgtctcttgatgttgaggagaaagctcgggaaaaagatgccgcgtctaagggcgatggtgggcagtccagtgccaatgttgtgcacaaggcccagaacaagagcaaggggaaatacaaagctcagcagaccaccaacttcaagaagcagaagaagaacaacaacaatcctaatcaggatgagaggacttgctttgtgtgtggccaagttggtcatctggctaggaagtgtccacagcgcaaggggatgaaggcacctgcagggcagacttctaagtctgctaatgtgaccattggcaacactggagatggaagcgggtatggtaatttacctactgttttttcagttaatcaatctactaattggtgggttgatactggggccaatgtacatgtttgtgctgacatctcattgttttcttcttatcaggtcgcacggggttccaccgtcctaatggggaatgggtcacatgcttctgttcatggtgttggcacggtagatctgaagtttacttcgggaaagatcgtgcagctgaagaacgtgcagcatgtcccttctatcgacaggaatcttgttagtggctcccgtctgactagagacggatttaagttggtttttgagtctaataaagtagtcgtgtctaaacatggatattttattggtaaaggttatgagtgcggaggcctgttccgcttttccctttctgatttctgcaataagtctgtgaaccatatttgtggcagtgtggatgatgaggctaatgtttggcattcacgtttatgtcatattaattttggcttgatgtctcggctttccagcatgtgtttaattcctaagttttccattgtcaaaggttctaagtgccatagttgtgtgcaatcgaagcaacctcgcaagcctcacaaggctgccgaggagagaaacttggcaccactagaactcctacattcagatctttgtgaaatgaatggggtgttgacgaagggtggaaaacgatatttcatgacattgattgatgatgctactagattttgctatgtgtacttgttgaaaacgaaagacgaggctctagactattttaaaatttataaggcagaagttgaaaatcaacttgacagaaagataaaaaggcttaggtctgatcgtggtggagagtttttctcgaacgagtttgacttattctgtgaggaacatggcatcatacatgagaggacgcctccctattctcccgagtctaatgggattgctgaaaggaagaaccgcacactgactgacttggtgaatgccatgttggacaccgcgggactgcctaaggcatgcattgcctatagatttttaatagttaaatccgaggtaccggacatgcatgttggtacaattatggagtctcgtgatgctaccttctttgagagctttttcccaatgaaggatacacatagtggtttgaaccaaccctctgaaataattcccagttcaatcacaccaccagaacaaactgaacatacacatgaacttgtctctgaggaggatgtcagtgaagctcctcgaaggagtaagagacaaaggacggctaagtcttttggtgatgatttcactgtgtacctcgtggatgacactcctaagtcaatttcagaagcatatgcatctcctgatgcagactactggaaggaggctgtccgtagtgaaatggattccattatcgctaacgggacttgggaggtgacagagcgaccctatgggtgtaaacctgtggggtgcaagtgggtgttcaagaagaagcttaggcctgacggtactattgaaaagtacaaggctcggcttgttgctaagggctatactcagaaagaaggcgaagatttctttgacacttactcacctgttgctagattgaccacaattcgtgtgctactttccctagcagcctcacatggtcttctcattcatcaaatggacgttaagacagcttttcttaatggagagctggatgaggagatctatatggatcaacctgatgggtttgtacttgaaggtcaagaaggcaaagtgtgcaaattgttgaagtctttgtatggtctgaaacaagctcctaagcaatggcatgagaaatttgacaaaacattgacatctgcaggctttgcagtcaatgaggcagataaatgtgtgtactatcgccatggtgggggtgagggagttattttgtgcttgtatgttgacgacatactgatatttgggacaaaccttgaggtgataaatgaggttaaatcattcttgtttcaaaattttgatatgaaagatttgggagtagctgatgttatcttaaacattaagctaattagaggtgagaatgggattacactcttgcagtcccattatgtggagaagatcttgaatcgctttggctacattgatagtaagccttctccaacaccttatgatcctagcttgttgcttcgcaagaacaagagaattgctaggaatcaactggaatactcccaaatcattggctcgttgatgtacctggctagtgcaactaggcctgatatctcctttgctgtgagcaagttgagccgatttacctctaatccgggagatgatcactggcgtgcgcttgagcgagtaatgcgctatctgaaaggtactgtagaattggggcttcactatactaggtatcctgcggtactggagggttatagtgattctaactggatctctgatgtggatgagatcaaagccactagtggatatgttttcacactgggtggtggtgctgtttcatggaggtcttgcaaacagacaattttgacgaggtcaaccatggaagcagagctaacggcactggatactgctactgttgaggcagaatggttgcgtgatctattaatggatctgcctgttgttgaaaaaccggtgccggctatccttatgaactgtgacaatcaaacgacatgtgaaaagacgattgaagtctgtcaggaaattaagaaactccggagttataacgttggattacatccaaacagcgagaaacctggcagatcccttcacgaagggactatcacgaaatgtgatacacaatgcatcgaaggagatgggtttgagacccatagcattcttgaaggaactcacctttgtgagcttgactgttggtcgcagtccatgaagattttgggtgaatcttctaggaagcttactaaagacctaggagtatga

SEQ ID NO: 35189 - DNA, 229 bp, Oryza sativa
  unsure (1)..(229): unsure at all n locations
  Clone ID: PAT_MRT4530_39132C.1
aancaccaagcaaatagcagattgattaaaattgttatctgggatagatcgttccgttctatccaccgnncgctgggtttacgtgagtttgcctctgtacaattttcacttcaccttcggggtatatacatgcctatttttttacacattttcatagtataaaaaattaatctattgttcgatgatgattcataaattgtcctacttttcctgctatcattttttttca

SEQ ID NO: 35190 - DNA, 694 bp, Oryza sativa
  Clone ID: PAT_MRT4530_39133C.1
gcgttgaatggtccgcccgcaaaattggctcctcacccttgcgcatatgcagtctccttttgcagttttgttttgctgcaggaaaattcggatttgttttgttgttggaaacatttcgaaaaatccggtgcgtgaaaacggcgtggagtccggataagttacgcgcgacttatctggctcggtgtggagtccggataagttacgcgcgacttatccggctcggttacgcagagtggagatcatgcgggcgccctgatcaagcgacctatctctatttaaaccgtgccgccgccttcacgcaacacacgcgaaatcaatctagggtttgcctcctcctctgtgttgcgccgtcgctcgtagactactccatcccgctcgccagcgtgcaccagcgatcgggagagcaggtctccggaacctctgccttcgacatcctgcaccgagagaaggcggcaataaggtttttgggaagcgcttcgcgcgactgctccctgttcgtccgcgacggctcgccttcctctccgctcgcatgctgcgcgcattcgtcgacgctcgcaaccgcgagtagttccgtggctgccgccgtcatctccggcgccggcgagctcggatccttcctccaatggctccagacgaacttctccttcaactcaaatcccctccgaaccctaaccccccgtctcctgcactccat

SEQ ID NO: 35191 - DNA, 2745 bp, Oryza sativa
  Clone ID: PAT_MRT4530_39134C.1
atggcagatcagggtcactctgtggctggcagcgatgaaatgcttctgggtgtatacatgaccgacgctaaggagttatgggatgcactgaatactaaattcggtgctactgatgctagcaatgatctgtacatcatggagcagtttcatgactacaggatggctgacaaccgttctgtagtcgaacaagctcatgagatacaaaccatggctaaggaactcgaactccttaagtgtgtcgtacccgacaaatttgtggccgggtgcattattgcaaaactacctccatcttggagaagtttcggtactgcactcaaacacaagagacaggaatactctgttgaggggttgatagcgtctcttgatgttgagaagaaagctcgggaaaaagatgctgcgtctaagggcgatggtgggcaatccagtgccaatgttgtgcacaaggcccataacaagagcaaagggaaatacaaagctcaacagaccaccaacttcaagaagcagaagaagaagaagaacaatcctaatcaggatgagaggacttgctttgtgtgtggccaacctggtcatctggccaggaagtgtccacaacgcaaggggatgaaggcacctgcagggcagacttctaagtctgctaatgtgaccattggcaacactagagatggaagcgggtatgtcgcacggggttccaccgtcctaatggggaatgggtcacatgcttctgttcatggtgttggcacggtagatctgaagtttacttcgggaaagatcgtgcagctgaagaacgtgcagcatgtccctactatagacatgaatcttgttagtggctcccgtctgactagagacggatttaagttggtttttgagtctaataaagtagtcgtgtcaaaacatggatattttattggtaaaggttatgagtgcggaggcctgttctgtttttccctttctgatttctgcaataagtctgtgaaccatatttgtggcagtgtggataggggtgggaaaaataagaccgaaccgaagaaccgaaccgaaaagaccgagaccgagaccgaaaagaccgagatcgagaccgaaaagaccgagaccgagaaattcgggtctgatcatggtggagagcttttctcaaacaagtttgacttattttgtgaggaacatggcatcatacatgagaggacgcctccctattctcccgagtctaatgggattgctgaaaggaagaaccgcacactgactgacttggtgaatgccatgttggacaccgcgggactacctaaggcatggtgggggaaggcattgttgacctcgaatcatgtgttaaacagagttcctaatagaaataaggacaaaacaccatatgagatatggattgggagaaaaccatcactttcttatttgcgcacatgggggtgcttagcgaaagtcaatgtaccaataacgaagaagcgcaaacttggacctaagactgtggactgtgtctttctgggatatgctcatcacagcattgcctatagatttttaatagttaaatctgaggtacctgacatgcatgttggtacaattatggagtctcgtgatgctaccttctttgagagctttttcccaatgaaggatacacatagtagttcgagtcaaccctctgaaataattcccaattcaatcactgaacatacacatgaacatgtcactgaggaggatgtcagtgaagctcctcgaaggagtaagagacaaaggacggctaagtcctttggcgatgatttcactgtgtacctcgtggatgatactcctaagtcaatttcagaagcatatgcatctcctgatgcagactactggaaggaggctgtccgtagtgaaatggattccattatcgctaacgggacttgggaggtgacagagcgaccctatgggtgtaaacctgtggggtgcaagtgggtgctcaagaagaagcttaggcctgacggtactattgaaaagtacaaggctcgacttgttgctaagggctatactcagaaagaaggcgaagatttctttgacacttactcacctgttgctagattgaccacaattcgtgtgctactttccctagaagactcacatggtcttctcgttcatcaaatggacgttaagacagcttttcttaatggagagctggatgaggagatctatatggatcaacctgatgggtttatagttgaagtcaatgaggcagataaatgtgtgtactatcgccatggtgggggtgagggagttattctgtgcttgtatgtggacgacatattgatatttgggacaaatattgaagtgataaatgagtcccattatgtggagaagatcttgaatcactttggctacattgatagtaagccttctccaacaccttatgatcctagcttgttgcttcgcaagaacaagagaattgctaggaatcaactggaatactcccaaatcattggctcacttatgtacctggctagtgcaactaggcctgatatctcctttgctgtgagcaagttgagccggtttacctctaatccgggagatgatcactggtgtgcgcttgagcgagtaatgcgttatctgaaaggtactatggaattggggcttcactatactgggtatcctgcagtactagagggatatagtgattctaactggatctttgatgtggatgagattaaagccactagtggatatgtcttcacactaggtggtggtgctgtttcgtggaggtcttgcaaatag

SEQ ID NO: 35192 - DNA, 237 bp, Oryza sativa
  Clone ID: PAT_MRT4530_39135C.1
atggagtggttgttggttggttggttgcgactgcgtgaagctggaagcgacgaagcgagcgaggcaggctggcaccggcgagatggggagacgacacaagcaaaggatggccttgccttgccggcggtcgcatgctttgcttgctacgcgaggcttgagaacaacacggttattgggcttcgtttcgttggacgccgccgcaaggaagggagacggggaaattgtggatgggattag

SEQ ID NO: 35193 - DNA, 3438 bp, Oryza sativa
  Clone ID: PAT_MRT4530_39136C.1
tcagtagaccccgatgctttgctgtggcgtcgcccctggaacgtagattacatttgaaggaggtacctggacacgacccttggtcacagaagcagtcgccaatactgttgcagcacgattcttcaaaaagagcaggaaatctccaaacgtcaggtacaaaaccatgatcaaagatcgtatcttccaggaataaaccctacgcttctctttccccaccctcacgccgccgcccaccacgccgtcgtcgtcgtcctcctgccttccctcaccatccacagccccctcggatctcaccgccccttccgcctccccctccgctcctctcgccactcctccgttctccccccttcgacaatctcgccggcgtcccaactccggcgggaacggcggcggcagcaaggtggtggaaagatcggttgctcggcaggaactactcgcggttgcgagcgtcgacgaaaacgcgaagcacgcgagcggagaggaaggcgagccgtcgcggacaaacagggagcagtcgcgcgaagcgcttcccaaaaaccttattgccgccttctcccggtgtaggacgtcgaaggtagaggtttcggagacctgctctcccgatcgccggtgcacgccggtgagcgggatggagtagtccccgtccccagcgggcaacgggcagtcccctctcatgcctaggtgaatccggaagcgacagaggccgtcgcagggcccgccccgctccatcacgcccacccttgcctggatgcgtcggaatataggatcaacatgttcaagtgacaagcatgacttgccttgctctgctgctggaggaacctcggcaactatttcgaagtacaccggagcgtcggaggaaccggaatcgtggaccgggaccacgcgggtggtccaccgccggtccacggaaccgacggcccagatcgccctcggggtcgatcggacgggcggcggcgacccggctcggctcaaggctggccaagcggccacggcgacggcgacggcgcgcgcacgcgcgttgccgatgacggcaaccgacggcggcgacggcggcgcaaaggcggcgccgaagggcggtggtgcgagggtggccggcgcggaggaagacgacggtgaacggcgacggcaagtcacgggaggacgacggccactggcggacgggattcggggtgcccggagcgcaaggggatgcgaattccggcgacgaaactcgacggggaaggggcggccggggtggagcttagccttgcgaacccgacggcgaagacggcgcggtgcggcggcgaccctagcggcggctagcggcggccggagtagcaaaaacggcggcggcgggtggttgcacggcgcgggagtgatggggagctcgggagaggtcggcgaaatggggaaaaagcgagagggagcgacggggaaggtggtcgacgtggcccggaggaggcggaggcgtggacgcggcggcggttgcgggtgcggcggttgcgggtgcggcgtcggctggaggtgggggaaggacccgacaggtgggccccacctgtcggcgaccccgggagaggagggcggcggggcggcctggttgggccctcggccactatgtgtatccttcattgggaaaaagctctcaaagaaggtagcatcatgagactccataattgtaccaacatgcatgtcaggtacctcggatttaactattaaaaatctataggcaatgctgtgatgagcatatcccagaaagacacagtccacagtcttaggtccaagtttgcgcttcttcgttattggtacattgactttcgccaagcacccccatgtgcgcaaataagaaagtgatggttttctcccaatccatatctcatatggtgttttgtccttatttctgttaggaactctgtttaacacatgattcgaagtcaacaatgcctccccccaccatgccttaggtagtcccgccgtgtccaacatggcattcaccaagtcagtcaatgtgcggttcttcctttcagcaatcccattagactcgggagaatagggaggcgtcctctcatgtatgatgccatgttcctcatagaataagtcaaactcatttgagaaaaactctccaccacgatcagacttaagccattttatctttctgtcaagttgattttcaacttctgccttataaattttaaaatagtctagagcctcgtctttcgttttcaacaagtacacatagcaaaatctagtagcatcatcaatcaacgtcatgaaatatcgttttccacccttcgtcaacaccccattcatttcacaaagatctgaatgtaggagttctagtggtgccaagtttctctcctcggcagccttgtgaggcatgcgaggttgcttcgattgcacacaactatggcacttagaacctttgaaaatggaaaacttaggaattaaacacatgctggaaagccgagacatcaagccaaaattaatatgacataaacgtgagtgccaaacattagcctcatcatccacactgccacaaatatggttcacagacttattgcagaaatcagaaagggaaaagcggaacaggcctccgcactcataaccatacccgcttccatctccagtattgccaatggtcacattagcagacttagaagtctgccctgcaggtgccttcatccccttgcgctgtggatacttcctagccagatgaccaggttgcccacacacaaagcaagtcctctcatcctggttaggattgatgttgttcttcttctgcttcttgaagttggtggtctgttgagctttgtatttccccttgctcttgttctgggccttgtgcacaacattggcactggactgcccaccatcgccctgagacgcggcgtctttttcccgagctttctcctcaacatcaagagacgctatcaacccctcaacggagtattccggtctcttgtgtttgagtgcagtaccgaaacttctccatgatggaggtagtttcgcaataatgcacccggccacaaatttatcgggtaagacacacttaaggagttcgagttcgttagccatggtttgtatctcatgagcctgttcgactacagaacggttgtcagccatcttgtagtcatgaaactgctccatgatatacagatcattgctagcatcagtagcaccgaatttagtattcagtgcatcccacaactccttagcgtcggtcatatgcatatacacctcgaccagacgatcgccaagaacgctaagaatgcatcccacaaagagagtagtggcttcctcgaattgcttctgctgatcagcagtaagaattccttcaggtttgccattactcacccagaagcatttcatagccgtcagccacagagtgaccctgatctgccatctcttaaagtgcacaccggtgaatttatccaacctcagtgcatcggcaaaaccagccat

SEQ ID NO: 35194 - DNA, 726 bp, Oryza sativa
  Clone ID: PAT_MRT4530_39137C.1
ttgcctggcctggcaggcggcgcgcgtgcatgacgtacgtgtcgaatgttccgcaaaattggctcctcacccttgcgcagatgcagccttcttttgcagttttgttttgctacgggaaattcggatttgttttgttttggaaacattccgaaaaatccggtgcgtgaaaacggcgtggaatccggataagttacgcgcgacttatccggttcggttacgcggaatggagatcgtccgggcgccctgatcaagcgacctatctctatataaaccgagccgccgcattcacgcaaaatacacgaaatcaatctagggtttgcctcctactctgtgttgcgccgtcgcttgtggactactccatcccgcttgccagcgtgcaccggcgatcgggagagcaggtctccggaacctctgccttcgacgtcctgcaccgggagaaggcagcaataaggtttttgggaagcgcttcgcgcgactgctcccttttcgtccgcaacggctcgccttcctctccgctcgcgtcctgcgcgccttcgtcgacgctcgctaccgcgagtagttcctgccgagcaaccggtctttccgccatctcggtacgtccacaaatggttgataatcttggaggtactccattgaagacgcaatcgttcatatagaccaagctccttgcataatcaacctatttatacccttcctggtacttgcacaaaccataccattgatttg

SEQ ID NO: 35195 - DNA, 489 bp, Oryza sativa
  Clone ID: PAT_MRT4530_39138C.1
gaagacgagccgttacggacgaacagagagcagtcgcgtgaagcgcttccaaaaaccttatcgccgccttctcccggtgcaggacgtcgaaggcagaggttccagagacctgctctcctgatcgccggtgcacgccggcgagcgggatggagtagtctacgagcgacgacgcagtacagaggcgcccgcatgatctccactccacgtaacctaaatggataagtcgcgtgtaacttatccggactccatgtcgttttcacgcaccggatttttcggaacgtttccaaaacaaaacaaatccgaatttcccgcagcaaaacaaaactaaaaaaggaggctgcatctgcgcaaggtgaggaatcaatttcagcggaccattcgacgcgtacatcgtgcacaccggatttttggaacatttccaaaacaaaacaaatccgaatttcccacagcaaaacaaaactaaaaaatgaggctgcatctgcgaaggtg

SEQ ID NO: 35196 - DNA, 1272 bp, Oryza sativa
  Clone ID: PAT_MRT4530_39139C.1
ccgggctgaggaatcggcacgagggttgcagcaaaacaccaactgtggtccagatgtttgggaaggcccatggagtctatgatgactccgaagagaactgtcaagaaagattcactggttggtcaagctgcaaaaacaatgccaaagactgtcaatatgacttctagtaatattccgggtcatgcagttgttaataagggaactgattcaggcaaatccagtgtggtgaatcgtagagccaagccagaaactattcagcaaaggctaaaagcagtaactggcaatactgttgacatcgttggaagaagcaaacttgtggtaaaagaagtccctggtataatgggtgttagaagaccttcctctccagcactacaacgcccctccaccagggaacgacgacctgtcaccagagatagttcacggaaggctcctgaagttgccaccatgtgccggccttctactgctgaaaggcgccctgccacccgggagttggcaccaaagcaagccaacacagttgttccgtgtcgaccatctacaccaaacaggcgccctatgaccagagagttggcgccagtgcattcaagcattgctaccccacgtcgaccttctactgctgaaaggcgcccaatcaccagagggatggcaccaatgcatcctagcattgctaccccagttcgaccttccactgctgagaggcgccctacctcaaaacagatggctcaaaagcatgttggtatggccaccccatctcggccatccactgctgaaaggcgacctatcaccagagaggctgcacggaaaaacgctgatgttgccatcttgcatcgaccttctactgccgagagacgccctatcaccagagagactccacagaagcatgctaacgttgtcgcactgcatcggccttctactgcggagagacgacctgttgttagagagattgctccaaagcatgctgatgtcactctcactcctgcacgccggccatctacctctgaaagacgccctgtcaccagagagactgcactgaggcacagtaatttcaccggttcatgttggcctttgactcctcaaaggcacatcagcaggggaagtgcacaaatacatgctgacgttagcaccaccccgcgtcatccatctactggagaaaggcgccctatcaccaaagagagtaacataaaattggatgaaaaaacacctatcaagttgagaggcatgctggctaacccaaagggtgctatggctacagtagtcactccccagaaggcaatt

SEQ ID NO: 35197 - DNA, 629 bp, Oryza sativa
  unsure (1)..(629): unsure at all n locations
  Clone ID: PAT_MRT4530_3913C.1
aaaaattaggagggaacctagaattagagtgcttatgggccaaggacacctgatgtgctgatttgactgaacctgctgataagaaacgcggacaatggaatgaaaaaagggaactggttccgggtgagtatgctgaccaatgatgtgaccgaaaaccttgttaaaatacttctacgagagggtgtttgattgaaagtgttcggaaacatcaaggaaagtgaacacgatatgttgctgtgggttttttaactttgcgacatcccaaaggagaaaagactagaaaagggaattatgataagaacttagaaccctgttgtgtaaaagccgtatcacgccgacctggctttacgaaattttaatncccacaactaatccggaaattccctaaagttttgggccggaatgggaatttgctgatttctgtgtctactgtctcgagggtataattgacagattccgagaaagctcgacctaaaccacgaattgggggagaagttcttatttatatatggtaatccccccctatacgttaatcccccacctatattatatacccaattctatctgaacttcctatttttcaaaccnaaaatacaactttttttatttgaaaaaaaaaaaaaaaaaaa

SEQ ID NO: 35198 - DNA, 427 bp, Oryza sativa
  Clone ID: PAT_MRT4530_39140C.1
ttgggtgggttttttttttagcagtgtatttttttttataatatttttttttttttgcaaaccaataaaattaaaaagcaattatttggaaactcctgtttgtttgggaaaggtgagtttaactgacgttcgagcctaaactttgacctttccaaaaacagtttttcaaaccccaaacgggcaaacggtttgcctattcggactaaccctgagttggaaacaatccgttaatgggaatgccgccgtcgaccgaaaacgtttggccggggaagtaggaagcgccgggcatgcacaggaacccaaccagggaagacaccttttttgggtttccaacgcgcttaaaggctgttcgacgcacaaagctttaaaaaaaatccttccttggcaaattattttccaaaagggaaggcttaaagtaccaaggggc

SEQ ID NO: 35199 - DNA, 447 bp, Oryza sativa
  Clone ID: PAT_MRT4530_39141C.1
tttcttcaccttcctcgcgaacactcgcgaagggttgctctacataatcccggggggggttcacccgccgcccgcgccgcataaatggcggatccgctcgtcttcctcctcatacagaagaagaagcaacgcgctcgccaacgacgacgacgacgacgaactagggaaaagcggaccgcatcgcgcgccggtagctgacctcactcggccccgtggagatccaaaagggtttttggggggggttgttcgtctcggattatcttctggccgcaccgcacatcgggggcagctctgctctgtatcagccctagaacctgttcggcaggtctaggtatttatcaaactagtatatactaaattaggtagtgatgtatcctgcaaaccagtacatggatccatactattcacattacagaaatcacgctccttacgcacattatcctcctc

SEQ ID NO: 35200 - DNA, 314 bp, Oryza sativa
  Clone ID: PAT_MRT4530_39142C.1
atattgggggggcttccaagctggaagttggaacaccaaacaaagtaaaggttgtcacagaaacagcagggagcacctaacccagaaaatttgcctagataggcctgctggcatcgggccaaaggccacactgatacatagttttctcggttgtttattacaggatcatataatactacaaacacggccgcttcttaatgtttttttaacaaaatctatgtttttaaatttcttttaaattcaatttttttttaagtggagttattttgttctttcatccctaacctctttaaccttattgttttatttatttt

SEQ ID NO: 35201 - DNA, 417 bp, Oryza sativa
  Clone ID: PAT_MRT4530_39143C.1
atggggaaggctcccaaggcggcgacgcacctcgacccccacggcatggaggccacctgcggcgccatggagaagaaagagagtaggagatgcttgagatctagcgcgtgcacgcggagtcggcggcgccgcctcgtcatcatcaagcccgccaccgagagccgcgtggggccccgccatgcgtgccgaggagccggcggcgccgcctcatcgtcgtcgtcgtcgcgcgtgcccgctgctgagccacgggccccgccgccatccgcacccgtagcgcgtgcaagcggagccggtggtgccgtctcgtcgtcgtcgtcgcgtgcgcccgccgttgagccgcacgggccccgctgccgtccgcgcccgccgcgcgtgcacgcgacgtgtctccgcaagcgcacggatataccgatgtag

SEQ ID NO: 35202 - DNA, 994 bp, Oryza sativa
  Clone ID: PAT_MRT4530_39144C.1
tttgctcgtatataacaccccctctcctgtacacagcggctcgattccattccatttccactccccaattcacactcagatttcttcttgcggcggcggcggcggccaagaacgcgaggagaggggcggactcggtggcgacgagggatcgatggcggtgacggggacgtcggtggctgccgcggcgacgatgctggcggcggcggcggcgatcttcatcacgttcgtcgtgtgcttctacctcttcctctgcgccaagaggtaccgcggcgccgcgcccacgatcggcggcgacagcggtgggggagggaggggacgcgcgcggttcgtgttcgggggccccggggacggcgggtgcggaggcgggagggggcttgacgaggcggccatcgcggcgctgccgacgaaggtggtggcggcggcggccgaggggggcgacggcggcgaccccgcggcggactgcgccgtctgcatcacggagctcgccgccggggagtccgcccgcgtgctgccgcggtgcggccacgggttccacgtcgagtgcgtcgacatgtggctccggtcaaactccacctgcccgctctgccgctgcgccgtcatcgacgaggcgctgccgccgccgcccgccgtgcgcccgccggaggctgacgcggagtcgcccaacttccccaccaacgtgctcttcttcggctcccaggacgccgtcaggacaggcggcgccgccgcggcaacgccgccgccgccgcctccgtcgtcccatcatcagcagcaaccggccttcccgccgcagccgtcggcgggacccatcgccggagtcgccgccgtggtggaagcggcgaggatagcggccctgcggcggctgctgggctgcggcggcgcgactcccccgcccccgccggcgccggcgcagggcgaccgcgacgtggagatgggcctccccggcggcgagagcagcgcgtcgcggccggcgacgaagccgcagccaggttcttga

SEQ ID NO: 35203 - DNA, 198 bp, Oryza sativa
  Clone ID: PAT_MRT4530_39145C.1
ccctcctatactactttgtttctatagtgtttattagttatcaattatactatcgatattatttatgggagggtaaattgtagtattggagcgtgcaaactatttgactaacttttcaccatgttagaaatgttaatttgtatgactatatagtatatgagcttaataaggattattaatactgagtttttattattt

SEQ ID NO: 35204 - DNA, 1151 bp, Oryza sativa
  Clone ID: PAT_MRT4530_39146C.1
ccgcaattaaacgccatctcgatcgaaagctagactaaccaagtatatatacgatcgatggcgttccggcgccgttcatgcatcccggcggctctggccgtcttcttcctgctgctcgccggccagtcaaccgccggcgaagaccagaccgccgtaatctggggccgccacggcgacgagggcaccctccgtgaggcctgcgacaccggccactacaacaccgtcatcatctccttcctcagcgtcttcggccacggccgctactccctcgacctctccggccacgacctccgccgcgtcggcaacgacatcaagcactgccagcgcaagggcatcgtcgtgctcctctccatcggcggccagggcggcgactattccctcccctcctcccgctccgccgccgacgtcgccgacaacctctggaacgcgttcctcgccggccgccgcaagggcgtgctccggccattcggcaacgcggcggtcgacggcatcgacttcttcatcgaccggggctccggcgaccactacgacgagctggccaggaagctctacagctacagaaacaacaaggggaagggggtgatgctgacggcgacgccgcggtgcaggttcccggaccggcggctggagaaggcgctggcgacgggggtgttcgcgcgcatccacgtgaggatgttcggcgacgacgtgaactgcacggcggcgccgagggagtcgtgggagaagtgggcggcggcgtacccggcgagccaggtgtacctcgggctggtggcctcgtcggagcaggacccgggatacctgtcgcccaagccactctactacacgctggtgatgtacatcagagacaggctcaactacggtggcaagatgatctgggacaggtactacgacaagaagaccgactactccattggaaaacttatttaaaacctatatatatactcctttttccattgggagcatggagatatatatatatatatatatatataccaagtattgaatagggcttaatttctagctatatggaataatgtaatcccatgtcgcaattaaataagggtgattatctaaattgttgttgttttttgtaatcctccaaaataatatcaataaagttcactgcatgtgaaagtaaaatctttagtcat

SEQ ID NO: 35205 - DNA, 303 bp, Oryza sativa
  Clone ID: PAT_MRT4530_39147C.1
atgtgggccagtcctggagggggtggcccggcgctcagtggaccgcggtacgaggaattcgggggagttttggtggactggcccacgctcgtgccctgtgccgctagagaagggagagggagaagaactcgtcggccatgggagggtgaccaggcgccgtgcttgtggagctcttgggttgtgccggcgacggcgatagctacggacaaagaggggcgcgagcttgacggggtggcggtgtccactacccatccgccgcaacagctcggcggcggccgccttgagccctcggcctatctatag

SEQ ID NO: 35206 - DNA, 717 bp, Oryza sativa
  unsure (1)..(717): unsure at all n locations
  Clone ID: PAT_MRT4530_39148C.1
cgcaacacgcagcatcacaccatcacgncgcaacacatcgcagcgcatacccgccaccagctcaacacacaatccgcagctcccatccgcgctccactcgcgcgcatcggcacctcctctgcttctcaagctcccacaccgcaccagcgcacatccactccctctgcctcgcacacgcacacagcgccccttcccacctcgcatgcatgcgcgtgcataacgaccatccgaccacaccaatcatggtcggcctcccaacctcggcaactacacagctgactctgaaccacattgtctgctccaacagcaccacgcgtctgcaacaataatctgaaattcctcacagcgcaagccctctggccccacacaaatggaacctggaaaggggaataccaccccacgccaggtggaccttgcaagcaatattctgcgatgacggcagcttatcatcctgtccacagctactcaaaagaaagaacacgtcagaacgaaactgcaccacaaacgaagcaagaaccaaaaagaaaaagaacccaaaaatttcacagaaaaaaacgggggaaccaaaaaaagttttcgggaaataagttaaagaaacctgaaaaaaggggacaaagccctggacaaccaagggaacggtaagaaagacaagcctgccgacagaaagataatagacaaggcgatctgagagactacccgagacgctaaaatggacga

SEQ ID NO: 35207 - DNA, 2175 bp, Oryza sativa
  Clone ID: PAT_MRT4530_39149C.1
atggcgtcgtcgtcgtcggcgctggtggtggtggtggcggttcttgcgttggcggaggcggcggtggcgttctcggggtagaacacaaccgcccgagcttctgatgcttcctcctagtttctaacgcatcgatcacttccgacacgacatggcgtcgtcgtcgtcggcgctggtggtggtggtggcggttcttgcgttggcggaggcggcggtggcgttctcggggtacaacacgagcgccggggcggtggccgggaagctgaacgtgcacctggtgccgcactcccacgacgacgtcgggtggctcaagaccatcgaccagtacttcgtcggcaccaacaactccatccagtgcgcgtgcgtgatgaacacgctcgactccgtggtggacgcgctcatcctggaccccgcgcgcaagttcgtcttcgcagagcaggctttcttccaaagatggtgggcagagaaaagcccaaaaatccaggccatagtccacaagctagttgattctggtcagctagagttcataaatggtgggtggtgtatgcatgatgaagccgccgtccattatattgacatgattgatcagaccacacttggtcatcgggtaatccagaaacagtttaacaagatcccaagagctggctggcaaattgatccctagaggttatatggcgcggctcaagaacatttggttcatcttctcagatcttcacaaatgcatttcctgtccattatagccctccagatggcttcggcttcgaaattttcgatgattttgtacctgtacaggatgacatgttgctgtttgactacaatcttaaagaacgtgtgaatgattttgttgctgcagccttaaaacaggcaaatgttacgcgcacaaaccacataatgtggactatgggggacgattttaattaccagtatgctgagtcttggttccggaacatggacaggcttatcaattatgtgaacaaggatggccgtgtgcatgcactgtactctactccatctatttacacagatgcaaaacatgcgtcgaatgaatcatggccactcaaatacgatgattatttcccgtatgctgatgcaaaaaatgcttactggactggatattttacaagccgtccaactttcaagcgatatattcgaatgatcagtggatattacctggctgcgcgtcaattggaatttttggtgggtagaagttccttaggattgtttacttctagcttggaagatccactggggattgcccaacatcatgatgcagtctcaggaacggcaaagcaacacacaactgatgattattcgaaacgccttgcgattggggtttctcaggttgagaaaggtgttaatactgctctaagttgtctcacaagttccaaaggaacatgtacagcaacaaaatttagtcagtgccaacttctcaatattagctactgcccttcaactgaggaaggaatttcatccgcaaagagtttagttatagttgtttataatcctcttggatgggaacgtagtgactttgtaagagttccagtaaatgatgccaacttaattgtaaaaacctctgatggaacttctctggagtcacaactagttgaagttgatatcgtgacagcacgtttaaggaagttatacataaaggcttatcttggaatcacgtccgataaacccccaaagtattggctagtttttcaagcttctgtaccaccactcggctggaacacctacttcatatcaaaatctactggaacaggatctaatggaatggggtatgtctcaaccatggtttctccaagtaatgacacaatagaaattggaccagggcctctgaagatgtcctattcatcaaaatctggacaactcaagagaatgttcaattctatctctgcagtggatttgccaattcaacagagctttctttggtatgcttcaagcacgggagattctgaagattcacaggcatccggagcatatattttcagaccaaataggactacaccgactatagtttcaggaatggcgccattgaaagttatccatggacctcttgttgacgaagtccaacaacagttcagctcatggattatcaggtcacgagactctacaagaataaggagcacgctgaagttgaatatactattggaccaataccctgtgatgatgatgatg

SEQ ID NO: 35208 - DNA, 1489 bp, Oryza sativa
  Clone ID: PAT_MRT4530_3914C.1
cgatcgcgatcccaagagcggcgccggcgttcggagttgaaactgggtggccgccggagcactgcttgcgctgcttcgctccaccggatgcccccttcgtcctgggcgccgccgcggccatccatctcggcaacaccaactcctgcatcgccggctacgacgacgacgacgctcccctgggggccaagcgtagctactaccagttctgcatcccctcctgggtagccctcgcacacgacaatggcaccgtcatctccggcgaggccgctatgaaccgcgccgccctcagcccctccacagctgtctccgccttcatgcgcctcctacacagaagggtggaggacgatgtggtgaagagagagatagagcttgtgccgtacaagtttaccaagatgctgggatgggtctccgtccaactagacacagatgctgaattctctgtcgaccatctcgccggcatcctcatctcccacctcaagcacacggcggaggcgcacctgggccgccacatcaacaatgctgtcatcaccctacccagtcgactcagctactccgccgatggcaggcaggtcctcagctcggcggcgaaggagtacagcggcttcagggccgtcaaggtcgtcgacgagcacatcgcggcggccgcggcgtatgggcaccacaccaagcagggtgaccgcaaggccatccttgtcttccatctcggcggccgcacctcccacgcaaccatcttcaagttcgtcgacggcacggctcgcctcatcgcgacgcgagctcatcatttcctcggaggtgacgatttcacggcgaggatcgtggaccacatggtggagcacatcaaggagcagcatggcagggacgtacggcaggaggagaaggcaatggtgaggctaagggtggcgtgcgagcacgccaagaaggcactgagcgagcaacaagagaccctggtgcagatggactcgcttctggacgacggcgcggtcttctccgcgacgctgacgcgggccaagttcgaggagctcaaccacgacctgttggacagagccatggcgctggtgaaggaggtggtggtgacgacgggaggagtggaggtggtggacgaggttcttgtcgtcggcggcagcgcgaggattcccaaggttcgtcagctcgtcaaggactacttcaatggcaacggcaatggcacgcacccaaacatgaagagggcaaccgggtggcgagcagtagtcgacgatggaatcatggaaggatatagcggtatgaaatacaaagagaaactttttgcagagggaacagcagcagctcggtccatcggttccggcggaggcatctggatctctctcgtgtaagcttatgctttggcttccgccgatgaaccaaggtgggtgcgcttcatgttggagcttacagtgagtgtgggtcattcttgccttctggagtcgtttactaattgtacctgtagcactagcactaaataatggtcatttcc

SEQ ID NO: 35209 - DNA, 375 bp, Oryza sativa
  Clone ID: PAT_MRT4530_39150C.1
atgtgggtagtgtcgaaagtgtcggcgacacgctccagtgcctacccgacggacgtgctcccaggaggcaatcccaggcctcggcccaaccagagatgctgcggccaaggccgtgcaaaaaggccggtggtttcggtgggccgcctacccatcgtcgccgtcgcgtttgccatccgcagcggccgcgcggttttcttcttgggtatccgagcattcctagcagcagttggtttatcctgtgggtcgagccgtcgaggggctgatcagctgctcagccgctcagacatgagaagcttctatggaaaaccagcggaccaggcgaggcggcgtccaccgtacctgccccaagcccccaactgcccaatggtgtactga

SEQ ID NO: 35210 - DNA, 415 bp, Oryza sativa
  Clone ID: PAT_MRT4530_39151C.1
tataaaaagttcatgaaatttaataagatagactatgataatataagacactttacaaatatgtaagtctaaattcgatctacacatgaaaaaataaaaataacaaattttatctgcgatgtacgggtacaattaactatctaattttgttaattttgtttctctagttgtagatagtcttgcatgtttgtgtttaaacttatatcatcacaattaatgttacaattttttttcaataactatctgagtcgctagtaaatgatgggtgccataacacctaggtgtagaaaaatacttatccttagttgtcaccttgctagtaatatctatatgtcgccgttggccttgttctcttccgatgtccttttgtccttcccttcgtcttcaccggtggtcggtgcctgctctttgggtt

SEQ ID NO: 35211 - DNA, 854 bp, Oryza sativa
  unsure (1)..(854): unsure at all n locations
  Clone ID: PAT_MRT4530_39152C.1
aattcggcacgaggcatctcctctccaatcttcatccacatcgcatccatcataaatcccccacacccttctccccaaccaagcacctaccaccattcccaatccccctcttccaatcgccatatgcaagagccccaaatccgctatngcatttgtttcatttcatcggctgccgctcctgagaaacagcaatctggataggataggtggtcgcctgtatttagatccggacttttgctagtggggggagagaggatttaggtgaacgagcatcttgattttgaccaatctttggctgtctcactgattgaccctcctcctgtgtgcttggttctttaaatcccgcgtggtgggtgtggggaagaggagaggagggaggcaaaggcacgagcaagaacagctgcttccgtcttcttgctcgctggtattcaaaaggaactatcaaggtgttgagtggagatattgggggcaaagtttggattttggaggttattgtttgctttccattggctaaaaatgttgaggcagagctctagtaggaatcacaggtccaaaggtctgaagctgaagaaggctcttcagataaccctcttggttctggtttctgtttggttgatataccaagtcaagcattcatacgagaagaaggcatatcatgaaaatgagcccaatgacctgcataaagatgatgatcaaaaccagggtgagatcagattaggcaggaaggacctgcctactaagctggaggctgactcatcaacgctggatgaacggattgaggatgaagagaatgaagagatggagcaagaaatgaagcacgatgagaatgatgaagaccccattgatgaacctga

SEQ ID NO: 35212 - DNA, 276 bp, Oryza sativa
  Clone ID: PAT_MRT4530_39153C.1
caaaaaggagtttaaataaaatcaattgcaaaaacaacagcctttccttgtagcctgcattaaacacttaattcccatggcttgctgagtactcctgtactcacccttgctctatataaataaccccccccagttgctgaagaagatgaagtggatcccgctgacgaggagttcttccaggagcaagtcggcttcgatgagttttaagggtttcggtctagttcccaagtcacgcctgtgatgattggtccaagtcttggcttccgctttcccttt

SEQ ID NO: 35213 - DNA, 573 bp, Oryza sativa
  Clone ID: PAT_MRT4530_39154C.1
gctccggtgaccactcccaacccaggccccactaggggggcagccttgtgtcggattagggttcttgaagcttcttctatgcaggcgccgccgatcgcctcctcgccgtcgcctgcgtggaccgccatccagcccgcgccggcgaggctctgctgctcccgccgcggcgccctacgcctcgaagccaaggccggctggaggccggcggcccgagggccgcgggtgccaggcacgggcgccgtcctcgcctacgaggtggagggcccctttcacctactcgacgcgcgcaacgagcaagagctcattctgcatatcacaaaggaagtggagaaagggaagctgcctgcagatgtcgctgccaatctagaagagctatactacaactacgaggacgcggctatgcagagcagggatccaaatgcacacgacatcgtgcttgcaaacatggcggccctgaccgactgtgctctgctcgatgtagagaactcggttaccttttcgccttataacaaagctgctagggaaccattcgcctattacatgtttggtcagaactacattaggcccgttgtg

SEQ ID NO: 35214 - DNA, 1434 bp, Oryza sativa
  Clone ID: PAT_MRT4530_39155C.1
atgtcggggaggatagaggagtggtggcggcatggcaggcagcggtcgctcgtcgagggcaccgtatccggctccggtggccaaccaggttgtatcgcctccgcgctcatggccgcaaggatgcttcgcttcaccactgctcgtctcctccggcctcggtgccggcgtctctatcatggctgcagcgacggcgcggcggcgtgcagtgtcgtcggcgagagggtgacggtgctgaccatcgatggcggcggcatccgggggatcatcccgggcaaggtgctcgagttcttggagaacgagctccagcagctggatgggccagaggcgaggctggccgactacttcgactacatcgccgggacgagcaccggcgggctgatcaccgcgatgctggccgcgcccggcgccggcggggacggacggcggcggccgctgttcgccgccaaggagatttgtccgttctaccaggagcacggcccgcgcatcttcccccagaggtggtgcaagctcgcctccactgtcgccgcggtgtgggggcccaagtacaacggtaggtacctccgcaacatggtccgggaggtgctcggcgaaatgacggtgggcgacacgctcaccaatgtcgtcatccccaccttcgacgtccgtctgctccagcccgtcatcttctccacatacgacgctaagcattcgcctttgaagaacgcgctgctctccgacgtctgcatcggcacgtcggcggcgccgacgtacctccccgcgcactgcttccggacacacgacggcgccggcgaaacgcgcgagtacaacctcatcgacggcggcgtcgctgccaacaatcctacgatggtagccatgacgatgatcacggaggagatgatagcagaggagaaggcacggttgttcttggcgaagccgccggaggagtgcgggcggttcctgctgctgtccatcggcaccggattggcctccgacgaggggctgtacacggcggagaagtgctcccggtgggggacgctcgggtggctgcggcacaggggcatggcgcccatcatcgacatcttcatggcggggagctccgacatggtcgacatccacatcggcgtcaagttccagctgctccacattgagcgtaactacctccgcatccaggaataccaggactacgacccgctcaaggccacggcggcggcggcgctggacgaggcgacgccggagaacatgaggaacctcgtcggcgtcggcgagcgcatgctggagcagcaggttacgagggtcaacgtggagaccgggaggtacgagaaggtctccgacgaggggagcaacgccgacgcgctcatcaggatggcgaggcagctctcggaggagaggacggcgaggctgcagcggcggatgggcgaagtgacggcggccagtgcctgtgccactgggttttag

SEQ ID NO: 35215 - DNA, 2485 bp, Oryza sativa
  Clone ID: PAT_MRT4530_39156C.1
atggagaagccgatgatggacacgggaggggggatgattgcacggaccaagtccaacaagctggctccgccgccgctggcgtcgttcgcgccgttcctgagcaggacggcttcggcgtagacggtgctgagcacggccgatgtcacgactttgacgattctgtcgtgcaagtcctgcctcgggaacatttcggcgtccggcggcgccggcgcaggtgggaagtgcaactgctatggcagcaccaactacaacaacagcggcaagagcgagtcacgcagcgcgcagctgaagctcgaaatggaggaccacgtctccagcggcgcctccctcagccccgcctccagcgccagcctcggcttctccttcaccttcaccggcttcacccctcctccccaggacaccatgtcctccgccgagatccatcccttcagccacgactactagatgatgggaatggaagccgggacagctcgcaagaaagtgatgaccgagccgacgttggcagtgttcctttagttaaagaagggtaactacaattcatatccggggcttccccaccggtcaatccactgcgcgaaattacgggggtagtggcgaagggagatgtatcagccggtcccggacattctgatcaatgccatacctcttcgacaacggcgtgacagaagttgtagctctggtcgcgatgatcatcggctacagggttctagcgtacatgtctctgagaagaacgaagacttcagccagctagcgaatcggtcgtcgagtgcactaacaggagtctggatttctgctaggatggcacccgttcttaccagatgattggacatagagaagtttgtaactatatatatataaattgcgccacgaaaagatagatcttttttaactgttctgtctttctgctacttgttcagagcgcgacatatctgttcctacttgcctcataggtcaattgtgggcaacaataacgagtataagtcccaaatctttactctttctcgatgaaccaacatctggattggattcaactacagctctcaggataattcaacttctacatgatatagctgaggatgggaagacagtaataacaacaatccatcaaccatctagcagattatttcataagtttgacaagcttatcctcctgggaagaggaagtttgctctattttgggaaggcatctgaagccatgccctactttcagtccattgggtgcaccccgctcatcgcaatgaacccagcagaatttctactggatctcgccaacggaaacactactgatgtttctgttccttccgagttagatgacaaggtgcacatggaaaatcaaaacctgcaaactaataccaagaatgactacaagccatcagcacaagatgttcatgagtatcttgtagacgcctatgagaatcgagtggcatacaaggcgaagaagcagcttctagatccacttccaatcagtgacgatatgaagacaactataacatcatcaaagcgagaatggggcactagctggtggcagcaatattccatcctcttctgtagagggatcaaagaacggcgacatgattatttgagctggatgagaatcacccaggtcatagcaacatcagttatcttaggtctactatggtggcactctgatccctcgacaccaaaaggtctacaagatcaggccggcttactgtttttcatagctgtgttttggggtttctttcctgtgtttactgccatcttcacattcccacaagaaagggcaatgttgaacaaggagcgtgcagctgacatgtacaagctcagtgcatacttcttggccagaacgacaagtgatctgccactggaccttttccttccagtcatatttatggtgattgtctacttcatggcaggcctcaaagcaactgccgcacatttctttcttagcatgttgaccgtcttcctcagcatcattgctgctcagagcaagtttggttcgaggccaaaacaagccttaccaaaatttggccaaaggcacaattaggattggcaattggagctagcctcttggatatcaagaaggcaacaactctagcttcagttacagtcatgacattcatgctagcaggagggttctttgtaaagagagttccaccattcatatcctggctccgctacctgtcattcaactaccacacgtacaggctactgctgaaggtgcaatatcatcctgtcccggacattctgatcaatgccatacctcttgacaacggcgtgacagaagttgtagctctggtcgcgatgatcatcggctacagggttctagcgtacatgtctctgagaagaacgaagacttcagccagctagcgaatcggtcgtcgagtgcactaacaggagtctggatttctgctaggatggcacccgttcttaccagatgattggacatagagaagtttgtaactatatatatataaattgcgccacgaaaagatagatctttttt

SEQ ID NO: 35216 - DNA, 736 bp, Oryza sativa
  Clone ID: PAT_MRT4530_39158C.1
atggagctgtttcatgactacaagatggctgataaccgttctgtagttgagcaggcccatgtaatacagaccatggctaagaaactcgagcaggcccatgaatactccgttgaggggttgatagcgtctcttgatgttgaggagaaaactcgggaaaaagactctgcgtctaagggcgatggtgggcaatccagcgccaatgttgtgcacaaggcccagaacaagagcaaggggaaatacaaagctcagcagaccaccaacttgaagaagaagaagaacaacaatcctaatcaggatgagaggacttgctttgtgtgtggcctacctggtcatctggccaggaagtgtccacaacgcaaggggatgaaggcacttgcagggcagacttctaagtctgctaatgtgaccattggcaacactagagacggaagcgggtatgataatttaccttctggtttttcagttaatcagtctactaattggtggattgatataggggccaatgtcgcacggggttccaccgtcctaatagggaatgggtcacatgcttctgttcatggtgttggcacggtagatctgaaatttacttcaggaaagatcgtgcagctaaagaacgtgcagcatatccctactatcgacaggaatcttggtagtggctcccgtctaactagagatggatttaagttggtttttgagtctaataaaatagtcctgtctaaacatggatatttaattg

SEQ ID NO: 35217 - DNA, 348 bp, Oryza sativa
  unsure (1)..(348): unsure at all n locations
  Clone ID: PAT_MRT4530_39159C.1
gctattntngcctcggatggcagcgcggcntggccgtntcgcgcacctggngggacactcgggcccgctgcctccgcctcgccgccgccctcaccggcctcctcggcgtccagcgccacgacgtggttgcggtgttcgcgcagaacattcctgctgtttgcaagctccacttcggcgtccccatggccggcgccgtcatctgcacgctcaactcgcgcctcgacgccgccatggggccgtcctgctgcgccactccgaggccaaggtcgtcttcgtcgaccgcgctctgctcggcgtcgccagaaagncctcgtgctcgtggccgaagccggagcangcgtcccgtnt

SEQ ID NO: 35218 - DNA, 187 bp, Oryza sativa
  unsure (1)..(187): unsure at all n locations
  Clone ID: PAT_MRT4530_3915C.1
cggacgtgtnaacaccgacgcgacantnggctttccngtntctcaaggcnatcttccagctcaacgtgttcaagcccgtnatggcccatgcctgcntggagtcgatccgccttatcgccgattcgtgcatcagcttcgacaaacattgcgcctacggcatcgagccaaaccccgacaaantcaagga

SEQ ID NO: 35219 - DNA, 356 bp, Oryza sativa
  Clone ID: PAT_MRT4530_39160C.1
aaccccggcgaaggcgccggtggcggtctggtcgccggagaagcaaaccaagttcagggcgtccatgcacagctttgacttcgcccgggccaccgtggaggttgcgtgacggcgcatgtcggattatggcacgcaacaagagtaaaatcgccatgtcggtcgcgtctacgtatgcatatgtatgtattgtgttctgcgggagctatatgagctaaaagagtgtaccagcgattttaggttttaggattgaaggtcaatgttcaaatttcagagccccatgctcaaaattgggatgtactactactatggcaaatggaaatcgaatttcattaaaaaaaaaaaaaaaaaaaaaaaaa

SEQ ID NO: 35220 - DNA, 453 bp, Oryza sativa
  unsure (1)..(453): unsure at all n locations
  Clone ID: PAT_MRT4530_39161C.1
cgggggtcgcgttttgttttttttttttttttttttgggggtttttttttttttttttttttttttttttttttttttttttttttttttggggggaaaaccccggggttttctccgggcccccggaaaaaaggttttaaaacgggccccctttgggggccgccggggtacttttttttttttcccccnngggggggggccccctgaaaaaaggcccccaggcccaaaaaaaaaccccgttctaatttcccgcggttccccccctttggccccccccacgggggaaaaaaaaaaacgggaatcccgccccttcccgaagggaaaaaatttgcttccaagaaaaaaatgccaaaaaaaggggtgcccctcccccccgggaaggaattttgtgccaaaggccctaacaaattaaccccttttcccccccgggggttcgccgaacccccccgggtt

SEQ ID NO: 35221 - DNA, 935 bp, Oryza sativa
  Clone ID: PAT_MRT4530_39162C.1
cggcacgaggcaataacacgctcatcgaacagcgcgcgcgagcgagggatggataggatattttcgttcgcgttcgtgccatcctaaatcccgtctataaagccgtgcacatctctatcctcacctccattccattccactcgccaacccgacacgtctctcatcttcacgcaacgaacagcagcagcagctcaagctaagctaagctaaagtactacgtgttctttcgtcttcgccgccctgagtacggatggggatggtcccgttgtattgggggttcccgccgtatggttcgttggtgatctgcgacgagagggagatcgtgaagggagggtgcggcaagtcgtacgcgccgttcccggtggggtgcatgttccacagcgagggggggctcaagagcttcgagcacccgatgaaccggctgaaggcgatgccgcgggtggacagcgagggcgtcatgtgcggcgccaccttcaaggtcgacaccttcaccaagatcaactccatgccccgcgtcggcagcgccaccaactgggccgccacctgggacgacgctgccgcctgatgatggcgctccgtacgccgtcgtctcgtcgcccgtgcgcctgccctcgccgccggcctcctcgccgtttgccgccgccgctcatctcttcctcttcttcttcctctctatatccgatgtgcttctccgtccgaagcatgcagattattagagcgatatttgcagctagcgctggaagcgcgccaatctatttttctgctgtgtttttacttaattttcacctcttctttttaaatttttatgtccatctttgggctctcgcctctcggcaatgtatattctcggtcgcgggtggcatgtcatggtacatactatgaatgatgaataagaaagagtttgcattcactcaaaaaaaaaaaaaaaaaaaaaa

SEQ ID NO: 35222 - DNA, 1493 bp, Oryza sativa
  Clone ID: PAT_MRT4530_39163C.1
ggaatggattgagatatgagccttttcccaacaactaattctgactcagtattgttttgcaaaagaacctctttaaagtgaaatgttgtttttctcaagtaaggccataccctcatttactattgaaaagtacaaggcttgtcgctaagggctatactcagaaagaagacaaatatttctttgacacttactcacctgttgctagattgatgacaattcatgtgatactttccctagcagtctcacatggtcttttcgttcatcaaatggatgttaagacaacttttcttaatggagagctggatgaggagctctatatggatcaacctgatgggtttgtagttgaaggtcaagaacgcaagatgtgcaaattattgaaatttttgtatggactgaaacaagctcctaagcaattgcatgataaatttgatagaacattaacatctgcaggcttcacagtcaataaggcagataaatgtgtataatatcgctatggtgggggtgagggagttattttgtgcttgtatgttgatgacatactattatttgggacaaaccttgaggtgataaatgaggttaaatcattattgtatcaaagttcgatatgaaggatttgggagtagctgatgttattctaaacattaagataattattggtgaggatgggattacattcttgcagtcccattatgtagagaagatcctgaatcgctttggctacattgatagtaagccttctccaacaccttatgattttagcttgttgtttcacaagaacaagataattgctaggaatcaattggaatactcccaaatcattggcacacttatgtacctagctagtgcaactaggcctgacatctcctttgatgtgagcaagttgagccggtttacctttaacctgggagatgatcattggcgtgcgcttgagcgagtgatgcgctatctaaaagatactatgaaattggggcttcactatactaggtatcctgtggtactagagggataaagtgattttaattggatctctaatgtggatgagatcaaagccactagtggatatgttttcacactatatgatggtgctatttcatggaggtcctgtaaacagaccatttgacgaggtcaactatggaagcaaagctgaatggcttgcaaacagaccattttgacacaaccattctgctactgttgagatagaatggctgcgtaatcttttgatggatctgcatgtggttgaaaaaccggtgctgggtattcttatggactgtgacaatcaaacggtgattgtcaaagtgaacagttctaaggataacatgaaatcgtctagacatgtgaaaagacgattgaagtctgtcaggaaattgaaaaactccgggattataacattggattacattcaaatagctagaaacttggcagatcccttcacgaagggactgtcacaaaatgtgatagacaatgcatcgaaggaggtgggtttgagacccatg

SEQ ID NO: 35223 - DNA, 671 bp, Oryza sativa
  Clone ID: PAT_MRT4530_39164C.1
catattacacacaaacatgaccgattaaaacgcacgatgcaacaaacgcgctatcccacgtcgtggcacatccgacttcggtcagaaaacgagctgaagaaacgcttaattcttggcttcactgaatataattccggtaaccccggattatatccaattaaccactacatgaaacaaaattaattaacttaattcacatgagaggtggcgtgcaacagcatcgcatcaacggtcatccccgggccgaacgccatcatcactcccaactccggccattcacccgccgccgccgcctccttgcgctgccggcgcagctcgtccagcgcgaagatcaccgtagcgccagacatgttcccgtagtcgctgagcacacggcggctcgccgccagcttgccgggctcgaggccgagcgccgcgtcgacctggtccatgatcgtcgacgagcccgggtgcaccgcccagaacaggtcgttccacccgccgccgccgtcgccgccgagaagtgggccgaacatgtccaggaggcaccgctcgaacgttgtccccgatgagccccgggacctgccgcccgaggacgccgtccaagcggcgctccgtgaacccgatgttcagggcgtgggccgactccgggatgattcgtctgcgccggcgacactatctcgaacagcggc

SEQ ID NO: 35224 - DNA, 3045 bp, Oryza sativa
  Clone ID: PAT_MRT4530_39165C.1
atgtcagccccatatgagaagaaaaaatgtgtggcccatatgtcagccccatcatctttcttctcttttcttccctatcgagagagtgggggcgctagcgggagggggagaggaggccagccgcgccagcgggacagggggaagaggcggccgacgagactgggagggagggggaggcgacaacgtttacgtaggcttggaggatgggcggcagcgaggcaagcaaggaggacggcggcggagagtgggaagacgaagctagcgatgagcaacgcagcgtgtgggatcgaggctgagacacaaacgaggttggtcgcgcccagcgccaccaagttgtgcatcactagctccatcacctcggctcacgtggtccgcgaaaccctagccgctcccgtcgcggagcgtcctcgacgtccccgcgccgactcctccgaggccccgcgcgagtcctctccgagccgcaccaccacaacggctacgggacgcgcgcgggagggggaggcgactcgtcctcccgccgccgccgccgaagcgcactactgggaagaaaatggatgatgagtaccagaacttcttgaagtgagcttggggggagcgcccctgagtcggtgacaaagtctagtgatccaatgttggctcttacagggagcggcgggagtggtggcagcagcggcggccgccgccgatctggacccggaggtgcacaacctcaacgcgcgcctcctcgagatctcccgcatgctccagtcgggcctccccctcgacgaccgccccgagggcgcgcgctcgccctcccccgagcccgtctacgacaacctcggcatccgcatcaacacccgcgagtaccgcgccagggagcgcctcaaccgcgagcgccaggagatcatttcccagctcatccgccgcaacccggccttcaagccccccgccgattaccgcccgcccaagcttcagaagaagctctacatccccatgaaggagttccccgggtacaacttcatcggccttatcatcggcccgcgcggtaacacgcagaagcgcatggagaaggagacgggcgccaagatcgtaatccgagggaagggcagcgtcaaggaagggaagctgcttcagaagagggacatgaagccggatcccagcgagaacgaggacctccatgtgcttgttgaggctgagacgcaggaggcattggacgccggcgcgggtatggtggagaagctacttaccccggtggatgaggttctgaacgagcacaagcggcagcagctgcgggagctcgcggcactgaatgggaccattagggacgatgaatgttgtaggacttgtggggagccaggtcacgggcatggcactactgggaagaaaatggatgatgagtaccagaacttcttgaatgagcttggggggagcgcccctgagtcggtgacaaagtctagtggtccaatgttggctcttacagggagcggcgggagtggtggcagcagcggcggcgttggtgctggtagtggtagtaacccgccatgggctgcaggtggtggtgctgctgcctcaggggcaaatgggatcaagaaggagtatgatgagaccaatctgtacattgggtacttgccacctaccctggatgattcagggctgataggcctgttttcacaatttggagagattgtcatggcgaaggttatcagagatcgcatcactgggcagagcaaaggatacggttttgtgaagtattcggatgtatcccaggctaacgcggcaatcgctgcgatgaacggttaccatcttgaagggagagtgattgctgttagagttgcaggaaagccgccacagccagctgttcctcctggcccacctgcagtgccagcaccaccaacatatcctcctgcagatcctgctgctggtggctacacctcacagccctacatgggagcaccaccgccaccacctccagggagctatgctccagttccttgggggcaaccgccaccatatgcttcataccctccgccgccaccaggttctagcatgtacaatcctccacctcctgcaccaggccaagctacaccacctccatatggtgtgcagtatgcaccaccaccagctccaatccctccaccaggcactgctccatcaactgatggggcgcagaactaccctcctggtgtaacaccaccaagttctggtgcacctactcagcctgtcccagctccagtatatggaacttccggcgcaccaaatgcgccacctatgtaccctccacctccttatggttatgcctcttattatccatcggtgacaccagttcagccgccaccacctccaccacctgctggcgctgatccctcgcagagccttgcaaatgcaccgtggcaactcacagtgcaccacctccacctccttctggtgctgatccgtcgcagagcatcgcaaatgcaccctgggcaactcacagtgcaccacctccaccaccagctactgctgatcactcacagagcattgcaagtgcaccttgggccactcacaatgcaccgcctccaccaccaccaccttccagcattgagcagcctcctgctacatatggtgctgatgcagagtatgataagtttatgtcagagatgaagtgatgtgagccaagatgaagcaattcttccaacagtggaaaaaggcttaaggtttcttggagctagtgccagaatgatttatttcttgttggaagtttgggactcacatctttaaccttgctgtgctgttatgaccattgcagaggtttcatgattatgaaggacgttaatgacagggcaccgaggaaaccagattatctgctctatctccatcttcgagaaccattttaagaaccatttactgatgcttttcttatcttaaaattcttgtcattacttggcatttttcctgtgatgtcactttaattgtctgttggctgtgatataatctctactctcactgttactgtttatgttaaaaaaaaaaaaaaaaaaaaaaaaaaaaaagggggcctcgtgccgattcctgcagcccggggatcca

SEQ ID NO: 35225 - DNA, 841 bp, Oryza sativa
  Clone ID: PAT_MRT4530_39166C.1
ccggccgggagggagtcatagcagcggtggaatagaatcgagtcatcatcatcatcagtgggggagttgggagagagagacagtttcacggagccaacgaagcgaagatcctctcgtctcgtgttctagggtttctcgcggcgatggaggcggcggctagggctccatccagggcggcggcgaggttcgtgcagcgcaggctcttttcctccggcggcaaggtgctcggcgaggaggagaaggccgccgagaacgtctacatcaagaaaatggaacacgagaagctggagaagttggcccacaagggccccaacccaggagagcaagcttcaaccgcaggtgctgcggctaacgctgtgaagactggaagcggctcaacggagtcaagatctgctggtgtgtcaactgacaaaaacaggaactatgctgtcctggcaggcactgttgctgctttgagtggcctggggtggtatctcttgtcaaagcctaagaagtctgaagatatagtggactgaaggtggttaatgagatcctagacggtctgtcattgagtttcaccctgttttacttgtttagaaataaatgctgaacacactgcactgagtttcctatagcatcactaaaactttcaagtatgcacccgagatatgttctcagttcttcatgccctgttttgactgttggcactgttctctgatgctgcatccttttgattgaagaggaattcggatacaagatagtacatgaaataccgttgtttctagtccttgtttgaaccaagtgttgttttaaatttcagcaagtgatggttttatttctaaaaaaaaaaaaaaaaaaaaaa

SEQ ID NO: 35226 - DNA, 405 bp, Oryza sativa
  Clone ID: PAT_MRT4530_39167C.1
atggtgatgggcgacgagtcctcctctaggagggcgcggtgggtgccgcgtgcggcacgcacggtggggagagtgaggcgggcggcgggcggtgggcggcaccgaggacattggaccggcactgaggcggccgtcgtgcttgtcccccatctccgcctcatgcttctggggaggttcgccgccaccgttgacgtcgccgagcggcaggagttgtattggacgagtctagtcattgtggaagaactcggcgtctcgtcgccactgatcggcgtggcgatttgggcaccctctgattcgtcttttggcgacgtcttgtcaaggaatctattttctgtcatgctctctgcagactctgcttccgccggcggccactatctattttgtgctgtgctctctgttttctga

SEQ ID NO: 35227 - DNA, 549 bp, Oryza sativa
  Clone ID: PAT_MRT4530_39168C.1
tgtctgcaaaattggctcctcacccttgcgcagatgcagcctctttttgcagttttgttttgctgcgggaaattcagatttgttttgttttggaaacattccgaaaaatccggtgcgtgaaaacgacgtggagtccggataagttatacgcgacttatctggttcggttacgcggagtggagatcgtacgggcgtcctgatcaagcgacctatctctatataagccgagccgccgccttcacgcaacacatgcgaaatcaatatagggtttgcctcttactctgtgctgcaccgtcgctcgtagactactctatcccgctccccggcgtgcaccggcgatcgggagagcaggtctccggaacctctgccttcgacgtccttcctctccgctcgcgtgctgcgtgccttcgtcgacgcccgcaaccgcgagtagttccccagcagcgccgccgcccccacctcctccccgccagcgccgccgcccccacctcctccccaccagcgccgccggccccactcctcgccgaccgtcaaccacgtcgccgccat

SEQ ID NO: 35228 - DNA, 227 bp, Oryza sativa
  Clone ID: PAT_MRT4530_39169C.1
cacaaaaccaacccaaccgccgccgcatcgccctcggtagaacgatggccgcgtcgtcgctgcaccagaccaccagcttcctccaccgcccctcgccgggatgagctcgtccgccgcgtcatctacttcggtggccgcattaccatgcgccgcaccgtcaagagcgcgctccagagcaatctggtttggatctgaccgtcccaagtacctgggtccgttcttggagc

SEQ ID NO: 35229 - DNA, 595 bp, Oryza sativa
  Clone ID: PAT_MRT4530_3916C.1
tcttccaaagttggagccccttgaaatggattatactgctgcaaacactaccattgttgacaatgtcttcaatattgcggtttgatctaaaacagatggttatttgtgttaacaaagaaaatgtgtagatgcaagaataatactcctagtcaattctttctaggagaatatatgattgttttaatatgctgtcaattacttactcattcattctttgaattatccattcatgctgttctttctgccactagtgcatatggattaatactctttgaattaatactctgttcattctttgaattaatagtcttatccattcatgctgctgtttccgctgctagtgcatatggatgcgacctcaatccatcgggacttttacaataaatttaccggcaaatgcaaatctgcttccttcctcttttggtcgccttcgtgcagcatacttacatgtaaccccataacggtaatccaaaagatgctttatcctgcggcagctcatctatctgcagataataatgtgctttagtatgtacccaagttcaggaatgtcaatgtaatcggcgccatggactgcaataaaaccttgttcattgtc

SEQ ID NO: 35230 - DNA, 924 bp, Oryza sativa
  unsure (1)..(924): unsure at all n locations
  Clone ID: PAT_MRT4530_39170C.1
cggtggggcgtctaaactagtggatccccgggctgaggaatcggcacgaggacagtacacaagcctcctcctcctcctcctcagcagctgttcacactcacactgcctcgtcgtctctctctctctctctccatcttgctgctaaatccatccgcacctaatccggcgtgcggtgcgggagcaagcaaggaatccacccccccgtggcgacaagagaatcggatcgagggcgtgcaggcgcagctggcgagcgagcgagcaggggaggaggggaaggaaagctcttggtacacccaaccgtagaggcggagagggcatcggctcagacggtggctgcagtgcaggcctcagctggggtcctcggctcggatctggggaggacgcgccgcggcggaggcgatgcagggtttgcttgtagtgaaattctgcacccaatgaattatacatacaatatataagatggcaacagaggtcactcagaattattttgcatggtcacaggaggaatcacctgtgcaagacagctctcagggaacaccacaagtgttcgaccatggttccatatcttttggaagatttgagttggaatncactagcatgggagaagtggtctgtatttgccaatgataggcgccatgaagagtttggcaagttcaatgggtttggttgctaagaagaaggcatacttcgaagaatacttcaagagaattangggagttaaaggctttacaacaacaaaaccagcaaactgaacttaatcttgactatagtggtgatgggtagtgattctagtcagacggagnaggatgtgccaactgcagatcaggcatcntcttctggatctggaacccttcttgattccatggtacaaacaggtgttcagactatatttgagaatgattttggaatgctatgatgataatg

SEQ ID NO: 35231 - DNA, 4015 bp, Oryza sativa
  Clone ID: PAT_MRT4530_39171C.1
ggcaaaagatgcaatagagagcgagccagagatagacagcatgaatattttttacagttcactaatatggctaactaggatacaacaatataaaaataacgactaataagttacatcttgtatagactgcaaaattaaaattagaattaaaaaagttgcacgcgacatacatacatatgatgtgcaggccaaggagctagccacttggggtgggtatcaacgccagcatttggtttttgatgatgcccatgcacatctcgatctccctgaagatggttacattttgtgagctgcaaggctgtaggcgcgaaagcgctgaatccaggatgtgcgcgacttcggcaggatggtactgcttttccgtgcagttctggatcataaggatcgtagcaacacacgatgaaatcaactctgagggaaattgcggttcagaatcgcaaccattgggcaatcttggactagaaatgttatttgttgcaggatcaaagtggccagatgtggtgttatcttgatgagatgaattggcctgtccagaatcaggaggtatccgtcttatgcctagtatactggaacccgagccagtgctgcgattgttcagattatcgagtgcctcccctactttggcataagcatcctctccttcactcacactgcacattgcctgaatagcaacatcaaccatcaattttgctcgggacctcgaagtctcaataacttccatcacttgggacccagattcctgattaatatagccaaaaaggttatacaggtctggtgtgccagttaaggctccattttccatgggtttaggatatgattgtgctggatgcccatgatacgtgttgcgttgccgcagagaaagcaaggctgaagccacatgatcattagaatctcttagctgtacaagcaccatagcatattgttttctgaagtgctcaaaatctctaaaagcttctccatccttttgccttccatacacctcttcgttcatgtgcctcaattctaccaacaaagcttcaacagagaacatgaggactaagcctttcaaacttgcctttttatcaagagcacgtgatagttcagcaagagcccttatatcagcctctctttcctgtatctgtgacagtgtgcacggctgactgtacattgactgctgagcagcaacagcaacctcatttactgcaactttggcctgtgcaattgaatcaaccgtgtcaccctttgcttgcttcattaaagtatttattgggtaattagaaggtatgttggaggttgcatcaccaccatcaaaacacacatttgatgtgaatcttgttggacctccagtacctaactctttggaccgatcctcgaattttgcttctgagaaactattgtaatatttgttaacaatgttctgccgtctgagagactctgggaaattttctagtggatgtagtggcatacaatcaatatccattacaaactcaacacccagttcaggtcgatcaaattgaacccggcaacgattatggtcaacattcagaacattcccatcatgaagctcccttgttctgggatgacaggctatgacacgctgtccaactcctaaaggccgagcaagatcggttggtagaccttctcgaacaccagaccgaagttcagcatagtgttgcctgacagactcacgatactgagcaagcttctctctctcttcttgcaaaaactgtttcgacaatcgacgtggttttccaagggagctccttatgacaccccactcgacacgagtcagccttggcacatgacccaacttcacatgattcaaatactcaacaaattcactcttttcaaaccatggaaaatcaattgcactatagaaccattcaaacgtgcaccatctacggagcaaacgtgaagataagcaatgagagagtgagtccttaagatcaatgacattattcacagcgtaagagaatttatcacttcggagatcatcagcaccatcagtaggtctacattctggagcaagtgctttcagaatgcctattttgcggcgacttctaccctttgatgctaagtcagcttgctgagttgtggcaccttgtgttgtatccacagtatccatggctttattagaagataccttcccttcttcagcagaaacgttgtccaagtcactaatttccatccactcagtcttctcaacatctttaagtgcacttttttcatctttagaaatctttgccgcggaaggttttcttttctttttctctgtttgaacaccaaatttagaatctagctgctttgtttcagaaatagcgattccatcacgattaggaactttggcaattctagcttttttgcgagcagccatgtcagcgcttgcgagttctgactgccttttaacctttttcactgtacttttggatttatctttcttctcaagtactgacactgctgcaggcatactaggcttttcatcagaatcattatctttgttttcatccttaatctgtgctgatgattcagattcaacgatagaagaaggttgaagaatattcacggatagatcagctaatgtatgtaatgcatcaagggctgagctttcatcaccaaagaacagctggcgatttcttttgtttgatttcttagatggccatcttcctttacggcccaatccattcacctctgattcatctttagtctttttggcgctatggccttcttcagtgccactacaggcctctctgtcatcctcaagttgatcatctgttttccgtgcagctttctttctcctcctctgagttcttttcaccttttgctgagacttgccagacgcagaaccttcgttattcatcaaataggatgcatatttgggataatcgccagtctctgcttccctacttcctaaactaccttcagggaaatcagcatctacttggaatccatgtagctttgagcttcccatctccgaatcagcattctttctgtctgtactttttacaggagacaggaacatacggtcaccagatcttccaggcgtttgagaatcctgaggtgaacctcctctttgaaacacctctgccaaagctagtgcagctacatgtgcaccttcatcatcaccattaccatctggtttggcttgtctatttgtcggccctatcttctcatctcgctggtacatactagcaacaggcactcgtggagtccgttttccaacagcacgtggcttgttccctccagatcgtttcttcttcaacagggaaaggcatccatagcttgacgaagcaggttgagattgcaattgatcaggatgttgtgtatcagaagccttcgacacagattgaaatttcgcacgaccacgctttcgtggctttctggaagtttttggtgaaccattactctcatgatcgctgttacttccatccagaatattatagtgatcagtcatcattgcaattaaccctgcagcagtagctgttccctcaggaagagataaatatgccttattcatgttgtaaagagcctccaccatttcagatgttctatcacggatagaactggccacctttctccaatcttttccatattttctataggatccataaaaacgctctagctcatctttgctccattgagaacctagcatgtcagacagttttttctttcgcactttacttttatgcacatttgttgcatctttgtcctgccaatcttcatttattttggcatatcgtttattcacatttctcactttccatggtaacacacactccgtggcacacaaattgccaccgcagacgcaattcacaaataatccaatgcgcacagccctgagtgccaggtgagtcctcgatctccaacagacgacgagggcacgaaattggggattccggggaacgtagaccctcgcgggatgagctgggcggttaacgcgggagcggctacaaaaggactcctccggcggcgcgaggtagatcattctgctttgtgcaaaaccacatacatccaagcaatatgatgcgacagcctccat

SEQ ID NO: 35232 - DNA, 1125 bp, Oryza sativa
  Clone ID: PAT_MRT4530_39172C.1
atggtggcgtggcaagaggctggcgtggccaaacaatgcggccacgcaaactgcacgtggcgtgacaaagtttggtatcccgtcacagctgcaataggcaaaatatcttttgatggtcctgagtgcatcaaacaggtacagatgagacccagtgaaaagccaatctcgacattcttcatgaagaaaccagtgaaatcagagaagaaagatcaggatcacgcagaaacaaaagcctttcgagctgcaaacaaagaatggcatgaatcagcagaaaaccaattggataaaacgtaccagcaccaagtggaagaggagcaagatgcttctatatttaatgatcaacctatcactttggaacatgatgtcgagaaggctaaaaccatgaagaatgacgaccttatatttactgacgaagcaacacagaaacaagatgctttaagattgaagaggaagaacgaggatgatgaagttcatgcggataaagtgatggagaagagtggcagatctcctgttcatgtgaaaaagaagtcaatttcagaagcatatgcatctcctgatgcagactactgtgagaaggctgtccgtagtgaaatggattccattattgctaacgggacttcagaggtgacagagcgactctatgggtgtaaacttgtggggtgcaagtgggtgttcaacaagaagcttaggcctgatgtctcacatggacttcttgttcatcaaatggacgttaagacagctttttttattgaagagctggatgaggagatctatattgatcaacctgatgggtttgtagttgaaggtcaagaaggcaaggtgtgcaaattgttgaaatctttgtatggtctgaaacaagctcttaagcaatggcatgagaaatttgatagaacattgatatacgcaggcttcgcagtcaatgagacagataaatgtgtataccattgctatggtggggtgataaatgagattaaatcattcttgtctcaaagtttcgatatgaagaatttgggagtagctgatattatcctaaacattaagctaattagaggtgagaatgggattactctcttgcagtcccattatgtggagaagatgatgaggacacaactagctcggatataa

SEQ ID NO: 35233 - DNA, 395 bp, Oryza sativa
  Clone ID: PAT_MRT4530_39173C.1
gcggcccttccgtgttcccactgtcgatgtctcagatgttgctcttacagaaagaatagaaacctatgcctgatatgatgctatccacagtgctatcaagtctgaataccagggaaagctcaagggaatcataggatatgtatgaggactacctggattgtactgactttgtacgggacagaacgtccagcctctttgaccccaagggtggaactgctgttaacgataactgtctcaagattgcagggtgagcccacaacacctggtgatacaggaaccgatgtatcgacctgatcactcacatggccaagaccgaacagaatgcggttgcttgccatggtataacatggccgacgagccggacataccgaaatgctactgctatgctgagaata

SEQ ID NO: 35234 - DNA, 2386 bp, Oryza sativa
  Clone ID: PAT_MRT4530_39174C.1
atagatgtcgcgacaggggcgttgggcagcgtcctggccaagctgggggtgctgctccaggatggattcaagcataatctgccgaagagcgcaaagcatgacatccactctctccggatggacctacagattatgtactcagtcctccgcgatgtggtagattcgcgcgcggagcagcaggggcacaacaagctgtgggcactggagctgcgggagctctcgtacgacgtggaggatgcagtcgacaccatcctggtacgcctgggcggccttgagtcgtccaccgaagcagcaagcagcacgggatcgagctggctcattaagattaccaagagggccacaacccataaggtctttgacgagatcaaagacatcaggttacgcgccaaggaggtaaatgaatggcgtgatcggtacatgatagatgacagtctacataagcctcgagtttctgctatctacgaccctcctcgcctgcctgcagatctgtccgtcgaccagcacagcctagttgggattgaccaggcagcggccgagctaatagagatgttggcattggagggtggtgcgttcgagcggcgattgaagacagtgtccatagttggaatgggaggactaggcaagacaactcttgccaaactagtctacagcatgcttaaggatcgggaccagtttcaatgtggagcttttgtttcggtgagtcagtgtcctaataacaggaagaaagttttctgggaaatgctctaccaactggatggaaaaaattataacaacgtccagtacaatgcagataacaatgtagaccaactcatccatgcaagccgagactcccttcagaacaagagatacttcattgttgttgatgacatctggtctatggaagcatgggaggtgatcagattagctttgttggaaaataataatgggagtagagtaatcacaacaacccgtatatttgaagttgcatcaagtgctgatgatgtttatacaatgcggcccctctctcctgagaactccaaaagattactctgcaaaagaatatttagtggtgaagacaattccgatggtgttgaattggctgaggttcgtgacaaattattgaagaaatgtgatggcttgccattagctgtccttacaatagctggtgcattggctggtaaaacaattgaacagtggtatatggtatacaattctattgcttttgggcatgtaaatggcagagttatggatgatatgatacgtatattgtctttgagctattatgatctaccgccacatttaaggacttgcttgttgtatctaagcatatttccagaagattatttaatcaagaaagactttttaatttggaggtggatagctgaaggttttattgaatatgatggcggtagaagcttatttggagtcggagagagttacttcgcggagctaataaacaggagcatgatccagccagtagaggtcggtgacagagactcggtggatggttgccgtgttcatggtgcggtgcttcatctcctccgttacctcgcaagagaagaaaactttgttactctcctgatagacaacatgctatcctcaggaaggggtaggccccgcaggttagccctccaaggaaataatgaagaccacactctgcagactaacattgacttggcgaacgtgaggtcatttaatgcaagtatgtgttctgctaatatgatgccgctactgtcagggtttaagtttctgcgtgttctagcttaagtacgttggaaagttatttctgttgaggtacctaggactagtgggggcacctatcagtgagctcccagatggaataggagaactagagtttctacagacactggacttgagggaaactggcatacaagaactgccacggagcatctgtcgcctaagaaaactgattcgtcttcggagattgaccatgaccagaaccgcgttgccggccgagtggatagggagtctttcagcactctactacttatgcatcgaggccccggagctgcgtttgggggacctgaagatccttggagggttgccgagtctccgttccctgtggatatcatcaagatcaaatgaaaggccgctcgtgatcaccgctcgtgatttccttctcttatagagttcactctcttgaaccttcgggccagattttcaacgaggagccatgccaaaggttcggagagtcgagttcagtttcagcctgcgcgatttcagctctagggctgattttggcttcggattggagaacctgctctcacttgagcatgtcaccatccgtctccacgacaaggtgcatagtgtggaagccgcactgaggcacttaaccaagaaacaccccagacgtcccacaattacactgataagggacggcgaagaa

SEQ ID NO: 35235 - DNA, 954 bp, Oryza sativa
  Clone ID: PAT_MRT4530_39175C.1
atggaggattctttggatggaaattcaccacctatttattcttatataaaaggaatcaactataaatgtgtgttggtaggcagctcgaccagaccagaccagagcgggtcgtcgtccgtcgctcacggcagccgcagcgaccgacacggtcgggactgtgaaaagggctttacacaccacaccaccagggtccaggggtatcgcatcctcgtatcgtacgtgttgctcccttcgtcgatagcaccaacacaacgcatttgcttcaaacacatgtcggtatcgtcagtacgtcgtcgtcgccgcatcggccattcggcccaattagccggagtcgatcgattcgatcgccccctgtcaaatcgcagccagcttacgagctcacctaatactcctatctatctacccgatgaacaggtcgcgcgtgtgatgtgctctctctctctctcgcgtgtcgatcgccagtggacggatcgatctgtgctgcaagctgctggtgcagatgcaggtggatccctgacggttggatcagcgtgtgtttcggagatgggtgtagtcgagattgagcccttcccccatcgccagccacagcccactctcatatatgattccaatgtgaccgaccgcttgttgccacatcaaccagcaccaattaaagctgcatccacacgtacggacttcagatttgagagtcattcgatggcgatgggattgaaactgcacgaattacggccagtctcgatcgctcagcttgagctagctaagctatgttttttcattcgtgtccgaaaaccccttccgacatccgatcaaacgtccgatgtgacacccaaaatttttttttccctaactaaatacaccctaacttgtgaacgacgagccggtgaattgactgaccagaggcctcgagtaatagtagtagctagctacttcctccgtccaaaaaaaaaccaaact

SEQ ID NO: 35236 - DNA, 585 bp, Oryza sativa
  Clone ID: PAT_MRT4530_39176C.1
cccctggacctgtagagcgggcggcaattttttttttttggccacaggcgctttttaaactgccatcagcaaaagtacgagaaaatcaagattccaaaactatggacaaaccctacttgacaaggtgacatcaggaagggctgaaaggtgaggatatacacggcatggttttaacgtttctaaaggtccctacagcagactatgacaggagatcaaccacacaaaggaggagcagggcatacatcacgcgagccaaacggttttcgctcttcgaaacaggcgggggcataaaaggccatacaagacctaaggggctacccattatgtccatgaagacagcggagagggcacctggcaaggcgaccaaggaagaggagaaaagggcagatgctaaaactacctctaagggatagattctggattccctaacctcaaaagggaaatcgcccatccctttggactttcccttggaaacccccctaaaagctgctgtccgggtaccccgacaaacaaaaaccacgcaccaagggcacgggagggaagaccagaccggcattcacaaaccccaaaaagtccccaagaaaa

SEQ ID NO: 35237 - DNA, 120 bp, Oryza sativa
  Clone ID: PAT_MRT4530_39177C.1
atgctgggccagcccaccatgctgaggcagaggccgaggcatgacccaacggctaccccagtcgctgttgcgccctccaccttcactgcaccgttctcggaagccctaatgggcgattag

SEQ ID NO: 35238 - DNA, 283 bp, Oryza sativa
  Clone ID: PAT_MRT4530_39178C.1
gttcttttcctagctccgccgcctccgccgccttcaggagaggagaggtaagtcgaagatggtgtccggctccggcgtgtgcgcgccgcgcgtggtggtggactctcgccaccacatgcttggccgtctggcctccatcattcgccaaggagcttctcaacgggcagtgcgtggtggtcgtccgttgtgaggagatctgtatgtccggcggccttgttcgtcagaagatgtagttccttctttttttccgtaagaggatgaacaccaagttcttccatggtcc

SEQ ID NO: 35239 - DNA, 154 bp, Oryza sativa
  Clone ID: PAT_MRT4530_39179C.1
gaaacaattaaatgtccccagttctggttaaggttcgtccaggattcaactaagcatcacacttaacaaacattgatgaaacaactttccaaaaaaagggttagcacgagatatccggtgtccatatattaagaaaccccagggccctccaagg

SEQ ID NO: 35240 - DNA, 1479 bp, Oryza sativa
  Clone ID: PAT_MRT4530_3917C.1
atgggcgacgagcgcggcagtgggtggcacggcggggagtgccgcgccgcccccgccgccactcgcctcctccgcagcacctgcgccgccctgcctcaccgccgccgtctagcctcctccacccccgcctctcgcctcgccgccacgctcgccactctgctgccttgcctcctccggtgcccccaccgcgcctgccttgcctcgccgccgccgcctcgccttctccgtcccgccacgctcgcctctccgccgcctagcctcctccgcccccgccgcgctcgcctctccgtcgcaccccgcagccgcgccgcccccgccgccgctcgcctcctccgcagcacctgcgccgccctgcctcaccgccgccgcctagcctcctccacccccgcctctcgcctcgccgccacgctcgccactctgctgcctcgcctcctccggtgcccccaccgcgcctgccctgcctcgccgccgccgcctcgccttctccgccccgccacgctcgcctctccgccgcctcgcctcctccgcccccgccgcgctcgcctctccgtcgcaccccgcagccgcgccgcccccgccgccgctcgcctcctccgcagcacctgcgccgccctgcctcaccgccgccgcctagcctcctccacccccgcctctcgcctcgccgccacgctcgccactctgctgcctcgcctcctccggtgcccccaccgcgcctgccctgcctcgccgccgccgcctcgccttctccgccccgccacgctcgcctctccgccgcctcgcctcctccgcccccgccgcgctcgcctctccgtcgcaccccgcagccgcgccgcccccgccgccgctcgcctcctccgcagcacctgcgccgccctgcctcaccgccgccgcctagcctcctccacccccgcctctcgcctcgccgccacgctcgccactctgctgcctcgcctcctccggtgcccccaccgcgcctgccctgcctcgccgccgccgcctcgccttctccgccccgccacgctcgcctctccgccgcctcgcctcctccgcccccgccgcgctcgcctctccgtcgcaccccgcagccgcgccgcccccgccgccgctcgcctcctccgcagcacctgcgccgccctgcctcaccgccgccgcctagcctcctccacccccgcctctcgcctcgccgccacgctcgccactctgctgcctcgcctcctccggtgcccccaccgcgcctgccctgcctcgccgccgccgcctcgccttctccgccccgccacgctcgcctctccgccgcctcgcctcctccgccaccgccgcgctcgcctctccgccgcccccaccgcgctcgtctctcctctgcccccgctgctctccaccgccgccgccgccgcctcgcctcgccttgccgctgctgactccgcgtgcgcttgttgcctcggccgtcgccatcagaaggagaagagggagagacagtga

SEQ ID NO: 35241 - DNA, 2312 bp, Oryza sativa
  Clone ID: PAT_MRT4530_39180C.1
ggcacgaggaaaaaaagaaggcaaaaaaagaaaaaatctcaccacgagcagcacaagaactcctctcctctcttctcttctcccctactccttgattgaaaacccacgcatcctcctccttcccattgcgcattccggctagtcgcctcgccgatccctctcccgcccggcgcggatcgtcgtccccttcgcggaggaggtgttaatcattcttggaccaagaagtctgtctctgctttgtcagtaactagcaaccttggtgttctcatggctcattctcatgaaatgacgagtaggaaacctcctggtattcgattattcggaggcattacggtgctacggacgtaccagacacttgttttggtgcttacatttgtcgcgtatacttgctttcatatgactaggaagataccgagtattgttaagagcgtgcttgatccacagacaaagttggggtcctctccatggggacgactgcacacaaaaaacactcttaacatcggttggttgccgtttaacaccattgatggctcagcattgcttggtgagatagatgtggcgtttcttgcggtttattctgttgggatgttctttgctggacatcttggtgaccgcatggatttaaggatcttcctgacaattggcatgtttggaactgctgtgttcactgccctttttggtgctggatattggctaaatatccacaatttctactatttcctggtcattcagatgattgccggtttattccaagcaattggatggccttcagttgtcgcgattgttggaaactggtttggaaaaagcaagaggggattgattatgggcatttggaatgcacacacttctgtcggcaacatatctggttcactgctggctgcatttctgctgaagtttgggtggggctggtcatttgccatccccagcttaatcatggttgctgtcgggttgttggtgtttgtcttcttaccggttagcccagaggtgatggagatagacattgatgatggggagataagctctgttaaggatactaccaaggagcccctcttggaaccaggacaagaagtgaaacacaatgcagtaggtttcttagaggcttggaagatacctggagttgcgccctttgctctgtgcctcttcttctccaaattggttgcttacaccttcttgtattggctaccgttctacatcagtcatacacctattggcggtgagtacctctcagatgctttggctggcagcctatcaacaatctttgatgttggaggcgtgttgggtggagtccttgctggtcacatctcggatcgcttaaatgcacgagcggttacagctgccagcttcatgtactgcgcgatacctgccctcttcctataccgcacatacggcagcatgtcgataatgtggaacatttgcctcatgttcatcaccgggatgttcgtcaatggtccttatgccctaatcacaactgcagtgtcagctgaccttggcactcacagctcattgaatggaaattcccgggcattggctactgtgacagccatcattgacgggaccgggtctgttggcgccgccattgggccattgctgacaggctacatctcgtcgagtagttggagcgctgtgttcacgatgcttatggcagcagctctccttgctgggctcctcttgacacaacttgtgtgcagtgaactaaaaggaaaggcgacctccaatgcgagcaaggatgtcgccgatgctcaaggtacctactcagatgaggtgtaagactgtaagtaagatctagtcgcaccccaagacacgatacatggattagattctcgtagctccaaagcactgcttggcaagaagttgcattttattgcttcctgcacatgtcttgatcacctctggtttgaggctgaaataaccaaagagatgtggttaccaagtggtttgcttaatgcaactccagaaagaggtgcatgaaatagatagattagtttagtttcaggttcagagaatacaggggtgaaaacgcctcaaccaaagtttctgagcccaaatataggctcaggccgccttgtacatatactgggcaataggttatcattgtgttgtgtgtagtaagtataaattcaagcttgtatcctattgttgtagtttagggcagacaaagggaacctctcttgttcaaaggttacccaaagtctgtgtttgctggccatcttggcctcgttttgtatatgtaaagttgagaagattgagaaaattttgaattgaggtttcaagaaagtgaattgttctcattcaaaaaaaaaaaaaaaaaaaaa

SEQ ID NO: 35242 - DNA, 1752 bp, Oryza sativa
  Clone ID: PAT_MRT4530_39181C.1
atggatcccgaccacgtcgtcgccgccaccggcggcggcggcggcgagcgagctgcccaccagtaccatgtcactgacgacaccgatgctgccacggcatcggaagaagtcggcggcggcggcggctggcctcgcgcgctgctccggcgcgggtgggagctggcagggaaggccgccgtcgccggcgccgccgcgacggccgctccggtcgtcgtcccgcccgtcatgctcctcaccgccgccggcctcgcgctgtccctccccttcgccgcctacctcgccaccctcgccgccacccaccgcctcatggccgccctcctcccaccccacgaatccggcctcgacggcgccgccgtcgaacaagaactcctcgacgcgttctaccatttcagcacaacagatcaggaggaagacggcggcggcggcggcgtcggaatcggattggcatcgccgccgccatcggtggatgaaccagtttccttccaagaatcatctgtatcaagaaatgggggaaaaatcgaggacggcacaaccaaggagacagtgtcactgaccactgatgttcctgaatttcctgaattgcctgtggttgagacaagggaagaagatggagttattcctgtccagcaattaggccaagatcatcatcatactcatgtattggacacaggggataaagcagaggagtctaccatttccagtgtttccggaacaccagttgaaatattcactgacaaagacaatgtggagaagggagtggtcgaagacacagtagtcgtcgaggccgcggtagtggaacaattggcaagcaatgcgggtatcgtcgcgcaggagttggtcgacacgaacgtggcgattgttgctatttcagcgcccgaaaacgaggcgacgacaccgacgagtgaccttgtcgctcgcgtgtcagaggaagttgtgggaagttcatgtgatggtgagatgcaagaaaccgctgtggtggatgataccatgagggaactaagtgatgcaaacatggatgaagatgtgcaacaccatgatcaaagagttgtttgtagttctgtcttgatggcttctccattggctgttggtgattatgaggatgtaatgtccagcgggagcacacaagacatccctgaagtttgtgatgagacatcccagcctggtcaggagcatgatcagtctgatgggtttgaggcaaaagtaatttctggggacaagaaggagagcgttgctcccatccagcaacttgtaccggcaggtacagagataaatccatccgtccatgttagaagggatctctacaccgaagaacacgagacggggtcgcggtcaccgtgcccggagagggaggcaatgtcgcaggggctccactgctctccgcccctcggcttgctctgcgccgcgcgccgcctccctcaactctcgccgtctccgcacgccctgctcggctactcgccgccggccgcggcggtagtcaagatcgagccatcaaatcctgtgtttgccactggcattagatttggtggttttgtgatgggaggctcctcaattggggagggaactctgtctctcggtgacttcgttgcgtctgcaaaggccctgattgagaagtggaaggaagagggctacctagctctcgaaggagtataccgcaatcctggaggaaggcatgttagtatcgtcctcgtgagcatccccattttagtaggccatggttcactttgcatccctgtggaaccagtgactgtatga

SEQ ID NO: 35243 - DNA, 273 bp, Oryza sativa
  unsure (1)..(273): unsure at all n locations
  Clone ID: PAT_MRT4530_39182C.1
atccaggttgtctgcatatgatgataaatgaaacgcaatatacaaatagtagcacaatagcaaagaatcatttgctggtagagatcttataatgagttcagaacacataatatagtacatcattactagtttctaccgaacgtagaggccaataacacattgacatacctctgtctgctgatctatattaattgttgtttgactacaacttgccaaaacttttggagtaccacatcagtagaggcacaactcngtcctgatngtgcctgctgg

SEQ ID NO: 35244 - DNA, 260 bp, Oryza sativa
  Clone ID: PAT_MRT4530_39183C.1
atggaagcctgcttcagccagtacccttccgccactgcaaaacacacaggaaaacaagctattagtccaattacggcgacaacacagcacagctcaagtctgggacgaggaggcaggggagcaagggaggggcgggaggcgaggtggaggtccccgccgaagagcacgagaacgagccggaacccgacggccgccgcggccatcgaccagaagttccggatcgccatcgccgccgccgctgccgcaactccgatctgcgc

SEQ ID NO: 35245 - DNA, 127 bp, Oryza sativa
  unsure (1)..(127): unsure at all n locations
  Clone ID: PAT_MRT4530_39184C.1
tacttcgaagatgaggttgatgtcactcatgcaggatcagggtaacanctagctgaagagatgtacaggagttaggatnctagcgaaaatnctatcanctgtgtaacggtatgttgnncctcccctt

SEQ ID NO: 35246 - DNA, 618 bp, Oryza sativa
  Clone ID: PAT_MRT4530_39185C.1
gtagcgctctgccccagttttgatgctcttactcaagtttaccgccaatatcactccaccccagctcatgcttccagcaacagatgcttagcccatccggtgagttcttaagcgcacagtggcagcacagtggcaacccccttcttccaatcacccgtgtttcaactgagaaactgccaagtcatgcagcagcagtgctgccaacagctcaggatgatcgcgcaacagtctcactgccaggacattagcagtgttcaggcgattgtgcagcagctacagctacaacagtttgctggcgtctacttcgatcaggctcaagctcaagcccaagctatgttggccctaaacttgccgtcaatatgcggtatctacccaagctacaacactgctccctgtagcattcctaccgtcggtggtatctggtattgaattgtagcagtatagtagtacaggagagaaaaataaagtcatgcatcatcgtgtgtgacaagttgaaacatcggggtgatacaaatctgaataaaaatgtcatgcaattgcaaaaaaaaaaaaaaaaaaaaaaaaaaaaaaaaaaaaaaaaaaaaaaaaaagaaaaaaaaaaaaaaaaaaggggcggcc

SEQ ID NO: 35247 - DNA, 450 bp, Oryza sativa
  Clone ID: PAT_MRT4530_39186C.1
gatccttacccatccgtgattcttaagcacagtcagcacagtggcaaccccttcttccaatcacccgtgtttcaactgagaatactcccaagtcatgcagcacacagtggctgccaacagctcaggatgatcgcgcaacagtctcactgccagcccattaccagtgttcaggcgattgtcgcagcagctacagctacaacagtttgctgggcgtctacttcgatcaggctcaagctcaagcccaagctatgttggccctaaacttcccgtcaatatggcggtatctacccaagctacaacactgctccctgtagcattcctaccgtacggtggtatctggtattggaattgtaccagtatagtagtaccacggagagaaaaataaagtcatgcatcatcgtgtgtgacaagttgaaacatcgggtggataccaatgctggaataaaaatg

SEQ ID NO: 35248 - DNA, 1798 bp, Oryza sativa
  Clone ID: PAT_MRT4530_39187C.1
cgcggctcccggcgctgccgcgggggcgccgtccagcgacattctcacgccccccatctccttctccgcccgcttcttttcggcgacaagaacctctctactcgccgccgcttgcgtcgcgctcggcttcgcgcccttcgttctccgcctcctttgtgtgtgggggggaccggccggatagctggttgtggccgctgtccgtacggttcgaagctgtcactagttcttctcgtcgtcctcgggcgggcagaggttctcgcccaccaaaccggcacgccataactctcgggggggggaaggaggtcaggattgttgtggtggggaattggagggaaatggcgacggagtggtccgacggtggcgaggagttcttgctgccggatgagttcctcgacgacgacttcttctccgaggaggagaaggccgccgtggccgcgaggagcgatagcagcgacgaggaggattgcttggccggcctctcccgccgcctcgccgggcttcttggtgacgacggcgagcgcgacgcgcctcccaaggcggaggtgacggttggttcgccgcagtcgacgctgtgtgggctgcccaagtccggccaggagagcccgaacggcgggggcgtctcaggtgagctcgccgccgtcgtcgccgttggagcagaagccggcggacccgtgggacatgctctatgaggcggcaggtcaggtggcgcgcatgcgggtcaccaacagcatcccggtgccgaacaatccctacggcttccccgcccacggtggctttgccgctccggcgcgcaaggcctcgccgccgcctcccgtttctccaccggcaacaaaggtcgctcccgccgcctactaccatccgctcgcccagttgcttacacagcgccagattcaagccgcacagtttcatctcctcaagcagcagcagctgctgaagttgcagagggatcggcatctcgccgcggccgccgcgtggggcgcgaggcagacggcagcggcgaagaccgccgggtgcggagtcgccgcgtcgcctgtcgacatgaaccctgcggcgtggcctcccttgcagaagcagcagcacgcgccggcacccggagtcgggggtggcggcggcggcggcatgcgcgccgtgttcctcaccccgcccggcgccaagcgcgagcgcaacggcaccggcgtcttcctccctcgcccggccggcgcaccggcggagcccaagagaaagacaggctgctcgactgttcttgtccccgcccgtgtcgtgcaagcgctcaatctcaacctcgacgacctcggcgcccagcctcgctaccccggcggtttcgttctcgatcacgacgctttgattaaccggagcaacgccatgctggccagccagaagcggcgcgcgtctccagccgtgccgtcgccggcgccggcgcctgcgctctgccacagttcgtgaacttttttgtgtcggccggagcagacgaaggatgatgcaccaagattccggcggcccccttcttggctttgcgtcaagtttaatcatattaattaaagttagtaacagtacttcgtctgttaggtggtagtattagccaaagagggtagtaggaggcagtagtatcatcagcgttaggtttgtttgtttgattggtgatatattggttttttggtgtggacggaaagcggcggagacggagacggagacgacgtgcagtagaggaaatccatgtcttcggtttggtggtttggcagagtggtttggaaggaataataataagtggttcttttggagggcgaaaaaaaaaaaaaaa

SEQ ID NO: 35249 - DNA, 736 bp, Oryza sativa
  Clone ID: PAT_MRT4530_39188C.1
tctcctgtgctattgctgcatgtagcgccttctgccattgatcttgttactcaagtttacagccaatatcactgcacccgcatctcatgctgcagcaacagatggcttacgccccatccggtgagtttcgtaaggccaccagtccagccacagtgggcaaccccccttcgttccacatcacccgtgtttcaactgagagaactgccaagtcatgccagcagcaagtggctggccaacagcctcaggatgatcgcagcaacagtctcaactgccaggcccttagccagtgttcaggcgattgctgccagcaagctacagctacaacagtttgctggcgtctacttcgatcaggctcaagctcaagcccacagctatgcttgcccctaaacttgccgtcaatatgcggtatctacccacagctacaacacactgctccctgtagcattcctaccgtcggtggtatctggtattgaattgtagcagtatagtagtaccacggagagaaaaataaagtcatgcatcatcgtgtgtgacacagttgaaacatcggggtgatacccaatctgaataaaaatgtcatgccaatttaaacataatgcctctgtaaggataaatcctagtacattgttgaaattaattatcatcacccgtctactatggttgcatttacaactttaaaaaaaaaaaaaaaagaaagaaaaataaaaaaaaaaaaaaaataaaaaaaaaaaaaaaa

SEQ ID NO: 35250 - DNA, 810 bp, Oryza sativa
  Clone ID: PAT_MRT4530_39189C.1
cttgtgtgcatgcttcatcatcaccggttggagccgaagccggcgtagctgaccgcgggaaccgtggctcgggccgcctctacttcctctgctgccttggatcaacgtcgggaaccacgcatcgaacacctgcaagcgtcgccgctagccgcccctgtttcgtccgcactgagctgcgcgccgccgaacttcgccatcccgctgtctctcggtaaaacctcactcctatagctcctcctagtctagtacggagtagaagctaaatcccccaccagttttggcgattagcgcccttcggcgtgccgtcccggccgccgcttcgccatcggcgggctcgccgtgggtaggtcacctcgagcactctccttcccacctagctagcaaaacggaatcaccataagctgtacaagctcttgcgccaaactaattggttagagacctcgccatttgccgagtccccttgcaccctagagctcggccatggcggccatgccgcgccgccctgtgctgtggccgccggcgggaggtcgccggaccctcctccgcgcctcccctgaccgccgccgggtcgccctcgtccgggctgggccgcacgcgctgcgcctctgctctgctcgatggccggcgcgagggaaggctcatgtgttgggcaagtcgcgtagtacgggtaaagtgtacatccactacagtactggtggatcaacttctcgagaggcgagaaggggtagaccccagaaaactatgacaactagtggcgggaagctatccttgggaacacaatggatggtggacagaaccgtcgctgtataa

SEQ ID NO: 35251 - DNA, 1582 bp, Oryza sativa
  Clone ID: PAT_MRT4530_3918C.1
gtctggttcaatggttgattttgcatgtgatcaggatggttcccccatattagcagttagtagtttagcaattcactcaaagaatctctctgaaaatcctaaatgctcgcttctggttgccaaagaccctgaggacagaacagatactgtgattactgtatatggtgatgccacacctgtaatgctccagatactggcctgcctatacccttgattcttttctgtatgacactttcctatatcatattgttcatgttacgtaacaaatatagatctgttggtctttgtattatgtttgaaaggtttcaggaaaaagatgcggcgccaacgcgtccgcagcggtcgccaccatgcgcacgcctcctcctcctccaaccgcctattgcccactctcctccgtcctcctcgcgacggtttccgcggcggccgcctcatcgcctcctcctcctcctcctcctctcagatggcggcgcctgccgatgcaccgggcggatccgcggacgcgttcgaggtgatccgcgctcaccaggaaaaagctgctcgacttcctccggttgaagaaatacggaccattctggaccaaagtgttaggggtgtccttgccacccattctcagggtcatgttggctatccgtctggttcaatggttgattttgcatgtgatcaggatggttcccccatattagcagttagtagtttagcaattcactcaaagaatctctctgaaaatcctaaatgctcgcttctggttgccaaagaccctgaggacagaacagatactgtgattactgtatatggtgatgccacacctgtttcagaccaagaaaaagatgcagtacgaagtgcatacttacgaagacatcctgaggcattttgggttgattttggtgacttccgttttctgcacatcaagccaaaagccgtgcgatatgtgtctggggttgcaactgccatccttggttctggagaattcagtgctgctgagttcaaggaggcaaaagtggacccaatatctcaattctcaacccctattacgagccacatgaataaggatcattctgatgatacaaagctcattgtgcaatactcaaccactgtcaaggtggactttgcttacatgcttgatgtggatagtcttggtttcaatgtgaaggcgggctatgatggaagtgttctgaagctgcgtatccccttccctaggcgtgcacaggacaggaaggatgttaagacacttattgtggaaatgctccaagctgcaaaagcctcatcgtcttctgctgaatgaatgtcctgttctagaaagggacgtctttgtccttgtaaatgaaataaagatgtccttttcgatgagttttttctgatctaggaaatgtcatgtttttacacatgatatatcacaatgccacagcttaacaccgaacagatgccaatctacttgtatattatttacactgaaacgctccaccgtgtgtacatttcttacttgtcttaagtcttattggaactttggaagtctgcagatgcagctaccatcatctctcataaatactagcgaaatgtgtttttgggatagcatttcagc

SEQ ID NO: 35252 - DNA, 650 bp, Oryza sativa
  Clone ID: PAT_MRT4530_39190C.1
cttccccgtcgggcccggccccggccctcgcctatccgcctcctccccccgcgcccttcaccactcccaacccagctccctttctccacctaccggccccatccttctcacaactcaaacattacagcgaaagcataacaactagaatcctaccacaatgaagatcattttcttctttgctctccttgctgaagctgcatgtagcgcctctgcgcagtttgatgctgttactcaagtttacaggcaatatcagctgcagcaacagatgcttagcccatgcggtgagttcgtaaggcagcagtgcagcacagtggcaacccccttcttccaatcacccgtgtttcaactgagaaactgccaagtcatgcagcagcagtgctgccaacagctcaggatgatcgcgcaacagtctcactgccaggccattagcagtgttcaggcgattgtgcagcagctacagctacaacagttttctggcgtctacttcgatcaggctcaagctcaagcccaagctatgttgggcctaaacttgccgtcaatatgcggtatctacccaagctacaacactgtccctgagattcctaccgtcggtggtatctggtactgattgacgagatagagacagggaaataagcatgatcatcggggct

SEQ ID NO: 35253 - DNA, 508 bp, Oryza sativa
  Clone ID: PAT_MRT4530_39191C.1
caatcacccgtgtttcaactgagaaactgccaagtcatgcagcacagtgctgccaacagctcaggatgatcgcgcaacagtctcactgcaggccattagcagtgtttcaggcgatttgtgcagcagcctaacaagcttaaccaaaccacgtttttgcctgggccgttcttacttttcggaatccagggcctccaaagtccaaagccccaaagctatgtttggcccctaaaaaccttgcccggtcaaattatgccggtattctaaccccaagcctaacaacagcttgctcccctgtagcattcctaccgtcggtggtatctggtattgaattgtagcagtatagtagtacaggagagaaaaataaagtcatgcatcatcgtgtgtgacaagttgaaacatcggggtgatacaaatctgaataaaaatgtcatgcaaatttaaacataatgcctctgtaaggataaatcctagtacattgttgaaattaattatcaaaaaaaaaaaaaaa

SEQ ID NO: 35254 - DNA, 559 bp, Oryza sativa
  Clone ID: PAT_MRT4530_39192C.1
cggcgtacgcgtcgaatggtccacaaaattggctcctcacccttgcgcagatgcagcctccttttgcagttttgttttgctgcaggaaattcagatttgttttgttttggaaacattccgaaaaatccggtgcgtgaaaatggcgtggagtccggataagttacgcgcgacttatctggttcggtttacgcgggcgccctgatcaagcgacctaactctatacaaaccgagccgccgccttcacgcaacatacgcgaactcaatctagggtttgcctcctactctgtactgcatcgtggctcgtagactactccatcccgctcgccggcgtgcatcggcgatcaggagagcaggtctccggaacctctaccttcgacgtcctacaccgggagaaggcggcaataaggtttttgggaagcgcttcgcgcgactgctccatgttcgtccgtgacggctcgccttcctctccgctcgcgtgttgcgcgccttcatcgacgcccgcaaccgcgagtagttcctgccgagcaaccggtctttccgccacttttgtacgtgttcg

SEQ ID NO: 35255 - DNA, 501 bp, Oryza sativa
  Clone ID: PAT_MRT4530_39193C.1
gccaaccccctttcttccaatcacccgtgtttcaactgagaaactgccaagtcatgcagcagcagtgctgccaacagctcaggatgatcgcgcaacagtctcactgccaggcccattagcagtgttcaggccgattgtgccagccagctaccagctacaccagtttgctggcgtctacttcgatccaggctcaagctccaagccccaagctattgttggcccctaaaccttgcccgtccaaatatgccggtatctacccaagctaccaaccacctgcctcccctgtaagccattccctacccgtccggtggtatctggtattgaattgtagcagtatagtagtacagggagagaaaaataaagtcatgcatcatcgtgtgtgacaagttgaaacatcggggtgatacaaatctgaataaaaatgtcatgcaaatttaaacataatgcctctgtaaggataaatcctagtacattgttgaaattaaaaaaaaaaaaaaaaaa

SEQ ID NO: 35256 - DNA, 213 bp, Oryza sativa
  Clone ID: PAT_MRT4530_39194C.1
atggggcagtggcgaggcccggttgccttggacggtgaggcggcactgagggaggggggatcacggatgatggtgagcgattgccgaaggggcaccacgattcttcggcagcagatccatgggcggcctttccttgcctccgccatcgtcgcgaaggtcagggagaaggagaccgccccagcgattccggctggcattgccacgagcgcgtga

SEQ ID NO: 35257 - DNA, 3012 bp, Oryza sativa
  Clone ID: PAT_MRT4530_39195C.1
atggctggttttgccgatgcactgaggccggataaatttaccggtatgcactttaagagatggcagatcagggtcactctgtggctgacagctatgaaatgcttctgggtaagtactggcaagcctatgggcgttcttaatgctgatcagcagaaagaattcgatgaggccactactctctttgtgggatgcattcttagcgtgcttggcgatcgtcttgtcgagaacaagagcaaggggaaatacaaagctcagcagaccaccaacttcaagaagaagaagaacaataacaatcctaatcaggatgagaggacttgctttgtgtgtggtcaacctggctatctggcaagaaagtgtccacaacacaaggggatgaaggcacctgcagggcagacctctaagtctgccaatgtgaccattggcaacactggagatggaagcgggtatggggccaatatacatgtttgtgctgacatctcattgttttcttcttatcaggccgcacggggttccaccgtcctaatggggaatgggtcacatgattctatcgacaggaatcttgttagtggctcccgtctgactagagacggatttaagttggtttttgagtctaataaagtagtcgtgtctaaacatggatattttattggtaaaggttatgagtgcggaggcctgttctgcttttccctttttgatttctgcaataagtctgtgaaccatatttctggcagtgtggatgatgaggctaatggtggaaaacgatatttcatgacgttgattgatgatgctactagattttgctatgtgtacttgttgaaaacgaaagacgaggctctagactattttaaaatttataaggcagaagttgaaaatcaacttgacagaaagataaaaagactttggtctgatcgtggtggagagtttttctcaaacgagtttgacttattctgtaaggaacatggcattatacatgagaggacgcctccctattctcccgagtctaatgggattgctgaaaggaagaaccgcacactgaccgacttggtgaatgccatgttggacactgcgggactacctaaggcatggtggggggaggcattgttgacctcgaatcatgtgttaaacagagttcctaacagaaataaggacaaaacaccatatgagatatggattgggagaaaaccatcactttcttacttgcgcacatggggttgcttggcgaaaatcaatgtaccaataacgaagaagcgcaaacttggacctaagactatggactgtgtctttctgggatatgctcaccacagcattgcctatagatttttaatagttaaatctgaggtacctgacatgcatgttggtacaattatggagtctcgtgatgctatcttctttgagagctttttcccaatgaaggatacacatagtagttctagccaaccctctgaaataattcccagttcaatcacaccaccagaacaaactgaatatacacatgaatatgtcactaaggatgatgacagtgaagctcctcgaaggagcaaaagacaaaggatggctaagtcttttggtgatgatttcactgtgtacctcgtggatgacactcctaagtcaatttcagaagcatacgcatctcctgatgcagactactggaaggaggctgtccgtagtgaaatggattccattatcgctaacgggacttgggaggtgacagagcgaccctatgggtgtaaacctgtggggtgcaagtgggtgttcaagaagaagctcaggcctgacgcctcacatggtcttctcgttcatcaaatggacgttaagacaacttttcttaatggagagctggatgaggacatctatatgaatcaacctgatgggtttgtagttgaaggtcaagaaggcaaagtgtgcaaattgttgaagtctttgtatggtctgaaacaagctcctaagcaatggcatgagaaatttgacaaaacattgacatctgcaggctttgcagtcaatgaggtagataaatgtgtgtactatcaccatggtgggggtgagggagttattccgtgcttgtatgttgatgacatactgatatttgggacaaaccttgaggtgataaatgaggttaaatcattcttgtctcaaaattttgatatgaaggatttgggagtagctgatgttatcttaaacatgaagctaattagaagtgagaatgggattacactcttgcagtcccattatgtggagaagatcttgaatcgctttggctacattgataataagccttctccaacaccttatgatcctagtttgttgcttcgcaagaacaagagaattgctaggaatcaactgcaatactcccaaatcattggctcattgatgtacctggctagtgcaactaggcctgatatctcctttgctatgagcaagttgagccggtttacctctaatccaggagatgatcactggcgtgcgcttgagcgagtaatgcgctatctgaaaggtactatggaattggggtttcactattctgggtatcctacggtactggagggatatagtgattctaactggatctctgatatggatgagatcaaagccactagtggatatgtcttcacactgggtggtggtgctgtttcctggaggtcttgcaatcagactattttgacgaggtcaaccatggaagcagaactgacggcactggatactgctactgttgaggcagaatggctgcgtgatctattaatggatctgcctattgttgaaaaaccggtgccggctatccttatgaactgtgacaatcaaacggtaattctcaaagtgaatagttccaaggataatatgaaatcatctagacatgtgaaaagacaagtgaagtctgtcaggaaattgagaaactccggagttataacgttggattacatccaaacagctagaaacctggcagatcccttcacgaagggactatcacgaaatgtgatagataatgcatcgaaggagatgggtttgagacccatgtga

SEQ ID NO: 35258 - DNA, 621 bp, Oryza sativa
  Clone ID: PAT_MRT4530_39196C.1
gccgcagtttgatggctcttactcaagtttaccgcaatatcagctgcaccgcagctcatgctgcagcaacagatgcttagcccatccggtgagttcgtaagccacagtgcagcacagtgccaacccccttcttccaatcacccgtgtttcaactgagaaactgccaagtcatgcagcagctgtgctgccaacagctcaggatgatcgcgcaacagtctcactgccaggccattaccagtgttcaggcgattgtgcagcagctacagctacaaccgtttgctggcgtctacttcgatcaggctcaagctcaagcccacagctatgttggccctaaacttgccgtcaatatgcggtatctacccacagctacaacactgctgccctgtagcattcctaccgtcggtggtatctggtattgaattgtacccagtatagtagtacccggagagaaaaataaagtcatgcatcatcgtgctgtgaccagttgaaacactcggggtgataccaatctgaataaaaatgtcatgccaatttaaacataatgcctctgtaaggataaatcctagtaccttgttgaaattaattatcatccccgtctactatggttgccatttaaaaaaa

SEQ ID NO: 35259 - DNA, 343 bp, Oryza sativa
  Clone ID: PAT_MRT4530_39197C.1
ttttttttttttttttttttttgatctgtaagaaatgcatcacagattagaaggaaatgcatcacagattacaaatacatcacatcacaaaatctcaaacaaaaaatacatcacaaatcctaaaagaaatacatcacaactcaaatacatcacagatcagatccaatatcacatacatcacagatcaaatccaatgaatcacaaattcaaaaaaattcacaaattaaaaaaaaatccggctgcagataagagggcgccgccggcctcaaggtctccatgctgtatgatacagatccaacttattttcatatgcttgccagtcaatttaccatatcacttgggg

SEQ ID NO: 35260 - DNA, 4921 bp, Oryza sativa
  Clone ID: PAT_MRT4530_39198C.1
ttaaactggtcctggatatgcagagctatgaggcctctcattctggttctcattgtccggaaagatgtatgcataacagtcaaacatgtccatagagccgtcaccaataacattctgcggtacatttgctggtccgatcatgttgttgcctccataagaggtaccctgaagaaagaatgacccgttagcattcaaggagtgtggaacaacacaaagatactcgatactatgatctgaacaatcagaggcagtcttgttttcatggcgtacatacaatttgttaactgttgttaaagcttgaaagccatgtaaaaagtgttgtccaaaatcattattgttgttaggaaatgcttgaggcagttcatgtgcatgataaatctcagctcctgcaataccctgaacttgaaatgtaacatgcaaatctggaggattttgtgctgtgtcaatgaagggaatgtaagcatcatcactgagcgtcatcaccggatagttatttttcatttcgtgatcaaagccaatgctatccagctcatcatatgcttgtttcttcaaacgattcactgcatcctgttgatctgaactgaaattgtcctttgcaacatagtgatcacgaaatttcgcaccaacgaggtcatgcacgcagttaaagaagagtacaacatgctgctcttcagctctatataatttcagcttgcaattcccttcaagatcacactctttagcatgtttaattgtatctttccaaagcttattatccttctttagcttgaaacactcattgtaaatacaattgcggatcttttcttcatccttatttaaagcctttacgaactcttccacagtgttgatttgattatctttaagccatttggtgcggcatccctttcctgaaattccctttaaacgatgtacttcatcttttagcttcggacggtcactacttctatttagtttgtttcggtaaacctgcaccacaacaggattcatcatcacagcttccttaattcgaagcccaccaatgtcacttgtatgaacttttgctgctagaatgagccttccactttcagtcttcgaagatggtatattgaaaaatacatcagaaggagaggcctccccattcttcagcttgacttgacaaacccctcctaacgcgggaccttgtgaactacttactatgcggtgatcaaactcagattcggtccaattatcagggacaacatcataaaagttaccatggagagccaaaatttcaattcttgcagaagaaagtggaccagatgtaattatctgattatccctaactatggcaattttgatagctgtaccatcctccgctgtaattttttcctttgtaaaaacaagagggttcaacttattgaggaacctcaactcaactctttgcccctcctgagcttcactcgcgacaaatctagcagctgtttgttcttgattcacttcctcagtgatggcagcagactcttgatttgcctttgatctgtattgctgattagcatgatggttagaatttgaatgtttgatttgttccacttcatggctgagaatatcagtgcgcttgttaagggattgaagggagcggtaaattggatcaagatgcttctggaaggcattgtcaaatgctttctgaaagacacaatcaaatgtttcgattgccctttgctgggaaatagcattctctccacgtatcactcgacgaagtcgctggttgtatctcatctcctccttgacttgcgcgacgaagaagaggacgagcatgccggagcgaagctgccgcttcccccgcggcgacgccacgccgccgccgccgccggcagcagcatccacatgcgggcgcttgggcgcgggcaccaggacaagcccagctggtggcgcctgtgccggcagcggacgcttcgtgtgcatatcgccggataagtatgcaatgcaatgccacggatgcatgtgccacagaagttttggtactgcacttaaacacaagagacatgaattccccgttgaggggttgatagcgtcccttgatgttgaggagaaagctcgggaaaaagacgccgcgtctgagggcgatggtgggcagtccagtgccaatgttgtgcacaaggcccagaacaagagcaaggggaaatacaaagctcaacagaccaccaacttcaagaggcagagaagaacaacaacaatcctaaccaggatgagaggacttgctttgtgtgtgggcaacctggtcgcacggggttccactgtcctaatggggaatgggtcacatgcttctgttcatggtgttggcacggtagatctgaagtttacttcgggaaagatcgtgcagctgaagaacgtgcagcatgtcccttctatcgacaggaatcatgttagtggctcccgtctgactagagacggatttaagttggtttttgagtctaataaagtagtcgtgtgtaaacatggatattttattggtaaaggttatgagtgcggaggcctgttccgcttttccctttctgatttctgcaataagtctgtgaaccatatttgtggcagtgtggataatgaggctaatgtttggcactcacgtttatgtcatattaattttggtttgatgtctcggctttccagcatgtgtttaattcctaagttttccattgtcaaaggttctaagtgccatagttgtgtgcaatcgaagcaacctcgcaagcctcacaaggctgccgaggagagaaacttggcaccactagaactcctacattcagatctttgtgaaatgaatggggtgttgacgaagggtggaaaacgatatttcatgacaaagataaaaaggcttaggtctgatcgtggtgaagagtttttctcgaacgagtttgacttattctgtgaggaacatggcatcatacatgagaggacgcctccctattctcccgagtctaatgggattgctgaaaggaagaaccgcacactgactgacttggtgaatgccatgttggacaccgcgggactacctaaggcatggtggggggaggcattgttgacctcgaatcatgtattaaacagagttcctaacagaaataaggacaaaacaccatatgagatatggattgggagaaaaccatcactttcttatttgcgcacatgggggtgcttggcgaaagtcaatgtaccaataacgcagaagcgcaaacttggacctaagactgtggactgtgtctttctgggatatgctcatcacagcattgcctatagatttttaatagttaaatccgaggtacctgacatgcatgttggtacaattatggagtcccttgatgctaccttctttgagagctttttcccaatgaaggatacacatagtggttcgagccaaccctctgaaataattcccagttcaatcacaccaccagaacaaattgaacatacacatgaacatgtctctgaggaggatgtctgtgaagctcctcgaaggagtaagagacaaaggacggctaagtcctttggtgatgatttcactgtgtacctcgtggatgacactcctaagtcaatttcagaagcatatgcatctcctgatgcagactactggaaggaggctgtccgtagtgaaatggattccattatcgctaacgggacttgggaggtgacagagcgaccctatgggtgtgaacctgtggggtgcaagtgggtgttcaagaagaagcttaggcctgacggtactattgaaaagtacaaggctcggcttgttgctaagggctatactcagaaagaaggcgaagatttctttgacacttactcacctgttgctagattgaccacaattcgtgtgctactttccctagcagcttcacatggtcttctcgttcatcaaatggacgttaagacagcttttcttaatggagagctggatgaggagatctatatggatcaacctgatgggtttgtagttgaaggtcaagaaggcaaagtgtgcaaattgttgaagtctttgtatggtctgaaacaagctcctaagcaatggcatgagaaatttgacaaaacattgacatctgcaggctttgcagtcaatgaggcagataaatgtgtgtactatcgccatggtgggggtgagggagttattctgtgcttgtatgttgacgacatactgatatttgggacaaaccttgaggtgataaatgaggttaaatcattcttgtctcaaaattttgatatgaaagatttgggagtagctgatgttatcttaaacattaagctaattagaggtgagaatgggattacactcttgcagtcccattatgtggagaagatcttgaatcgctttggctacattgatagtaagccttctccaacaccttatgatcctagcttgttgcttcgcaagaacaaaagaattgctaggaatcaactggaatactcccaaatcattggctcgctgatgtacctggctagtgcaactaggcctaatatctcctttgctgtgagcaagttgagccggtttacctctaatccgggagatgatcactggcgtgcgcttgagcgaataatgcgctatctgaaaggtactatggaattggggcttcactatattgggtatcctgcggtactggagggttatagtgattctaactggatctctaatgtggatgagatcaaagccactagtggatatatcttcacattgggtggtggtgctgtttcgtggaggtcttgcaaacagaccattttgacgagttcaaccatggaagcagaactgacggcactagatactgctactgttgaggcagaatggctgtgtgatctattaatggatctgcctattgttgaaaaaacggtgccggctatccttatgaactgtgacaatcaaacggtaattgtaaaagtgaatagttttaaggataatatgaaatcgtctagacatgtgaaaagatga

SEQ ID NO: 35261 - DNA, 788 bp, Oryza sativa
  Clone ID: PAT_MRT4530_39199C.1
ctcgggccggccgggatccttctccaactcaaacattacagcgaaagcataacaactagaatcccaccacaatgaagatcattttcttctttgctctccttgctattgctgcatgtagcgcctctgcgcagtttgatgctgttactcaagtttacaggcaatatcagctgcagccgcatctcatgctgcagcaacagatgcttagcccatgcggtgagttcgtaaggcagcagtgcagcacagtggcaacccccttcttccaatcacccgtgtttcaactgagaaactgccaagtcatgcagcagcagtgctgccaacagctcaggatgatcgcgcaacagtctcactgccaggacattagcagtgttcaggcgattgtgcagcagctacagctacaacagtttgctggcgtctacttcgatcagactcaagctcaagcccaagctatgttggccctaaacttgccgtcaatatgcgatatctacccaagctacaacactgctccctgtagcattcgcaccgtcggtggtatctagtactgaattgtagtagtatagtagtacaggagagagaaataaagtcatgcatcatcgtgtgtgacaagttgaaacatcggggtgatacaaatctgtataaaaatgtcatgcaagtttaaacaaataaaaaaaaaaaaggtcggccgccgcaaacccggggcgcgagcccgggcggagcgcccgtcggtcagatcttggtggtagtacaatattaaattaaaagataatgattaaaaaaaaaaaaaaaaaaaa

SEQ ID NO: 35262 - DNA, 327 bp, Oryza sativa
  Clone ID: PAT_MRT4530_3919C.1
atggctgctgaggagaaagcctctccctcgtcgcctccactgtggcgccaaaaggactccctcttccgctgggtcgcaatcaccaaggacccactaggccctgtcctagagcagtgcttggatatccccacgacgctccctaacctccgccacaacgcctccctcaacacacccctactcgactcccatggacgcttcgtctttgtattagcgctcccttattgggacaccgtcgcgatggaggttgtcgccgtcggccacctcccacagacaagctcgccaaccactagctctttccccgccagcaaactcgaagagaggagatag

SEQ ID NO: 35263 - DNA, 377 bp, Oryza sativa
  Clone ID: PAT_MRT4530_391C.1
atcgggggaacgcgctcttaaccacagggggggggaataggaggggacagttcatggaccgcgccaagacaccgacagtaacactggacatggttgcgcagcgcagtgcaattcatggcacatacaagctcaagtcgcgggagacggagaaaccggagcagcacgccgaccaagatgtgaaagctgacaggagcctgtcttgctagctggagtacgacagatcgacccaggaggcagaaaagggcaaaagtaaagacagtgtataaccgccgcacaagggagattcatctactcccacagacttgtgcggagacacgcagttaccagattagtcgagaacgaagttgcagaccataccgaggaggagtccctggcca

SEQ ID NO: 35264 - DNA, 3471 bp, Oryza sativa
  Clone ID: PAT_MRT4530_39200C.1
atggctcgccttcctctccgctcgcgtgctgcacgccttcatcgacgctcgcaaccgcgagtagttcctgccgagcaatcagtctttccgccacctcggcgctatgattttactatggctgtttttgccgatgcactgaggccggataaatttaatggtgtgcactttaagagatggcagatcagggtcactctgtggctgacagctatgaaatgcttctggaaagaattcgatgaggccactactctctttgtgggatgcattcttagcgtgcttggcgatcatctggtcgaggtgtatatgcatatgaccgacgctaaggagttgtgggatgcattgaatactaaattcggtgctactaatgctagcaatgatctgtatatcatggagcagtttcatgactacaagatggctgacaaccgttctgtagtcgaacaagctcatgagatacaaaccatggctaaggaactcgaactccttaagtgtgtcttacccgacaaatttgtggtcgggtgcattattgcgaaactacctccatcttggagaggtttcggtactgcactcaaacacaagagacaggaatactccgttgaggggttgatagcgtctcttgatgttgaggagaaagctcgggaaaaagatgcggcgtctaagggcgatggtgggcagtccattgccaatgttgtgcaccaggcccagaacaagagcaaggggaaatacaaagctcagcagaccaccaacttcaagaagaagaagaacaacagcaatcctaatcaggatgagaggacttgctttgtgtgtggtcaacctggccatctggccaggaagtgtccacaacgcaaggggatgaaggcacctggagggcagacctctaagtttgctaatgtgaccattggcaacactggagatggaagcgggtatggtaatttacctactgttttttcagttaaccagtctactaattggtgggttgatacaggggccaatgtacatgtttgtgctgacatctcattattgtcttcttatcaggtcgcacggggttctaccgtcctaatggggaatgggtcacatgcttctgttcatgatgttggcacggtagatctgaagtttacttcgggaaagatcgtgcagctgaagaacatgcagcatgtcccttctatcgacaagaatcttgttagtggctcccgtctgactagagacggatttaagttggtttttgagtctaataaagtagtcgtgtctaaacatggatattttattggtaaaggttatgagtgcggaggcctgttccgcttttccctttctgctttctgcaataagtctgtgaaccatatttgtggcagtgtggatgatgaggctaatgtatggcactcacgtttatgtcatattaattttggattgatgtctcggttttccagcatgtgtttaattcctaagttttccattgtcaaaggttctaagtgccatagttgtgtgcaatcaaagcaacctcgcaagcctcacaaggctactgaggagagaaacttggcacctctagaactcctacactcagatctctgtgaaatgaatggggtgttgacgaagggtggaaaacgatatttcatgacgttgattgatgatgctactagattttgctatgtgtacttgttgaaaacgaaagacgaggctctagactattttaaaatttataaggcagaagttgaaaatcaacttgacagaaagataaaaatacttaggtctgatcgtggtggagagtttttctcaaacgagtttgacttattctgtgaggaacatggtattatacatgagaggacgcctccctattctcccgagtctaataggattgctgaaaggaagaaccgcacactgaccgacttgtctcgtgatgctaccttctttgagagctttttcccaatgaaggatacacatagtagttctagccaaccctctgaaataattcccagttcaatcacaccaccagaacaaactgaacatacacatgaacatgttactaaggaggatgacagtgaagctcctcgaagtagcaaaagacaaaggacagctaagtcttttggttatgatttcactgtgtacctcgtggatgacactcctaagtcaatttcagaagcatacgcatctcttgatgcagactactggaaggaggctatccgtagtgaaatggattccattatcactaacgggacttgggaggtgacagagcgaccctatgggtgtaaacctgtggggtgcaagtgggtgttcaagaagaagctcaggcttgatggtactattgaaaagtacaaggctcggcttattgctaagggttatactcagaaagaaggcgaagatttctttgacacttactcacttgttgctagattgaccacaattcgtgtgctactttccctagcagcctcacatggtcttctcgttcatcaaatggacattaagacagcttttcttaatggagagctggatgaggagatctatatggatcaacgtgatgggtttgtagttgaaggtcaagaaggcaaagtgtgtaaattgttgaagtctttgtatggtctgaaacaagctcataagaaatggcataagaaatttgacaaaacattgacatctgcaagctttgcagtcaatgaggcagataaatgtgtgtattatcgccatggtgggggtgagggagttattctgtgcttgtatgttgatgacatactgatatttgggacaaaccttgaggtgataaatgaggttaaatcattcttgtctcaaaattttgatatgaaggatttgggagtagctgatgttatcttaaacattaagctaattagaggtgagaatgagattacactcttgcagtcccattatgtggagaagatcttgaatcgctttggctacattgatatattggagggatatagtgattctaattggatctctgatgtggataagatcaaagctactagtggatatgtcttcacactaggtggtggtgctgtttcgtggaggtcttgcaaacagactattttgacgaggtcaaccatggaagcagagctgacggcattggatactgctactattgaggcagaatggctacgtgatctattaatggatctgcctattgttgaaaaaccggtgccgtctatccttatgaactgtaacaatcaaacggtaattgtcaaagtgaatagttctaaggataatatgaaatcgtctagacatgtgaaaagacgattgaagtctgttaggaaattgagaaactccagagttataacgttggattacatccaaacagctagaaacctggcaaatcccttcacgaagggactatcacgaaatgttatagacaatgcatcgaaggagatgggtttgagaccatgtgagttatactatggtggtaacccagtcaatgtgatcggtgatcggagatcccgtagattagaacctgggaagaacaaaccattagtaaactag

SEQ ID NO: 35265 - DNA, 737 bp, Oryza sativa
  Clone ID: PAT_MRT4530_39201C.1
ccggccggatccttctcacaactcaaacattacagcgaaagcataacaactagaatcccaccacaatgaagatcattttcttctttgctctccttgctattgctgcatgtagcgcctctgcgcagtttgatgctgttactcaagtttacaggcaatatcagctgcagccgcatctcatgctgcagcaacagatgcttagcccatgcggtgagttcgtaaggcagcagtgcagcacagtggcaacccccttcttccaatcacccgtgtttcaactgagaaactgccaagtcatgcagcagcagtgctgccaacagcttaggatgatcacgcaacagtctcactgccaggccattagcagtgttcaggcgattgtgcagcagctacagctacaacagtttgctggcgtctacttcgatcaggctcaagctcaagcccaagctatgttggccctaaacttgccgtcaatatgcggtatctacccaagctacaacactgctccctgtagcattcccaccgtcggtggtatctggtattgaattgtagcagtatagtagtataggacacaaaaataaagtcatgcatcatcgtgtgtgacaagttgaaacatcggggtgatacaaatctgaataaaaatgtcatgcaagtttaaacataatgcctctgtacggataaatcctagtatattgttgaaattaattatcatcaccggcaaaaaaaaaaaaaaaaaacccgcggcc

SEQ ID NO: 35266 - DNA, 3572 bp, Oryza sativa
  Clone ID: PAT_MRT4530_39202C.1
gcgcgtgcacgacgtacgtgtcgaatggtccgccaaaattggttcttcaccttgcgcagatgtagcctccttttgcagttttgttttgctgcaaattcggattcgtttttgttttggaaacgttccgaaaaaatccggtgcgtgcaaacggcgtggagtccggataagttacgcgcgacttatgcgggtcggtgtggagtccggataagttacgcgcgacttatccggttcggttacgcgcagtggagatcgtgcgggcgccctgatcaagtgacccttctctatataaaccgacccgccgtcttcacgcaacacacgcgaaatcaatctagggtttgcctgctactttgtactgcaccgtcgctcgtagattattccatcccgctcgccggcgtgcacctgcgatcgggagagcaggtctccggaacctttgccttcgacatcctgcaccgggagaaggcggcaataaggtttttgcgaagcgctttgcgagactgctccctgttcgtccgcgacggctcgccttcctcttcgctcgcgtgctgcgtgccttcgtagacgctgcactcaaacacaagagacaagaatactccgttgagggcttgataccgtctcttgatgttaaggagaaagctcaggaaaaagatgccgcgtctaagggcgatgttaatcagtctactaattggtgggttgatactggggccagtgtacatgtttgtgctgacatctcattgttttcttcttatcaggtcgctcggggttccaccgtcctgcatgttcatggtgttggcacggtagatctgaagtttacttcgggaaagatcgtgcagctgaagaacgtgcagcatgtcccttctatcgacaggaatcttgttagtggctcccgtctgactagagacagatttaagttggtttttgagtctaataaagtagtcgtgtctaaacatggatattttattggtaaaggttatgagtgcggaggcctgttccgcttttccctttctgatttctgcaataagtctatgaaccatatttgtggcagtgtggatgatgaggctaatatttggcactcacgtttatgtcatattaattttggcttgatgtctcggctttccagcatgtgtttaattcctaagttttccattgttaaaggttctaagtgccatagttatgtgcaatcgaagcaacctcgcaagcctcacaaggctgccgaggaaagaaacttggcaccactagaactcctacattcagatttttgtgaaatgaatagggtgttgacaaagggtggaaaacgatatttcatgacgttgattgatgatgctactagattttgctatgtgtacttgttgaaaacgaaagacgaggctctagactattttaaaatttataaggcagaagttgaaaatcaacttgacagaaagataaaaagacttaggtctgatagtggtggagagtttttctcaaacgagtttgacttattctgtgaggaacatggcatcatacatgagaggacgcctccctattctcttgagtctaatgggattgctgaaaggaagaaccgtacattgactgacttggtgaatgccatgttggacactgcgggactacctaaggcatggtggggggaggcattgttgacctcgaatcatgtgttaaacagagttcctaacagaaataaggacaaaacaccatatgagatatggattgggagaaaatcatcactttcttacttgcgcacatgggggtgcttggcgaaagtcaatgtaccaataacaaagaagcgcaaacttggacctaagactgtggactgtgtctttctgggatatgcttatcaaagcattgcctataaatttttaatagttaaatctgaggtacctgacatgcatgttggtacaattatggagtctcgtgatgctaccttctttgagagctttttcccaatgaagaatacacatagtagttcgagccaatcatctgaaataattcctagttcaatcacaccaccagaacaaactgaacatacacatgaacatgtcactgaggaggatgacagtgcagctcctcgaaggagtaagagacaaaggacggctaagtcttttggtgatgatttcactgtgtacctcgtggatgacactcctaagttaatttcagaagcatatgcatctcctgatgcagactactggaaggaggctgtccgtagtgaaatggattccattatcgctaacgggacttgggaggagacagagcgaccctatgggtgtaaacctgtgggatgcaagtgggtgttcaaaaagaagcttaggcctgacggtactattgaaaagtacaaggctcggcttgttgctaagggctatactcagaaagaaggcgaatatttctttgacacttactcacctgttgctagattgaccacaattcgtgtgctactttccctagcagcctcacatggtcttctcgttcatcaaatggacgttaagacagcttttattaatggagagctggatgaggagatctatatggatcaacctgatgggtttgtagttgaaggctttgcagtcaatgaggcagataaatgtgtatactatcgccatggtgggggtgagggagttattctgtgcttgtatgttgatgacatactgatattttggacaaaccttgaggtgataaatgaggttaaatcattcttgtctcaaaattttgatatgaaggatttgggagtagctgatgttatcttaaacattaagctaattagaggtgataatgggattacactcttgcagtcccattatgtggagaagatcttgaatcgctttggctacattgatagtaagccttgtccaacaccttatgatcctagcttgttgcttcgaaagaagaagagaattgctaggaatcaactggaatactcccaaattattggctcgctgatgtacctggctagtgcaactaggcctgctatctcctttgctgtgagcaagttgagccggtttacctctaatccgggagataatcactggcgtgcgcttgagcgagtaatgcgctatgtgaaagatactatggaattggggcttcactattctgggtatcctgcggtactggagggatatagtgattctaactggatctctgatgtcgatgagatcaaagccactagtggatatgtcttcacactgggtggtggtgctgtttcgtggaggtcttgcaaacagaccattttgacgaggtcaaccatggaagcagagctgacggcattggatactactactgttgaggcagaatggctgtgtgatctattaatggatctgcctattgttgaaaaaccggtgccggctattcttatgaactatgacaatcaaacggtaattgtcaaagtgaatagttctaaggataatatgaaatcgtctagacatgtgaaaagacgatcaaagtctgtcaggaaattgagaaactccggagttataacgttggattacatccaaacagctagaaacctggcagatcccttcacgaagggactatcacgaaatgtgatagaatatgcatcgaaggagatgggtttgagacccatgtga

SEQ ID NO: 35267 - DNA, 1344 bp, Oryza sativa
  unsure (1)..(1344): unsure at all n locations
  Clone ID: PAT_MRT4530_39203C.1
atggcctcctacgacggcggcggcgacggccaccgcggccgcccgcccccgcagcagcaccgcccgtcgtccggcggcggaggcgggggcggaagcggcgacctggcgtcgagcgccaagctggtggcggaggcggccaagtcggtgttccaggaccacaacctggagaaggtcgacaagggccgcgtcgcgggcgccgccgccgaactcctccacgccgcctcccagtacggcaagctcgacggcaagcccgctggcaactacctcgagaagtggcgaggggtcggagggcagcatgggagaatacctgaaactggcacaaggtctcgatgaagaagcaaggcggtgagggggagagcggtggcggcggtatgggtgactacttaaagcttgcggaggggttcttgaagaagcgctgatttgtaactgaatctatgatgtctcatgaattgtgaaggaccttgctggtgtttggttagtttcctgttctacttaatgcccaaatggtgtgaaatcatgtacgatctccatccggttatacaataaaactgtcttggtcagttgagcagtggttgtggtgatggctatggaggaggaagatatgaggaagaagatgaatatagaaagaagccgagtgggggtggctatggtggggggaggtatgaggaagaagaagatgattacatgaagaagccgagtgccggtgcgggtggatatggaggtggtggaaggtatgaggatgagtacaagaagaagcctggtggtggtcatggtggagggaggtatgaggaggatgatgagtacaacaagaagcctagtggtggatatgggtatggtgcttcaagtggtggaggccatggtgggaggtatgaagaagatgactacaagaagaagcctagcgcgcactccggtggcggcggtggcaggtatgaggaagaggaagggtacaagaagcctagtggccatgggggagggaggtatggtaaggaggaagaggaagatgacaagaagaaaaagaagcatggcgaggggtcggagggcggcatgggagactacctgaaactggcacaaggtctcatgaagaagcaaggcggtgagggggagagcggtggcggcggtatgggtgactacttaaagcttgcggaggggttcttgaagaagcgctgatttgtaactgaatctatgatgtctcatgaattgtgaaggaccttgctgtgtttggttagtttcctgttctacttaatgcccaaatggtgtgaaatcatgtacgatctccatccggttatacaataaaactgtcttggtcagttggtcaaaaaaaaaaaaaaaaaaaanaaaaaaaaa

SEQ ID NO: 35268 - DNA, 1702 bp, Oryza sativa
  unsure (1)..(1702): unsure at all n locations
  Clone ID: PAT_MRT4530_39204C.1
ggaggcaaagggtgttacnnnnnnnggaatgttaataatcatttctagatgattagagttccttcaagtatgttagagggcaaatacagccaccgttatcattgaaggaaaggcgccctgcgccttgtgacctgaacttttcgcagcctaagaagaggcccttctcagggacatgttcagtacatccatttttggcatgccaatgccccatcgatgatttcttttgaccggtgatctacacaggcgctttcacaaacacaatcctcaaaatccaacactttgccagttgttactaacaagcaacgccgttcctgcccatgtgatcaccagcagaaaccatttgggccccgacggccatatcttcactttcactatctgatgcatcgtcaagtctggctatagcatcgagtaatgactgctcctggtcttgcaaaagtttcttggccttttcgatctcacccatatttggattggacaaaaccctctccacctctatgacaacacttcgagtgttaggtacatcaatgtgaccaatattcctgttaattccattttggggaggagcactatccttagtaggctcatttcgagaaaaccttcctcctcccctacttgccattgccattgtaccgttgttgcctgggtgcctcctcatcccaggatgaggaccccaaccatctcgatttgagatgccttgatcatcaaggtcccatattatatcttcaggtgccaaatcactaagtctgactgactcccaagtctgggctactgtgcccatgtcatagacgagagcatgtttacccgtagcaggattatagtcagttatagtggcctcatagaagttattgtcatctggccatcttgtataaattttccggttaatcaatgaagttggatccgcggatggcacagcgagtggtgtattcgtcctagtcttcttgccctttgttcctgaaaatggtccccactttgtagatgaaggaactgagggagaaggcatcgcaggggactggaggccagcagaatgtgaaggaatagaaaggggtgtcctttgcctctttgcagctgggccaggttctgtatcatgaaaaattctgctgccacgatgctgtgcactcagggatccacctccctgtctaaactccctcattctgcggatggccacatcttcattaactttgtttaatagttccctgtgttcatcatcagagactcttaattctttcctgagttcagtgatcaaactttctttttcccaggatatagcatcagattgcactttaaatgctctaagaacaccagtgtacgcctcttgctcaacctgatgtatttcactctccaaatcaccgtgcggcctaatgtaagaaaatggcataacagatgccctgccattcgcactaaaagatcgcactcttaatcctctattttgtgttggagggagatcgtcgtcagtcccgctggaatcgtaggggttattgtaccccatggccttcatgaacacccgccgggacgcgcgacggtgtggaaccctagaaaacccgccgcggcgcgattcctccggatccgggcaccgcggcaacgccccccgctcgaatccggagatgcagcggccggatcgagcaccgcctcgaccgattcgggaggtttagggcttggaatcggatggggatttggggggcgatgggaagccagaattcctgca

SEQ ID NO: 35269 - DNA, 4464 bp, Oryza sativa
  Clone ID: PAT_MRT4530_39205C.1
atgccgctgcggcgcggagccctccctccccgcgcccctcttcggccggcacccggcggtctctgcggccgcgcgctcctccgccggacctgcagcctctcgtggccggcgacgacgggcggagcggcgctcaggcatacaaaatacaagaatttggcagatctctactatgcagaagatttggtagttgacttgatatctgcactctatagttaccagatgaaaaattctagatggaagccagtatttgccttggaaacaggtggaccatctaatgctgatagccaagacttcgaagatgatggtggctttcttggtagaacaaggctgggaaggctcatccaagctgctgggagggaactacttgaaaagctgaactctgccagaagcaactcccccacgaagatattccttgtgctgtttggcttctataccgccaacgcattggcaacaatcctagggcagactggtgactgggatgttcttgtggctggtgttgtagtggctgccatagagggaattggcatgcttatgtacagaaaaccgatgagtagacctcctggacgattccagtcattgattgcaatggtgaactactggaaagccggcgaggcaaaggtgagagagtgtctcggtgaccggcgacggcgaggcgagctagatgctggttgggaatggtggatcgtggaaggagatgagctcctactcgacatcatctgtcatagtccactcggcatcggcgcgctcctatgggtgtggcgcatccacacggttcacgctgcagcatatagtcagagggtgacgatccagctcccgacaatgggtcttgaaagcagggacgccacaagtggtggagacctaagatcgcgtgcgaaggacgactcttaccacaacccacaggcgccatgcaaggaggagcttggggcggtgaccggccagaggcgcaggaaaattcggatttgttttattgttggaaacattccgaaaaatccggtgagtactggcaagcctatgggcgttcttaatgctgatcagcagaaagaattcgatgaggccactactctctttgtgggatgcattcctagcgtgcttggcgatcgtctggtcgaggtgtatatgcatatgaccgacgctaaggagttgtgggatgcactgaatactaaattcggtgctactgatgctagcaatgatctgtatatcatggagcagtttcatgactacaagatggctgacaaccgttctgtagtcgaacaggctcatgagatacaaaccatggctaaggaactcgaactccttaagtgtgtcttacccgacaaatttgtggccgggtgcattattgcgaaactacctccatcttggagaggtttcggtactgcactcaaacacaagagacaggaatactccgttgaggggttgatagcgtctcttgatgttgaggagaaagctcgggaaaaagatgtcgcgtctaagggcgatggtgggcagtccactgccaatgttgtgcacaaggcccagaacaagagcaaggggaaatacaaagctcagcagaccaccaacttcaagaagaagaacaacaacaacaatcctaatcaggataagaggacttgctttgtgtgtggtcaacctggccatctggccaggaagtgtccacaatgcaaggggatgaaggcacctgcagggcagacctctaagtctgccaatgtgaccattggcaacactggagatggaagcgggtatggggccaatgtacatgtttgtgctgacatctcattgttttcttcttatcaggtcgcatggggttccaccgtcctaatagggaatgggtcacatgcttctgttcatggtgttggcacggtagatctgaagtttacttcgggaaagatcgtgcagctgaagaacgtgcagcatgtcccttctatcgacaggaatcttgttagtggctcccgtctgactagagacggatttaagttggtttttgagtctaataaagtagtcgtgtctaaacatagatattttattggtaaaggttatgagtgcggaggcctgttctgcttttccttttctgatttctgcaataagtctgtgaaccatatttgtggcagtgtggatgatgaggctaatgtatggcactcacgtttatgtcatattaattttggcttgatgtctcggctttccagcatgtgtttaattcctaagttttccattgtcaaaggttctaagtgccatagttgtgtgcaatcaaagcaacctcgcaagcctcacaaggctgctaaagagagaaacttggcacctctagaactcttacactcagatctctgtaaaatgaatggggtgttgacgaagggtggaaaacgatatttcatgacgttgattgatgatgctactagattttgctatgtgtacttgttgaaaacgaaagacgaggctctagactattttaaaatttataaggcaaaagttgaaaatcaacttgacagaaagataaaaagacttaggtctgatcgtggtggagagtttttctcaaacgagtttgacttattctgtgaggaacatggcattatacatgagaggacgcctccctattctcctgagtctaataagattgctgaaaggaagaaccgcacactgaccgacttggtgaatgccatgttggacaccgcaggactacctaaggcatggtggggggagacattgttgacctcgaatcatgtgttaaacagagttcctaacagaaataaggacaaaacaccatatgagatatggattgggagaaaaccatcactttcttacttgcgcacatgggggtgcttggcgaaagtcaacgtatcaataacgaataagcgcaaacttggacctaagactgtggactgtgtctttctgggatatgctcactacagcattgcctatagatttttaatagttaaatctgaggtacctgacatgcatgttggtacaattatggagtctcgtgatgctaccttctttgagagctttttcccaatgaaggatacacatagtagttctagccaaccctctgaaataattctcagttcaatcacaccaccagaacaaactgaacatacacatgaacatgtcactgaggaggatgacagtgaagctcctcgaaggagcaaaagacaaaggacggttaagtcttttggtgacgatttcactgtgtacctcgtggatgacactcctaagtcaatttcagaagcatacgcatctcctgatgcagactactggaaggaggttgtccgtagtgaaatggattccattatcgctaacgggacttgggaggtgacagagcggcctatgggtgtaaacatgtggggtgcaagtgggtgttcaagaagaagctcaggcctgatggtactattgaaaacttcatatggtcttctcgttcatcaaatggacgttaagacagcttttcttaatggagagctagatgaggagatctatatggatcaacctgatgggtttgtagttgaaggctttgcagtcaatgaggcagataaatgtgtgtactatcgccatggtgggggtgagggagttattctgtgcttgtatgttgatgacatactgatatttgggacaaaccttgaggatttgggagtagttgatgttatcttaaacattaagctaattagaggtgagaatgagattacacttttgcagtcccattatgtggagaagatcttgaattgctttggctacattgatagtaagccttctccaacaccttataatcctagcttgttgcttcgcaagaacaagagaattgctaggaatcaactggaatactcccaaatcattggctcgccgatgtacctggctagtgcaactaggcctgatatctcctttgctgtgagcaagttgagctggtttacctctaatccgggagatgatcactggcgtgcgcttgagcgagtaatgcgctatctgaaaggtactatggaattgggacttcactattctgggtatcctgcggtactagagggatatagtgattctaagtggatctctgatgtggatgagatcaaagccactagtggatatgtcttcacattgggtggtggtgctgtttcgtggaggtcttgcaaacagactattttgacgaggtcaaccatggaagcagaactgacggcactggatactgctactgttgaggcagaatggctgcatgatctattaatggatctgcctattgttgaaaaaccggtgctggctatccttatgaactgtgacaatcaaacggtaattgtcaaagtgaatagttctaaggataatatgaaatcgtctagacatgtgaaaagacgattgaagtctgttaggaaattgagaaactccggagttataacgttggattacatccaaacagctagaaacctagcagatcctttcacgaagggactatcacgaaatatgatagataatgcatcgaaggagatgggtttgagacccatg

SEQ ID NO: 35270 - DNA, 333 bp, Oryza sativa
  Clone ID: PAT_MRT4530_39206C.1
ggccaacaacaaaaaataactagttttaccctggtttttaagttcaaattccttaaaatccaattacattggtgggcgaatttcattgagctttggattttgggaagacagaagattgaacgaatttttagcaaaagggttagccgggccttttctaagggaacgaaacatttcgacattgaaacaattttttgggtggccatgatctttagggtggtgatcctggggttcaccttgccaagcccaaacaatggccttaaaagctgggttcatggcctccttccacaaagggggggattctaggggatctccattggtcttcttgatttctac

SEQ ID NO: 35271 - DNA, 5115 bp, Oryza sativa
  Clone ID: PAT_MRT4530_39207C.1
atggccggcttttctttgatcagttgcgctgtgggtatcatcttcttctccgtttgctacctgcctgcggctcctgccgccgccttgtccttcaactactccaccttcagctcggacaaccaggaggacttcacattcgaaggcaacgcctccatccacgacgggtgtattgatttcgttgcgaacgggacctggggcaggggctacaggccctacagcaccggacgggtgtcctacaaattgccggtgcggctctgggacgctgccaccggcgaggtggccagcttcaccacaaccttctccttcaacatcacgccgatgaatattagcgacaagggcgatggcatggccttctttctcgtcagctatccatcaaggatgccgctgaccgccgacggcgacactctcggcctcgtgagcaacaaacccgaaaacgctccggccggcggcgaccaattcgtcgccgtcgagtttgacacctacccaaaccccggcttggaccctaacgctaccggtgaccacatcggcatcgacatcaactcagtccgatcgttgacgaccgaacccttgaccaactccagcctcatcggtaacatgaccgccatcgtccactacgatagcagttcgagcatcctgtcggtgaagctgtggataaatgacacgacgaagccgccttacaaccttagctacgaaattgttgatctcaagaaaaaattgccggagaacgtcaccatcggcttctcggcggcaacgggcgcatcagatgagctacaccagctgacttcttggtacttcaactcgagctcgtcgttcgagcataagcatggacgtgccggggttgtagcgggagccaccgtcggcgcgacgttgttcgttgtgctgctcttcactgctgcagctatcctcatacggcgacgtcggatcaaaaacaggaaggaggcagaggatgagcaggacataagctcggacagcgaagacaatgacggcgagcccatcgtggagattgagatggggactgcgccaaggcgattgccatactatgagctcgtcgaggcgaccaagaacttcgcggtggaggagaagctcgggcaaggcggcttcggttcggtgtaccgaggctacctaagagagcagggcctcgccgtcgccattaaacgcttcgccaaagattcctccaagcaagggaggaaggagtataagtcggagatcaaggtgataagccggctgcgccaccgcaatctcgtgcagctcgtcggctggtgccatggacgcaacgagctcctccttgtctatgagctcgtccccaaccgcagtcttgacgtccatctccatggcaatggcaccttccttacttggccaatgaggatcaagattgttctcgggctcggatcagcactactctacctccaccaagagtgggaacaatgtgtcgtgcaccgtgacatcaaaccaagcaacgtcatgttggatgaatccttcagtgccaagctaggtgacttcgggctcgcgaggctcatcgaccacaccatcggtataaagacaatgaccgccatgtcaggaacaccgggctaccttgaccctgaatgtgtgatcaccggtagagcgagtgccgagtcctacgtttacagtttcggcattgtcctactggaggtggcatgcgggaggagaccgatgagcctactagacagccagaataacggcgtcttccgactggttgagtgggcctgggatttgtatggcaagggagatgttctcatggccgccgacaagcgtctcgacggcgactacgattctgcggagatggagcgtgtcatcgctctcgggctctggtgcgtgcaccctgacccaagtgtgcgaccgtctatcagagacgccatggccatactccagtcgagtggaggccaactgccagtgctatcggccaagatgcccgtgccaatgtacgcgccgccgatggcctcgtttgacgggctagctgtttgcgtcatctacagggatgtcgtcgtcctcagatctaatgatgtgttactgctagtatacatctgcaatgttatgatttatttatggaatatattaaatcattatatgcctatattctcaacaatccaaaaaccttattataggcgctgtgattttactatggctggttttgccgatgcactgaggccggataaattcaccggtgtgcactttaagagatggcagatcagggtcgctttgtggctgacagctatgaaatgcttctgggtgagtactggtaaacctgaaggaattcttgctgctgatcagcataagcaattcgagaaagccactactctctttgtgggatgcattcttagcgttcttggcaatcgtctggtcgaggtgtatatgcacatgaccaacgctaaggagttgtgggatgcactgaatactaaattcggtgctactgatgctagcaatgatctgtacatcatggagcagtttcatgactacaggatggctgacaaccgttctgtagtcgaacaggctcatgaggtacaaaccatggctaaggaactcgaactccttaagtgtgtcttacccgacaaatttgtggccgggtgcattattgcgaaactacctctatcttggagaagtttcggtactgcactcaaatacaagagacaggaatactccgttgaggggttgatagtgtctcttgatgttgaggagaaagctcgggaaaaggacgccgcgtctaagggcgacggtgggcagtccagtgccaatgttgtgcacaaggcccagaacaagagcaaggggaaatacaaagctcagcagaccaccaacttcaagaagcagaagaagaacaacaacaatcctaatcaggatgagaggacttgctttgtgtgtagccaacctagtcatctggctaggaagtgtccacagcgcaaggggatgaaggcacctgcagggcagacttctaagtctgctaatgtgaccattggcaacactggagatggaagcggatttttctatgtgtacttgttgaaaacgaaagacgaggctctagactattttaaaacttataaggcagaagttgaaaatcaacttgacagaaagataaaaagacttaggtctgatcgtggtggagagtttttctcaaacgagtttgacttattctgtgaggaacatggcattatacatgagaggacgcctccctattctcccgagtctaatgggattgccgaaaggaataaccgcacactgactgacttggtgaatgccatgttggacaccgcgggactacctaaggcatggtggggggaggcattgttgacctcgaatcatgtgttaaacagagttcctaacagaaataaggacaaaacaccatatgagatatggattgggagaaaaccatcactttcttacttgcgcacatgggggtgcttggcgaaagtcaatgtactaataacgaagaagcgcaaacttggacctaagactgtggactgtgtctttctgggatatgctcatcacaacattgcctatagatttttaatagttaaatctgaggtaccagacatgcatgttggtacaattatggagtctcgtgatgctaccttctttgagagttttttcccaatgaaggatacacatagtagttctagccaaccctgtgaaataattcccagttcaatcacaccaccagaacaaactgaacatacacatgaacatgtcactgaggaggatgacagtgaagctcctcgaaggagcaaaagacaaaggacggctaagtcttttggtgatgatttcactgtgtacctcgtggatgacactcctaagtcaatttcagaagtatatgcatctcctgatgcagactactggaaggaggctgtccgtagtgaaatggattccattatcgctaatggaacttgggaggtgacagagcgaccctatgggtgtaaacctgtggggtgcaagtgggtgttcaaaaagaagctgaggcctgatgcctcacatggtcttctcgttcatcaaatggacgttaagacaacttttcttaatggagagctggatgaggagatctatatggatcaacctgataggtttgtagttgaaggtcaagaagacaaggtgtgcaaattgttgaagtctttgtatggtctgaaacaagctcctaagcaatgccatgagaaatttgatagaacattgacatctgtaggcttcgcagtcaatgaggcagataaatgtgtatactatcgccatggtgggggtgaaggagttattctgtgcttgtatgttgatgacatactgatatttgggacaaactttgaggtgataaatgaggttaaatcattcttgtctcaaaaatttgatatgaaggatttgggagtagctgatgttatcctaaacattaagctaattagaggtgagaatgggattacactcttgcagtcccattatgtggagaagatcttgaatcgttttggctacattgacagtaagccttctccaatatcttatgatcctagcttgttgcttcgcaagaacaagagaattgctaggaatcaattggaatactcccaaatcattggctcgctgatgtacctggctagtgcaactaggcctgatatctcctttgctgtgagcaagttgagccggtttacctctaacccgggagatgatcactggcgtgcgcttgagcgagtaatgcgctatctgaaaggtactatggaattggggcttcactatactgggtatcctgcagtactggaggaatatagtgattctaactggatctctgatgtggatgagatcaaagccactagtggatatgtcttcacactaggtggtggtgttgtttcatggaggtcttgcaaacagaccattttgacgaggtcaaccatggaagcagagctgacggcactggatactgctactgttgaggcagaatggctgcgtaatctattaatggatctgcctattgttgaaaaactggtgccggctattcttatgaactgcgataatcagacggtaattgtcaaagtgaacagttctaaggataatatgaaatcgtctagacatgtgaaaagacgattgaagtctgtcaggaaattgagaaactccggagttataacattggattacatctaa

SEQ ID NO: 35272 - DNA, 6312 bp, Oryza sativa
  Clone ID: PAT_MRT4530_39208C.1
atggctggttttgccgatgcactgaggccggataaattcaccggtgtgcacttcaagagatggcagatcagggtcactatgtggctgacagctatgaaatgcttctgggtgagtactggcaagcctatgggcgttcttaatgctgatcagcagaaagaattcgatgaggccactactctctttgtgggatgcattcttagcgtgcttggcgatcgtctggtcgaggtgtttatgcatatgaccgacgctaaggagttgtgggatgtactgaatactaaattcggtgctactaatgctagcaatgatctgtatatcatggagcagtttcatgactacaagatggctgacaactgttctgtagtcgaacaggctcatgagatacaaaccatggctaaggaactcgaactccttaagtgtgtcttacccgacaaatttgtggccgggtgcattattgcgaaactacctccatcttggagagcgtctcttgatgttgaggagaaaggtcgggaaaaagatgacgcgtctaagggcgatggtgggcagtctagtgccaatgttgtgcacaaggcccagaacaagagcaagggaaaatacaaagctcaacagaccaccaacatcaagaagcagaagaagaacaacaacaatcctaaccaggatgagaggacatgctttgtcgcacggggttccaccgtcctaatggggaatggatcacatgcttctgttcatggtgttggcacggtagatctgaagtttacttcgagaaagatcgtgcagctgaagaacgtgcagcatgtcccttctatcgacatgaatcttgttagtggctcccgtctgactagagacagatttaagttggtttttgagtctaataaagtagtcgtgtctaaacatggatattttattggtaaaggttatgagtgcgaaggcctgttccgcttttctctttctgatttctgcaataagtctgtgaactatatttgcggcagtgtggatgatgaggctaatcaacctcgcaagcctcacaaggctgctgaggagagaaacttggcacctctagaactcctctacgtaccaataacgaagaagcgcaaacttggacctaagactgtggactgtgtttttctgggatatgctcaccacagcattgcctatagattgttaatagttaaatctgaggtacctgacatgcatgttggtacaattatggagtctcgtgatgctaccttctttgagagctttttcccaatgaaggatatacatagtagttctagccaaccctctgaaataattcccagttcaatcataccatcagaacaaactgaacatacacatgaacatgtcactgaggaggatgacagtgaagctcctcgaaggagcaaaagacaaaggatggctaagtcttttggtgctgatttcactgtgtacctcgtggatgacactcctaagtcaatttcagaagcatacgcatctcctgatgcagactactggaaggaggttgtccatagtgaaatggattccattatcgctaacgggacttgggaggtgacagagcgaccctatgggtgtaaacctgtggggtgcaagtgggtgttcaagaagaagctcaggcctgatggtactattgaaaagtacaaggctcggcttgttgctaagggctatactcagaaagaagacgaagatttctttgacacttactcacctgttgctagattgaccacaattcgtgtgctactttccctagcagcctcacatggtcttctcgttcatcaaatggacgttaagacagcttttcttaatggagagctggatgaggagatctatatggatcaacctgatgggtttgtagttgaaggtcaagaaggcaaagtgtgcaaattattgaagtctttgtatggtctaaaacaagctcctaagcaatgtcatgagaaatttgacaaaacattgacatctgcaggctttgcagtcaatgaggcagataaatgtgtgtactatcgccatggtgggggtgagagagttattctgtgcttgtatgttgatgacatactgatatttgggacaaaccttgaggtaataaatgaggttaaatcatttttgtctcaaaattttgatatgaaagatttgcgagtagctgacgttatcttaaacattaagctaattagaggtgagaatgggattacactcttgcagtcccattatgtgaagaagatcttgaatcgctttggctacattgatagtaagccttctccaataccttatgatcctagtttgttgcttcgcaagaacaagagaattgttaggaatcaattggaatactcccaaatcattggctcgctgatgtacctggctagtgcaactaggcctgatatctcctttgctctgagcaagttgagctggtttacctctaatccgggagatgatcactggcgtgtgcttgagcgagtaatgcgctatctgaaaggtactatggaattggggcttcactattctgggtatcctacggtactggagggatatagtgattctaactggatctctgatgtggatgagatcaaagccactagtggatatgtcttcacactgggtggtggtgctgtttcgtggaggtcttgcaaacagaccattttgatgaggtcaaccatggaagcagagctgacggcactagatactgctactgttaaggcagaatggctgcgttatctattaatggatctgcctattgttgaaaaaccggtgccggctatccttatgaactgtgacaatcaaacggtaattgtcaaagtgaatagttctaaggataatatgaaatcgtctagacatgtgaaaagacaattgaagtctgtcaggaaattgagaaactccggagttataacgttggattacatccaaacagctggaaacctggcagatcccttcacaaagggactatcacgaaatgtgatagacaatgcagcgaaggagatgggtttgagacccatatctaatgatgcgctcaatctagtttacatctgcaatgtcatgatttatttatggaataaattaaatcattatgtgcttataatttcaacaatccaaaaaccttattataggcgctgtgattttactatggctggttttgccgatgcactgaggccggataaatttaccggtgtgcacttcaagagatggctgatcagggtcactatgtggctgacagctatgaaatgcttctgggtgagttctggcaagcctatgggcgttcttaatgctgatcagcagaaagaattcgatgtggccactactctctttgtgggatgcattcttagcgtgcttggcgatcgtctggtcgaggtgtatatgtatatgaccgacgctaaggagttgtggaatgcactgaatactaaattcggtgctactgatgctagcaatgatctgtatatcatggagcagtttcatgactacaagatggctgacaaccgttctgtagtcgaacaggctcatgagatacagaccatggctaaggaactcgaactccttaagtgtgtcttacccgacaaatttgtggccgggtgcattattgcgaaactacctccatcttggagaggtttcggtactgcactcaaacacaagacacaggaatactccgttgaggggttgatagcgtctcttgatgttaaggagaaatctcgggaaaaagatgccgcgtctaagggagatggtgggcagtccactgccaatgttgtgcacaaagcccagaacaagagcaaggggaaatacaaagctcagcaggccaccaacttcaagaagaagaacaacagcaacaatcctaatcaggatgagatgacttgctttgtgtgtggtcaacctggccatctggtcaggaagtgtccacaacgcaaggggatgaaggcacctgcagggcagacctctaagtctgctaatgtgaccattggcaacactggagatggaagcgggtatggggccaatgtacatgtttgtgctgacatatcattgttttcttcttatcaggtcgcgcggggttccaccgtcctattggggaatgggttacatgcttctgttcatggtgttggcacggtagatctgaagtttacttcgggaaagatcgtgcagctgaagaacgtgcagcatgtcccttctatcgacaggaatcttgttagtggctcccgtctgaccagagacggatttaagttggtttttgagtctaataaagtagtcgtgtctaaacatggatattttattggtaaagattatgagtgcagaggcctgttccgcttttccctttctgatttctacaataagtctatgaaccatatttgtggcagtgtgggtgatgaggctaatgctgctgaggagagaaacttggcacctctagaactcctacactcagatctctgtgaaatgaatagggtgttgacgaagggtggaaaacgatatttcatgatgttgattgatgatgctactagattttgctatgtgtacttgttgaaaacgaaagacgaggctctagactattttaaaatttataaggcagaagttgaaaatcaacttgacagaaagataaaaaggcttaggtctgatcgtggtggagagtttttcttgaacgagtttgacttattctgtgaggaacatggcatcatacatgagaggacgcctccctattctcccgagtctaatgggattgctgaaaggaagaaccgcacactgactgacttggtgaatgccatgttggacaccgcgggactgcctaaggcatggtggggggaggcattgttgacctcaaatcatgtgttaaacagagttcctaacagaaataaggacaaaacaccatatgagatatggattgggagaaaaccatcactttcttacttgcgcacatgggggtgcttggtgaaagtcaatgtaccaataacgaagaagcgcaaacttggacctaagactgtggactgtgtctttctgggatatgctcaccacagtattgcctatagatttttaatagttaaatctgagtcaatttcagaagcatacgcatctcctgatgcagactactggaaggaggctgtccgtagtgaaatggattccattatcgctaacgggacttgtgaggtgatagagcgactctataggtgtaaacctgtggggtgcaagtgggtgttcaagaagaagctcaggcctgacggtactattgaaaagtacaaggctcggcttgttgctaagggctatactcagaaagaaggcgaagatttctttgacacttactcacctgttgctagattgaccacaattcgtgtgctactttccctagtagcctcacatggtcttctcgttcatcaaatggacgttaagacagcttttcttaatggagagctagatgaggagatctatatggatcaacctgatgggtttgtagttgaagatcaagaaggcaaagtgtgcaaattgttgaagtctttgtatggtctgaaacaagctcctaagcaatggcatgagaaatttgacaaaacattaacatctgcaggctttgcagtcaatgaggcagataaatgtgtgtactatcgccatggtgggggtgagggagttattatgtgcttgtatgttgatgacatactgatatttgggacaaaccttgaggtgataaatgaggttaaatcattcttgtctcaaaattttgatatgaaggatttgggagtagctgatgttatcttaaacattaagctaattagtggtgagaacgggattacactcttgcagtcccattatgtggagaagatcttgaatcactttggctacattgatagtactatggaactggggcttcactattctgggtatcctgcggtactggagggatatagtgattctaactggatctctgatgtggatgagatcaaagccactagtggatatgtcttcacactgggtggtggtgctgtttcgtggaggtcttgcaaacagactattttgacgaggtcaaccatggaagcagagctgacggcactggatactgctactgttgaggcagaatggctgcatgatctattaatggatctacctattgttgaaaaaccagtgccagctatccttatgaactgtgacaatcaaacggtaattgtcaaagtgaatagttctaaggataatatgaaatcgtctagacatgtgaaaagacgattgaagtctgtcaggaaattaagaaactctggagttataacattggattacatccaaacagctagaaacctggcagatcccttcatgaagggactatcacgaaatgtgatagacaatgcatcgaaggagatgggtttgagactcgtgtga

SEQ ID NO: 35273 - DNA, 353 bp, Oryza sativa
  Clone ID: PAT_MRT4530_39209C.1
aaaaaaaaaaaaaaaaaaaaaaaaaaaaaaaaaaaaagaaaaaaaaaaaaaaaaaagggagaaaagttttaaggataaaaggattaaaaaaagggtgaataaaaagaaaaaaattgttttatttgggttggcggttttaaattatttggccgttgtttaaaaactatggggttgcataaatttctgggtttaccaaattaattggttttgctggaaaaccctttttcattgggtagactttaaagttacaaggccttttctgtttgatctttttaacgttttggcaactttcctggttagtggtattcaccctgtgggggggctttaataactgtgggtgtggtggttatgtt

SEQ ID NO: 35274 - DNA, 1646 bp, Oryza sativa
  Clone ID: PAT_MRT4530_3920C.1
tttttttttttttttttttaaaaatttttaattttttttttttgagccaacatgatcaattgcactttgcagggcaatatatggttttttttgctacaaggaacagtaattaattaataaaaacaagaaattgaaagggaaaaaaaagagaggaagagaacgaggggaaattaagccactctctttcccccattgagctagctacaaattgaacattcttattggctctatggaactatacttaacccaacaaggatccaactacaaggaggtgaaaacaaacaacaagaacaatagcaacggcattaacaccaaccccaccgagagcaacaagggtcatcacacgcgtccactcgcactagccttaattacttaattagtcagagaggacgcctctcttcctgactaaaccccaagttttccaggtcatgatatgcttgaagagctagcttagtatagcttttatcccatgcatgcttgcacaccagctcatgcgatcgatcaaacttagttgctaactcgacattaggctatatatgatgagtatactataaccttagcttgctcctccccaattcatgcgcgcatgcgttaatcccccagagttgcagttgcattgcttcaagtctcagactctcacttggtactactaccgatcgatcggagcttgacggcttgtgtaagctcgatcgatgacttgatcatggtggattcatggcatccttctcccgttgaaggacgatgcggacttcatctcggcctccaaggagctcatgtcgctgctgctctggtggtggtctcctctcggcgtcgacatgccatggacgatgccgccaccgccgacgccgaggaagtcccgcgtcccgtcgccggtgccggcgccggcgccgcctccgcctccgccgccctggctgaacttcacctcgtgctcgatgtcgcacagcccctcggatcaaaacatccccgcgccagggacgccggcgccgttggtgccgcccggcagcgggggcggcgttgacgccgcacgccggcgagggagttcatcaggtcgttgaggtgcgcgtcgctctggtccatgtgctgcgccgccggccgcatgtgcggcgacgagccgacgaagccacggaacatggagcccgggccgttcgcgctcgacgtcgcgcccatctgcgccgccttctggaggagagccgtcgccgacatctgcggcagcatcgccgcttgatcgttgtagagccctgcaggagaaacatggtcgccaccaacgaagttaccgccgaagatccccgccgccgacgcgtcagaaccgccgccgccgcctgcaccacagctgaactggtcattgctcatcagcccctggctggcatgctcatggctagaccccgagctgttgccgttgttggcgaagaagccgaggttgaagaggttaggtcccggcgcgccggggcccggagcgccattccccgggccggcggccagctgcatgaggccatggaacggcttggcctgcaggaacgagtgctgcccattgccagcgtcgtcgccgaaatcctgcccagtcgccgccgccgccgcggcggcgttgaggaagaacgccggctgcggggggcggaaggcagacgcgcccgacggcgacagcagcctcg

SEQ ID NO: 35275 - DNA, 374 bp, Oryza sativa
  Clone ID: PAT_MRT4530_39210C.1
gggaaacaaaaaacctgggggaacaattaattaaaattccagtttccactgggaacaaaaaaacacgcagggggtggcccatgggagcccaaaggggatgggaacccggaaaccaaggggcggggccctggaggaacccgggggctttgacccccgggaagaaggaagaaggaaagaaaaaaggaagaggattcctttccttggcaaactttttaaagaaagaggaactggggggcctgggcaacgggtttttcaaccccccggggaggctcgcccatggggggggggctgaccctgaccatggggacccaaaaccccttcttgttgggggccccccccccgtaaaaacccccctcggggagcctcccccgggg

SEQ ID NO: 35276 - DNA, 269 bp, Oryza sativa
  unsure (1)..(269): unsure at all n locations
  Clone ID: PAT_MRT4530_39211C.1
gttttagttttantggtagttganctaggcatttaggcaatgcccntggantgggnantttgtttgcccggnncttttantttgcnttataagttatcatatggnttgctnctttntgtcttctggtancatcttttnttttgtgggtgatgcntnatttnnnngtcttgntctgcnccnaatgaannaaactttggctnctttgttggcntnaaaaaaaaaaaaaaaaaaaaaaaaaaaaaaaaaaaaaaaaaaaaaaaaaaaaaaaa

SEQ ID NO: 35277 - DNA, 477 bp, Oryza sativa
  Clone ID: PAT_MRT4530_39212C.1
acgcgcgcgctcgctcgcctcgccgggccggcggcgcgcgtgcacgacgtacgcgtcgaatgactactccatcccgctcgccggcgtgcaccggcgatcgggagagcaggtctccggaacctctgccttcgacgtcctgcaccaggagaaggcggcaataaggtttttgggaagcgcttcgcgcgactgctccctgtttgttcgcgacggctcgccttcctcttcgctcgtgtgcttcgcgccttcgtcgacgctcgcaaccgcgagtagttcctgccgtgcaacctgtctttccgccacctcggtacgtgttcaacagcggcggactgcgagtgcgaggtggcggacggcggtggcgagcacggcaccggtggaggaggccgggcaaggcgcgcggtggccggatctcgtcgccgccatccccgagcgtgacgaccaccaccacgacgtcgtcctcgtgctgctcggccgcgagca

SEQ ID NO: 35278 - DNA, 552 bp, Oryza sativa
  Clone ID: PAT_MRT4530_39213C.1
ttacacgtgcttcgcggtggcgtcttctgctgtgcggctgccggacggcacggcgagccggccggcggcggggaggtcgtcctcgtgcgcctccgcgggacgctccatggcgcgcaccagctgcacgaacaacggccagtggtccggcgagaagaacgatccgcgcccatccgctggtatatgaagtggcacggtcgtatgcgctcgtcggcgagcgacgtgccagggggagtcgtcgcagtcgcactccacgacgagcgacacgctctcgctggcgaggtgcacgccgtgctctgcgcaggcggcctcgacctgggcgaggacctccaccgccgcggacccgtctatgcctgatgcgatcaccgtgcaccagtagccgccatgaagccccgcggtggcctccgctgggcgcaactgcaggagcagcaccttcgcggacagctcgacaggctcactgtcgaacaccttgcatgccgtgggcaggacgcagtcaccgtgcgctgtcgccgaaggcgaagccgcctcctcctcctccgccgccgccgccgccat

SEQ ID NO: 35279 - DNA, 3924 bp, Oryza sativa
  Clone ID: PAT_MRT4530_39214C.1
atggctggttttgccgatgcactgaggccggataaattaaccggtgtgcattttaagagatggcaaatcagggtcactctgtggctgacagctatgaaatgcttctgggtgagtactggcaaacctgaaggagttcttactgctgaacagcagaagcaattcgaggaagccactactctctttgtgggatgcattcttagcgttcttggcgatcgtctggtcgaggtgtatatgcatatgaccgacgctaaggagttgtgggatgcactgaatactaaattcggtgctactgatgctagcaatgatctgtatattatggagcagtttcatgactacaagatggctgacaaccgttctgtagtcgaacaggctcatgagatacaaaccatggctagggaactcgaactccttaagtgtgtcttacccgacaaatttgtggccgggtgcattattgcaaaactacctccatcttggagaagtttcggtactgcactcaaacacaagagacaggaatactccgttgaggggttgatagcgtctcttgatgttgaggagaaagctcgggaaaaagatgccgcgtctaagggcgatggtgggcagtccagtgccaatgttgtgcacaaggcccagaacaagagcaaggggaaatacaaagctcagcagaccaccaacttcaagaagcagaagaagaacaacaacaatcctaatcagaatgagaggacttgctttgtgtgtggccaagttggtcatctggctaggaagtgtccacagcgcaaggggatgaaggcacctgcagggcagacttctaagtctgctaatgtgaccattggcaacactggacatggaagcgggtatggtaatttacctactgttttttcagttaatcaatctactaattggtgggttgatactggggccaatgtacatgtttgtgctgacatttcattgttttcttcttatcaggtcgcacggggttccaccgtcctaatagggaatgggtcacatgcttctgttcatggtgttggcacggtagatctgaagtttacttcgggaaagatcgtgcagctgaagaacatgcagcatgtcccttctatcgacaggaatcttgttagtggctcccgtctgactagagacggatttaagttggtttttgagtctaataaagtagtcgtgtctaaacatgtatattttattggtaaaggttatgagtgcggaggcctgttccgtttttccctttctgatttctgcaataagtctgtgaaccatatttgtggcagtgtggatgatgaggctaatgtttggcattcacgtttatgtcatattaattttggcttgatgtctcggctttccagcatgtgtttaattcctaagttttccattgtcaaaggttctaagtgccatagttgtgtgcaatcgaagcaacctcgcaagcctcacaaggctgccgaggagagaaacttggcaccactagaactcctacattcagatctttgtgaaatgaatggggtgttgacgaagggtggaaaacgatatttcatgacattgattgatgatgctactagattttgctacgtgtacttgttgaaaacgaaagacgaggctctagactattttaaaatttataaggcagaagttgaaaatcaacttgacagaaagataaaaaggcttagatctgatcgtggtggagagtttttctcgaacgagtttgacttattctgtgaggaacatggcatcatacatgagaggacgcctccctattctcccgagtctaatgggattgctgaaaggaagaaccgcacactgactgacttggtgaatgccatgttggacaccgcgggactgcctaaggcatggtggggggaggcattgttgacctcaaatcatgtgttaaacatagttcctaacagaaataaggacaaaacaccatatgagatatggattggtaaaaaaccaccactttcttatttgcgcacatgggggtgcttggcgaaagtcaatgtaccaataacgaagaagcgcaaacttggacctaagactgtggactgtgtttttctgggatatgctcatcatagcattgcctatagatttttaatagttaaatccgaggtaccggacatgcatgttggtacaattatggagtctcgtgattctatcttctttgagagctttttcccaatgaaggatacacatagtggttcgaaccaaccctctgaaataattcccagtccaatcacaccaccagaacaaactgaacatacacatgaacttgtctctgaggaggatgtcagtgaagctcctcgaaggagtaagagacaaaggacggctaagtcttttgatgatgatttcactgtgtaccttgtggatgacactcctaagtcaatttcagaagcatatgcatctcctgatgcagactactggaaggaggctgtccgtagtgaaatggattccattatcgctaacggaacttgggaggtgacagagcgaccctatgggtgtaaacctgtggggtgcaagtgggtgttcaagaagaagcttaggcctgacggtactattgaaaagtacaaggctcggcttgttgctaagggctatactcagaaagaaggcgaatatttctttgacacttactcacctgttgctagattgaccacaattcgtgtgctactttccctagcagcctcacatggtcttctcgttcatcaaatggacgttaagacagcttttcttaatggagagctggatgaggagatctatatggatcaacctgatgggtttgtagttgaaggtcaagaaggcaaagtgtgcaaattgttgaagtctttgtatggtctgaaacaagctcctaagcaatggcatgagaaatttgacaaaacattgacatctgcaggctttgcagtcaatgaggcagataaatgtgtgtactatcgccatggtgggggtgagggagttattttgtgcttgtatgttgacgacatactgatatttgggacaaaccttgaggtgataaatgaggttaaatcattcttgtctcaaaattttgatatgaaggatttgggagtagctgatgttatcttaaacattaagctaattagaggtgagaatgggattacactcttgcagtcccattatgtggagaagatcttgaatcgttttggctacattgatagtaagccttctccaacaccttatgatcctagcttgttgcttcgcaagaacaagagaattgctaggaatcaactggaatactcccaaatcattggctcgttgatgtacctggctagtgcaactaggcctgatatctcctttgctgtgagcaagttgagccgatttacctctaatccgggagatgatcactggcgtgcgcttgagcgagtaatgcgctatctgaaaggtactgtggaattggggcttcactatactgggtatcctgcggtactggagggttatagtgattctaactggatctctgatgtggatgagatcaaagccactagtggatatgtcttcacactaggtggtggtgctgtttcgtggaggtcttccaaacagaccattttgacgaggtcaaccatggaagcagagctgacggcattggatactgctactgttgaggcagaatggatgcgtgatctattaatggatctgcctattgttgaaaaaccaacatgtgaaaagacgattgaagtctgtcaggaaattgagaaacttcggagttataacgttggattacatccaaacagctaaaaacctggcagatcccttcacgaagggactatcacgaaatgtgatagacaatgcatcgaaggagatgggtttgagacccatagcattcttgaaagaactcacctttgtgagcttgactgttggtcgcagtctatggagattttgggtgaatcttctaggaagcttactaaagacctaggagta

SEQ ID NO: 35280 - DNA, 3703 bp, Oryza sativa
  Clone ID: PAT_MRT4530_39215C.1
cggaattcccgcgtcgacccacgcgtccggacaaactgagctgtgagaagtaggtaggctgcctttcagatttcagattcttttccacatcttcccctttctccccatcgctttcctgcatttgtacctgtcgctgctgattctagaaatccagaatttatttggatgaactgagaggtgtgaaagacagagacagaggagaggaggatggggttcttcttcttcgcgtcccgtgctgctgctcggttcttgggcgaggctaggatcatccaccccggcgtctccaccgctgcgcttcttgttgcagcagccagtggtggaggccttgtggcgtatgctgattctgctggagagaatgcatcatcagagacatctcaggaggctcccaggaagaagaaggttgtggttcttgggactggctgggctgggacgtccttcctcaaagatcttgactgctccaagtatgaagtgaaagtcatatcgccccggaattactttgcatttacacctttgcttccgagtgtgacttgtgggactgtagaggcacgcagcatcgttgaaccgatacgaaagatgcttgagaagaaaaggaaagatgttgcattctatgaagctgagtgtttcaagattgatgcatcaaagaaagctgtccattgccggtctgccgttggaacaaattttgatggcaatggtgattttatggttgattatgattatttagttgttgctcttggggctacagtaaatacattcaacactcctggtgtgatggagaactgctactttctgaagactctcttccaagaactgagcctatctcagttggtagaatgtgtaggtgtgcactcgcggttcccagagatgcatgattttcttgttgaggatctggtgaagctatatcctgcaattcaagattttgtgaagataacaattattcagtccggtgaacatatattgaacatgtttgaccaacggatagctacatttgctgaaatgaagttccagagagacggcattgaggtgaacacagggttcagagtggtaaaggtctctgatgatttaattacaatgaagagcaaatcccttggtgagactaatcggcgtgtcttggcaactaatgaatggttaagagttcatgagtgtgataatatatatgcaattggtgactgtgcttcaataactcaaaggaaaataatggatgacatttcaacagtatttaaaatggctgataaagacaactccggcactctaacactcaaagagataaatgatgttcttgaagacatttgtataagatacccacaagtagaactgtatatgaaaagtatgcacatgcttgacattagggatttgataaaagatgccataggtgattctcacaaggagtcgatggtggttaacatagaggagttcaaaaaagctctgtctcatgtggattcccaagttaaaagtattccagcaacagctcaggttgcagcacaacaaggacactatcttgctgaatgttttaacaagatggaccaatgcaaagaacatccagaaggtacaagcatcttgggcaatttgcacccttgggtggagagcaagctgctgcagagctcccaggcgactgggtttccatgggccatagcactcagtggctctggtactctgtatatgcaagtgttatttgctcctactgccacatggctctctctaactgtgactgagaggtgctcttctgcattacggcagacgatccggatccgagatgtgtttcatacggagatacggctcatgttaggtgcccaacagcaagaggagcttctcttccaaatgccaggacatggaatacatgcctgcaagattccaatggaagaagaaagcatcaagtcaggaggggtaactagaggacagatcaaaggagatgagatgggagaagctgcagaggaaggagcagtggatggaagctgccatggtgaagcagcagcagaagctctcgaggtgctcaggtccatggcaatggcgtcctcctcgctgacatgctccatcccacagttcccggcgaaatggcagtctatcaaggacaagctccggcagctctgctccggcctggattccctgtgcggcagcgtcggcttcggcgtcgacgtcggcggcgatgaggagaggcatggcgtgctggtgcagcttgtggcgtcggcttcggcgacggtgaggagcatccaagccatggcgtcgcagtgcggcgatggcacgtacaagggtgggaggctccggctgaggagtgatttggacaacctgagctccaagctggaggcgcacatgaagcagctcagggagatggcttcctccgggatgccgtcgccgtcgcaggccatcgtcgcggtgaggccaagcgccgacgccggcgccggcgagaagatgttctacatgcgggatctcttctccagggtcaggattggcggctctgtccagaggagccagtcgctggccaccatcggggagctcctggcggaggacgaggtgtgcgtcaagatcgtcgccgtcgacatcgacgacggcgtcgccttgctcaccggcttcctcgagtcgagcgacgcgcgcctccaggaggaggccgccggcgccgtcgccatggtggccagcttcgactcctacagagggatgctcgtcaaggcaggcgtcatcgcgccgctcgtccagctgctggacgacgcggccgccaccgccgccgtcgccgccggcggcggcgccaccgcggtcgccaaggagagggcggcgcaggcgctgcgcgagctgacggagaactcggacaacgtgtgggccgtgtgcgcgcacggcggcctcaccacgctgctccacgcctgcggcgacgccggcagcggcggcaagctggtggcctcgtcgttcgccgtgctgcgcaacctgagccgggtggaggaggtgaaggtgttcatggcggagcagggcgtggtcaccgagctggtgaagctgtcccagaagaaggaggaggcgcgcaagctcggcgccgtcgagctcctccacgccatggcgctcgacgacgccgacgtccgggaagaggccgtgagcatgggcgtgatccagtcgctgctccagctgatataccctgacctgccatactcctacaaggcaagggaggtcgcccttgcagccatctggttcttctgcttctcctccgtgaactccattgatgacctcatcagctcagatgttcttggctggcttctcttctacctcaacaatggcgattacgccgttcttgagtgcacactgaaaattctgcggcatttgtccgaggtttctgaggagtacaacaggatgatgggcagagcaggttatctcagtgcactgtcaagcttgcttggagcaaaatcatgtcgggttcgcgaaatggcagctcaagtgctctctagcttgctgttgcttcatccgaatcgcgtgattttcatccaagacggcgacaatttgaacaggttgctgcagttgcttgatccagctgagggaaaattggtggcaaaggacttgatcctttctgccatattgtccctggcagataccaacagtggaaggaagaagatcatatcatcagagcatttcagcagcctgaaggaattagctgatactggggactttgatgcaaagaaggttgttaagaagctaggaactaacagattccaaacaattttcagcaagatatgga

SEQ ID NO: 35281 - DNA, 111 bp, Oryza sativa
  Clone ID: PAT_MRT4530_39216C.1
atggtggcagtgacgggcgcgacgccggctgcggagacaggggtcgcggccctctgctgggagatggcttcgatggcaaaccccgacggcgtgagcagggacacgggctag

SEQ ID NO: 35282 - DNA, 515 bp, Oryza sativa
  unsure (1)..(515): unsure at all n locations
  Clone ID: PAT_MRT4530_39217C.1
ttttcgcgtccgattctttcaggatgacatttcaacagtatttaaaatggctgataaagacaactccggcactctaacactcaaagagataaatgatgttcttgaagacatttgtataagatacccacaagtagaactgtatatgaaaagtatgcacatgcttgacattagggatttgataaaagatgccataggtgattctcacaaggagtcgatggtggttaacatagaggagttcaaaaaagctctgtctcatgtggattcccaagctaaaagtattccagcaacagctcaggttgcagcacaacaaggacactatcttgctgaatgttttaacangatggaccaatgcaaagaacatccagaaggtcccgttgcgcatgacaggaacaggatcaggacgacacaatttccgccatttcggtacaagcatcttgtgcaatttgcacctttgtgtggagaggaagctgctgcagagctcccaggcgactgggtttccattggccatagcactc

SEQ ID NO: 35283 - DNA, 583 bp, Oryza sativa
  Clone ID: PAT_MRT4530_39218C.1
gcgcgcggcgcgtctcctcccactctcctctcctctcctctctctccctccctctccctcccctccacatcgacagcacggcgcacggcagcgggcgacagcggcggcggcgcgcgctccctccctcccctccttcccgtagcagatccggcgaagggggggcttgggggcggctgatccggcggcggcggccgcgggcggcggcggcgcgcgccccctcccctccttccccttgtagatccggggaagggggcggctgatccggcggcgtgcggtgggaggagagcacgcggtggcggcggcggtggcggcgcgcgccccctcccctccctccccatgcagatctggtggctctcctcccctcccttgtagatccggcggaggggagggggaccagcggagcaacggcatgcgtcggcgaccggcaaccggatctatctctccccctcctctctttgctctacttgtgttttttgtgtgtgatttgttcatatgagatgtgttcatgtgatgtgttcttgttgatgtgtgatgcttcttgtgatgtgtgttcttgtgatgtgagatgtgttcggcggtgggc

SEQ ID NO: 35284 - DNA, 386 bp, Oryza sativa
  Clone ID: PAT_MRT4530_39219C.1
ttggtttttttattttttgtgttttgaatttgaaaaaaaaacagtattagagaatggataaatcataccccgatgattgtcactgagagccttcaacttcatgtccaaagctcccatcatcacaaaccaaaggaagccaggccatacatatacgggctcctgaaatctctcctgaaacagtctctcaagcttcatgttctccaggcaaagtgagaagaattaagttgggggcatggccatcaggggagacctccactgttgccaagtacacataaccagccctaactcacacaactcttatgcccttgtaactgagatatgggggtcaaagagaatatcttctgggatgcccatcttgcaattccgttcctgacgactctagggat

SEQ ID NO: 35285 - DNA, 261 bp, Oryza sativa
  Clone ID: PAT_MRT4530_3921C.1
atggcgggaggtggcgcaccggcgggcggctccggcaacatggggtggcagccagcgaactacgagaaaggggaaaactccgggtgtgacaggactcctttgcttcgtcatgaagaggaggaaatgatgaagctagcgacaaggctgaaggataccattgctttgctaagaaaaaattacaagattacaaccgtggaagatcgtatccaagaaaaagaagaaaataaccaccacccacacactgacagctccagaacatag

SEQ ID NO: 35286 - DNA, 284 bp, Oryza sativa
  Clone ID: PAT_MRT4530_39220C.1
aggcgccggcgccccaggacccgcgcacggccgcccatggaggacgcccggagcaacgacaccaacggcaaggagctcaggcgcgagcagagcggcgcaaccaccctgagcacccacaaggcgacggggcagaagagcacgttcttttcatcgccaagcggaagctgaccaccaaggaggacgcggaggacacgcgggggcacccgcacaacatagaccacctgaccgggcaccccaacgcggtggagcggaagggcgcctacaaggacaaacggagcgagcac

SEQ ID NO: 35287 - DNA, 259 bp, Oryza sativa
  unsure (1)..(259): unsure at all n locations
  Clone ID: PAT_MRT4530_39221C.1
ggaattaattaatcttcannnccactatcatttggttattatcaacgaggagggctagtaagaagaatattaacaactccgaactggggacctctgctacagaatggagtcaaaaaacgcaaaaataccgatggccacacaaaaaaaaataattttttttttacaactatgaaaaaaagatcatatatggatagacaacaaacataatcaaaatatgttcgcctggctacaacaataatgcgttttatttccttaaaaa

SEQ ID NO: 35288 - DNA, 282 bp, Oryza sativa
  unsure (1)..(282): unsure at all n locations
  Clone ID: PAT_MRT4530_39222C.1
cactccctctctccctccatccagatccacaggcgcgggtggcggcgtgctctggcacggggcgacagggagggctggtgcgggcacgggccgcggcgagctcgggcgtgggttgcggantcgggcgctgatccgccgccgccgggccgcggggagggtncgggcttanggcacggtggtggganaagcggtggaactcggcgtgtcggtcggcggccatgcgcattatganctcgaagtgcgcctaagggccggcaacgcggttgaacttcaacttttttt

SEQ ID NO: 35289 - DNA, 483 bp, Oryza sativa
  Clone ID: PAT_MRT4530_39223C.1
atgaacatactcaacaacaaaatcatccacaaattcacaaaaaacatctacaaaaaatctacaatagagattgggaaggggagggcgaggggctggccaccaggcttctctgctctaccttctttctcaccggaggggagggtcgggtgccgctgtcgcctcccctcgggcgtcgccgcctgccacatcccctacagccagatacggtggaggggagggcgctgtcgccgcccgctgttcccgggcactgcttgcatatggatcggagaggaagaggacggacggaggaggaggaggaggaggaggaggaggaaaggagaggataagttcgccggcagggagaggagggccgcggagacgagtggagagggggctggagaggacgaaggggagggaaccagggaaggggctagaggggagggaggaggagggcgcagcggagaagaggaaaggcgcgcgattgacgtgtgcgattgtggataa

SEQ ID NO: 35290 - DNA, 1980 bp, Oryza sativa
  unsure (1)..(1980): unsure at all n locations
  Clone ID: PAT_MRT4530_39224C.1
cacgcaggggagcaaagcgactgaagagagcgagagagatggcgtgccacgccgccgctctcctgcagcatccgccgccgccgccgccgcccgcgtcgctcccctccaccgcgtgcacgtcctcctcgcgccgccgcgcctctccgtggggcggcgctgggcggttgatacggttacgcctgcgggggcactgcccctcgcccgcctcggcgcgcgccgcgagggtggtctccccgcgctgctcctcctacggcgccgccgccgacgccggggagtcgcccgcggaggcgctccggagggtcctggagtcccccggcgcccaccaggcgcccgcgtgctacgacgcgctcagcgcccgcctcgtggggcgcgcggggttcaaggtctgcttcacgagcggtttctcaatatctgctgcgcgacttggattgcctgatgtgggtctcatctcctatggggaaatgatagatcaagggtgtctgatcaccgaagcggcctcaatcccagtgattggtgatgctgataatggttatggaaactgtatgaatgtcaagagaacagtaaaaggatttattaaagctggttttgctggaattattcttgaagaccaggtatctccaaaagcatgcggacatacacagggaaggaaagttgtctcaagggaggaagcaattatgcatataaaagctgctgtagatgccaggaaggagagtggctctgacattgttattgtggcaaggacagactctcgtcaagctttgtctcttgatgaagcattatggagagtacgcgcttttgcagatgctggagcagatgttctatttattgatgcccttgcttcaagagaagagatgaaggcattttgtgcagtatcacctggagttccaaaaatggctaacatgttagaaggtggtggtaaaactcctattttgagccctgctgaacttgaagaaactggttataaactcatagcatacccattatctctgattggggtatcaatgcgtgcaatggaggatgctcttattgctataaaaggtggtcgcatacctcctcccagcagtctgccatcatttgaggagattaaagatactctggggtttaacagctactatgaagaagaaaaacgatacgttgtgacaccagcccaatcatcatcgtacaggagcggttactatgataatacaagtgaagcaagcagtccaggagatgccaaatcaagaactgaaacaccgcaagagcctgttattgacatattgcctcagctatatgatcttggttctactggaggcagaggcccttcagcagggatgtggtctcggacacttcggttaaggattacaggaagagatggagttcagaaaatcgatgctagaatacctgttgcttttgtttatccccattatctacaacaggctggattcttagaaggcatgacaaaagttattccaggtttggctggagctaatatcatggaaaggcttcgaaatgcacctattgattcagaaaacccccagaacggtcagatactgcttgattttgaggatgctatgggagataggatccaggtgtttattgagtgagcatgcctgttttccatttgctggcgcactgcaaaatccaaatgcatggaccttcaaagcggcaccagacttcttcttgttgtgaaaaccagtgaactagtaaaatccaacattgatcatatgacctgaagtcatgaactaatggtttcctagtccctcgatgctacacccaaataatcaatctagatgtgtgcgtagctgcacattgcaataccatgcagagtatttgcccgggattagtctggtagcctttgcttgcccccaaaatcctgaagtcaaatttcgaataaaaagcattctcaggaggtttgagatgtttgcatgcttctatctgctgatatttacatttttgaagcngtgaacagctcatgcgttgtgatgtaaaaaaaaaaaaaaa

SEQ ID NO: 35291 - DNA, 756 bp, Oryza sativa
  Clone ID: PAT_MRT4530_39225C.1
tcatatgccggtgacgatgtacgctgaccacacggccatgtccttgcaggttcttcttgggccttcggcccatttccctccagcgcccattcgctgggctggcctcaggccgaggcccaacagcccgcgcgcccctcctctgtctcctggggttgctgacaggtggggcccacctgtcgggtcctcccccaacctccggaggccgccaccgcctcccacaactgccgctcccgctgttctagggccacgtccagcctccaccgcaccacaatggcctcgccccgcgcacgccacccactccccgcaccccactaccccctctccggcccacgcctgcgctggaaacggccaggattcaatttttgaatcccacctctctctctcctcccgtacctcccccactttgccggtgaatccgcgccactcccggccgttcctgacctcccgccccgagcagacgcggcggcgagaggtcggcggtgttgctggcggtgaggaagaaacggcgagaagcttcgggtcgtcgttgtcgtcatcgttcccgcggtcctcgtgctcgacggaggggaggacggggaagagaaggaagcggcgaagcagatggtggcgacgcatccttgtttgtgatcggtgaggccctccccttcctctcctctctctttgtcgctccgccgctagccgcttgcgcgttgccgtcgcatcgcggtgccatgtcgccatggtgccaccgctagccgcggtgccgtcgcgcgccat

SEQ ID NO: 35292 - DNA, 323 bp, Oryza sativa
  Clone ID: PAT_MRT4530_39226C.1
ctcaccaaattagtctccatagattcattatattggactgaagacaacacttcaaatcaaaatagtgactaactttaattcattcacagattaattcaagcatacatgcatgcagtacgcatgtggcatagatacaacaggtgtccaaaagatttacatttcatccaagttccaccatatctatcctgaagcaaactctcattacatgcagtatgttggcatttcccaacaagttcgcctctgtagcaaactccattacaaaaggatgacctcgtcttgctgccaaaacaagttcatcctccatagcttgttgtcaacataag

SEQ ID NO: 35293 - DNA, 646 bp, Oryza sativa
  Clone ID: PAT_MRT4530_39227C.1
atgtggtggtggcggtgcgtgtggcagcgccggtgggtagtggccacggaggagatcggcgtggtgtcactggtgttgtcctcgacggtcggtggcggcacggagatgtcgagggtgggcttcggcggcgccgatcgaggatggggcgacactgttctgaaagcagagattggtggttgcacggagacagtcgacgagccggagattgggggcggcacggaggagaccgacgaggcggagttcctggtgaagatcgggggcggtgcggaggagaccagcgagaagggcgatgaacggcggagtggtgagtggaggggacaactggcggggtgggagggcgggtgtggtgtgcggcgtgcgacggcggagtgggcgatgcggtctggacggcgggtgggggcgcgagcgccgggagacgacgggggcggcgacgcgacggggatcggatcaccgcggaaggcgtcggcggcgacctggcgacgggagcacctcgtgcggcggggatcggtggagcagatcggtggcggcgacctggcgacgtgattctttagtaaattcacaactaataaaagaacaacaaccaacgggttcacatgagaattatatattaattctgtacagcaatgacacatctgataaaaagaac

SEQ ID NO: 35294 - DNA, 167 bp, Oryza sativa
  Clone ID: PAT_MRT4530_39228C.1
aaatttaaaatacataagtcacacataaagtactattcatattttatcatctcagtaacaataaaaatactaattataaaacggagggagtaagaaccagtatgttatttgccctagaaaaccatgtgttcattgcttcttgctttaattattgcatatgatctaaa

SEQ ID NO: 35295 - DNA, 2145 bp, Oryza sativa
  Clone ID: PAT_MRT4530_39229C.1
cccacgcgtccgtcttcttcttccccacgcgtcccctttgccctcctgctgcgccgccccaactccggcgccgcaacaaagccatggccaagaagctcggcaagtcgccggtggcgaaggaggaggacaaggaggggctcttcgcgtcatgctccttcaccgacctcggcctccaccccaccctctgcgctcacctccaagataagatgggcttccaagcgccaacaagaatccaagctcaggcaattccagtcgccatgtctggacaacacatgctagtgaaggcagcaactggtactggcaagactcttgcgtaccttgcaccaattgttcaccttctccagatgagggagcctcgtgttgagagaactgatggaacttttgctctggtacttgtaccaacacgggagctatgcctacaagtttatgggattgcacagcagttggtgcatcgtttccactggcttgtccctggttacataatgggtggtgagaacagagcaaaagaaaaggcaagattgcgaaaaggaatatcaattctaattgctactcctgggcgtcttctggaccacttacaacatacgtcatcatttgtctacccaaatatgcgttggatagtttttgatgaagctgacagcattcttgaacttggttttgggaaagcactagaggatatactagagcacttgggttcaaggaatgatacttctaaccaaaataaaaacaaaatggaacctatgaaaaggcaaaaccttctgttatctgcaactctcaatgaaaaggtgaatcggttagccaagattagtttgaagaaccctgtgatgattggtcttgacgaacagaactccagtgcccatgggaagaaccacacttctctattatctgatgatgaagaggaaatactggaaaagcacaacgttacagtggaacaagcagttgacgatttcaagcttcctgcacagcttgttcaaagatatgttaaagtttcatgtggttcaaggctcgcgattcttcttaccattcttaaatctctgtttgaaagacaactgtctcataaggttgttgttttcctgtcaacatgtgactctgtagatttccaccatacagtactcagccagcttgagtggagccctggcctgcaactggatacggataagaagcaaaagtttattagctgcaaagtgttccgtttacatgggaatatggaccaggatgatcgcaagaaatcatttctgggattcagttctgagaaatctgcaattcttgtatctactgatgttgctgctaggggcttggactttccaaaagttaaatgtatcatacagtatgattcacctggggaggcttctgaatatgttcacagggttggaagaactgcaaggattggtgaaaagggggaggctctcctgtttctccaacctattgaaaccgactacttgagagatctagagctacatggtgcatcacttacagaataccccctccaaaagagagcattggaaagttttgtcacatccgaggacacgacgaagaagcttgcaagagatgccttctgttcttgggtgcgcgcctacactgcccaccgaggtgaactgaagaagatttttatggtcaagaagctccatttggggcatgtagctagaagctttgggttgaaggagcaaccctccttgttgggaaggtcacaccaggtgcaactcaagaagaggaagaaagaacagaagcgcgaaaggcctgcaaaaaggaggaaaatcccggccaagagatgaatctccatagcagaaatgcttgtaactcgaaaactaatggtggatcatgatccactccaattttgtggaactaacagccgcagcttgaaggtgaaaacattgaccccatgaagctttcatgttttggccagaagcctagagaagagctagtgtactgcctgtaatctgaaatgtatcaaaagacacagaatgttttgctcagtttgggattatctactgctctgctagttacccattttaatcagaaatataatccactgtgtttcttccttaccgatattgtttgctcacctcgaggggccgcccggtacccggttcgccctgtagggcgtcgtggctcgatgccattgaatgataaaaaaaaaaaaaaaaaaaa

SEQ ID NO: 35296 - DNA, 1212 bp, Oryza sativa
  Clone ID: PAT_MRT4530_3922C.1
ggcaggagatcagtgtactctgtttacgtgattctttttgtttcttcgaaggatgcaagaaaggaagaatacatgtatgcgtatatgattctggttttccaggaatgctactgtctgtcatgaaactctctacgattatacatagcgaagacggtagccagcaatgcagagttgcagacagagcactggcttgtcctgtccaattagtcaaaatctatccaaatcatccgtaatggagtagctaaacacaaaccattcatcacattcacactgatatcgatggatgaatgcaaggtggctacctccagaaccatcatttaatcagcaaaattgacaaccattcttcagtttaccattggaacaggttcctgaacagcattcgccctcacaaccagtatttggggaaaacataacgaaaaatatcaactgaccccacaaagaacaagggcctgttgattttattatcaaggtttccaccacaaattaagttgtcccgagtctaataaacatgaacaaaataacgggaggcagctagatgagtaacaacacaacacagcggctcagctcagataaggcagccaacaatagcaccatatgcttcagagcacagggcatcaccatctctgcttccctaccctgtatgttttatcagcacaacttcaatcctgtaaaggtaattcagagaatgatattagtaaggtgccacagcagaagcatgcctgctagaaagaatttggagccaccacccttcaatctatttcagatggatcgacatacataatactactgtaactgggaacctgcactatcttacacttctcttttgacatactgtgatatggcttggttttccaaagtatgaatggataccatgatttcagctaaaatttctaacagttttttgctatctgagattcttatgaaaaacagatcttggttgaattgcatatcccacatttgaatagaatgctacagatacactgattatttgccacagagataaacaccaatgtagcacaacaacttcagtaaatgactagcgagctctatgagagtcaagaacaatgcttgattgatcaactttcagtataatggaagagaaatgcatagagaaactctattgtaactaccaagattatgtcgaaatcggatccgagaagctcaactagtggactcctgagctgaaaagtaaaattgtaccggacgcgtggg

SEQ ID NO: 35297 - DNA, 586 bp, Oryza sativa
  Clone ID: PAT_MRT4530_39230C.1
gaaaaacctatattgggcacccaagagctgttctcatctactacccaaggtccctgatgtgcttatgacttatagagatgcggaccttaacaagttgctgattcaacataacgattactcaaactggacaaaggcaacagaatgttctatattttgttagccccccgtacacattgaggggatacaaaaatgcatgctaccctcacacttatgagttgggtgccctggtgtggatctgccggcttgggtgataccggaccatgcgggttaggcccggtggcattaaatgatcgatggccctacaagccagggacccgacgatcctgagtctctcagatagaacggagggagtgacctgtgttgtgcttgcgcaccctcggatagcatctggaaatgggggggctgttctaacaggaccgatttggtcaccttctccttttggtttgccttgctacacttcttcttcttctgcttgcgcccgtcggacttgcccgggttcgacgtctgcgggggagccttgtccttcttccgcgccttctacgcggcggcgtgcggtctgagacttattgtctggccttgctagcat

SEQ ID NO: 35298 - DNA, 483 bp, Oryza sativa
  unsure (1)..(483): unsure at all n locations
  Clone ID: PAT_MRT4530_39231C.1
atgctggcncgacgtctccgagctaaccctccagaagggcggcaatcttcagtggttgctttgttatgaaggtgacctagctgatggaagagaaactgctgcgtttcagtcaaaaaatgtagccagtggtttagctagctttgctgcctgcaccgaagtgatcaagatggtagccgtttgctgattgttgagaagaaaggaaagcaatctaaccgtgatgtggtgatactaatttctcctgagaaccgtggaaaggtgcatcctctgcttcgattatcgaagcctgaaggcaacggctgtggtagtgttttcgacaaagcacaatggatggagtatgacatcgaacttatttgtcaggatgaaatcatgttctgtattgtacagagaatagacaaaaggtgttctgagtttcgacccattcggagcttcacctaacaaaataaaactagtgtgtttgtacggataaaaaaaaaaaaaaaaaaa

SEQ ID NO: 35299 - DNA, 2877 bp, Oryza sativa
  Clone ID: PAT_MRT4530_39232C.1
atggcggcagcggttctccctgcgctgcgcccgaccccgccggcgagcaattttccggcgctgctcccgaccccgccgaggagccagatgctgcctctgctcccgacgccgtgcctcatcatcctccccgcctccttccgcgctccgccggcctccgatcccaagcccggccgcgccgacgccgtcgagaggtgggacgcgcgcaaggaagccggcagttcggcagcgtcatcgtcatcgtctagctccagcagcgggcttccctgccgcgccgactcctgcgagcgttgggacgcgcacaagaacaagaaagccggcggctcggcagcgtcgtcgtcgtcgagggccaggggcgggatcagccccggccgcgccgactcctacgaacgctgggacgcgcacaagacaccaggcagccctgcgtcgtcgaccggcagcagcaggagcccctgccgcgcggactccgtcgagcgatgggacagcaacaagcggccgctgagccgcgcgtcgtcggccgagcgctgggacatcaacaagaagcctcgccccaagaaagacgctgtcggcagcggcaagaacaactccacaagccagacgacgacgatggtctccggaacctctgccttcgacgtcctgcaccgggagaagacggcaataaggtttttgggaagcgcttcgcgcgactgctccctgttcgtccgcgacggctcgccttcctctccgctcgcgtgcttcgcgccttcgtcgacgctcgcaaccgcgagtagttcctgccgagcaaccggtctttccaccacctcgatcagggtcactctgtggctgatggttatgaaatgcttctgggtgagtactggcaaacctgaaggaattcttactgctgatcaccagaagcaatttgaggaagccactactctctttgtgggatgcattcttagcgttcttggcgatcgtctggtcaaggtgtatatgcatatgaccgacgctaaggagttgtgggatgcactgaatactaaattcggtgctactgatgctagcaatgatctgtatatcatggagcagtttcatgactacaagatggctgacaaccgttctgtagtcgaacaggctcatgagatacaaaccatggctaaggaactcgaactccttaagtgtgtcttacccgacaaatttgtggccgggtgcattattgcgaaactacctccatcatggagaagtttcggtactgcactcaaacacaagagacaggaatactccgttgaggggttgatagcgtctcttgatgttgaggagaaagctcgggaaaaagacgccgcgtctaagggcgatggtgggcagtccagtgccaatgttgtgcacaaggtccagaacaagagcaaggggaaatacaaagctcaacagaccaccaacttcaagaagcagaagaagaacaacaacaatcctaaccaggatgagaggacttgctttgtgtgtgggcaacctggtcatctggctaggaagtgtccacaacgcaaggggatgaaggcacctgcagggcagacttctaagtctgctaatgtgaccattggcaacactggagatggaagcgggtatgttggcacggtagatctgaagtttacttcgggaaagatcgtgcagctgaagaacgtgcaacatgtcccttctatcgacaggaatcttgttagtggctcccgtctgactagagacggatttaagttagtttttgagtctaataaagtagtcgtgtctaaacatggatattttattggtaaaggttatgagtgcggaggcctgttccgcttttccctttctgatttctgcaataagtctgtgaactatatttgtgccagtgtggatgatgaggctaatgtttggcactcaccctcacatggtcttctcgttcatcaaatggacgttaagacagcttttcttaatggagagctggatgaggagatctatatggatcaacctgatgggtttgtagttgaagtcaatgaggcagataaatgtgtgtactatcgccatggtgggggtgagggagttattctgtgcttgtatgttgatgacatactgatatttgggacaaaccttgaggtgataaatgaggttaaatcattcttgtctcaaaattttgatatgaaggatttgggtgtagctgatgttatcttaaacattaagctaattagaggtgagaatgagattacactcttgcagtcccattatgtggagaagatcttgaatcgctttggctacagtgatagtaagccttctctaacaccttatgatcctagcttgttgcttcgcaagaacaaaagaattgctaggaatcaactggaatactcccaaatcattggctcgctgatgtacctggctagtgcaactaggtctgatatctcctttgctgtgagcaagttgagccggtttacctctaatccgggagatgatcactggcgtgcgcttgagcgagtaatgcgctatctgaaaggtaatatggaattggggcttcactatactgggtatcctgcggtactggagggttatagtgattctaactggatctctgatgtggatgagatcaaagccactagtggatatgtcttcatactgggtggtggtgctgtttcgtggaggtcttgcaaacagaccattttgacgaggtcaactatggaagcagaactgacggcactggatactgctactgttgaggcagaatggctgcgtgatctattaatggatctgcctattgttgaaaaaccgccggttggagccgagccccaaccgccggcgccccacctccccacgccgcccgccttctccgcccctcttcgcgccccactccgcgcccgcgtcgccgcccaccttccccacatctcccggccc

SEQ ID NO: 35300 - DNA, 3717 bp, Oryza sativa
  Clone ID: PAT_MRT4530_39233C.1
atggctggttttgccgatgcactgaggccggataaattcaccggtgtgcattttaagagatggcagatcagggtcactctgtggctgacagctatgaaatgcttctgggtgagtactggcaaacctgaaggagttcttactgctgaacagcagaagcaattcgaggaagccactactctctttgtgggatgcattcttagcattcttggcgatcgtctggtcgaggtgtatatgcatatgaccgacgctaaggagttgtgggatgcactgaatactaaattcggtgctactgatgctagcaatgatctgtatatcatggagcagtttcatgactacaaaatggctgacaaccgttctgtagtcgaacaggctcatgagatacaaaccatggctaaggaactcgaactccttaagtgtgtcttacccgacaaatttgtggccgggtgcattattgcaaaacttcctccatcttggaggagtttcggtactgcactcaaacacaagagacaggaatactccgttgaggggttgattgcgtctcttgatgttgaggagaaagctcgggaaaaagatgccgcgtctaagggcgatgttggtcatctggctaggaagtgtccacaacgcaaggggatgaaggcacctgcagggcagacttctaagtctgctaatgtgaccattggcaacactggagatggaagcgggtatggtaatttacctactgttttttcagttaatcaatctactaattggtgggttgatactggggccaatgtcgcacggggttccaccgtcctaatggggaatgggtcacatgcttctgttcatggtgttggcacggtagatctgaagtttacttcgggaaagatcgtgcagctgaagaacgtgcagcatgtcccttctatcgacaggaatcttgttagtggctcccgtctgactagagacggatttaagttggtttttgagtctaataaagtagtcgtgtctaaacatggatattttattggtaaaggttatgagtgcggaggcctgttccgcttttccctttctgatttctgcaataagtctgtgaaccatatttgtggcagtgtggatgatgaggctaatgtttggcattcacgtttatgtcatattaattttggcttgatgtctcggctttccagcatgtgtttaattcctaagttttccattgtcaaaggttctaagtgccatagttgtgtgcaatcgaagcaacctcgcaagcctcacaaggctgccgaggagagaaacttggcaccactagaactcctacattcagatctttgtgaaatgaatggggtgttgacgaagggtggaaaacgatatttcatgacattgattgatgatgctactagattttgctatgtgtacttgttgaaaacgaaagacgaggctctagactattttaaaatttataaggcagaagttgaaaatcaacttgacagaaagataaaaaggcttaggtctgatcgtggtggagagtttttctcgaacgagtttgacttattctgtgaggaacatggcatcatacatgagaggacgcctccctattctcccgagtctaatgggattgctgaaaggaagaaccgcacactgactgacttggtgaatgccatgttggacaccgcgggactgcctaaggcatggtggggggaggcattgttgacctcaaatcatgtgttaaacagagttcctaatagaaataaggacaaaacaccatatgagatatggattggtagaaaaccatcactttcttatttgcgcacatgggggtgcttggcgaaagtcaatgtaccaataacgaagaagcgcaaacttggacctaagactgtggactgtgtttttctgggatatgctcatcatagcattgcctatagatttttaatagttaaatccgaggtaccggacatgcatgttggtacaattatggagtctcgtgatgctaccttctttgagagcttttttccaatgaaggatacacatagtggttcgaaccaaccctctgaaataattcccaattcaatcacaccaccagaacaaactgaacatacacatgaacttgtctctgaggaggatgtcagtgaagctcctcgaaggagtaagagacaaaggacggctaagtcttttggtgatgatttcactgtgtacctcgtggatgacactcctaagtcaatttcagaagcatatgcatctcctgatgcagactactggaaggaggctgtccgtagtgaaatggattccattatcgctaacgggacttgggaggtgacagagcgaccctatgggtgtaaacctgtggggtgcaagtgggtgttcaagaagaagcttaggcctgacggtactattgaaaagtacaaggctcggcttgttgctaagggctatactcagaaagaaggcgaagatttctttgacacttactcacctgttgctagattgaccacaattcgtgtgctactttccctagcagcctcacatggtcttctcgttcatcaaatggacgttaagacagcttttcttaatggagagctggataaggagatctatatggatcaacctgatgggtttgtagttgaaggtcaagaaggcaaagtgtgcaaattgttgaagtctttgtatggtctgaaacaagctcctaagcaatggcatgagaaatttgacaaaacattgacatctgcaggctttgcagtcaatgaggcagataaatgtgtgtactatcgccatggtgggggtgagggagttattttgtgcttgtatgttgacgacatactgatatttgggacaaaccttgaggtgataaatgaggttaaatcattcttgtctcaaaattttgatatgaaagatttgggagtagctgatgttatcttaaacattaagctaattagaggtgagaatgggattactctcttgcagtcccattatgtggagaagatcttgaatcgctttggctacattgatagtaagccttctccaacaccttatgatcctagcttgttgcttcgcaagaacaagagaattgctaggaatcaactggaatactcccaaatcattggctcgttgatgtacctggctagtgcaactaggcctgatatctcctttgctatgagcaagttgagccgatttacttctaatccgggagatgatcactggcgtgcgcttgagcgagtaatgcgctatctgaaaggtactgtggaattgggacttcactatactgggtatcctgcggtactggagggttatagtgattctaactggatctctgatgtggatgagatcaaagccactagtggatatgttttcacactgggtggtggtgctgtttcatggaggtcttgcaaacagacaattttgacgaggtcaaccatggaagcagaactaacggcactggatactgctactgttgaggcagaatggctgcgtgatctattaatggatctgcctgttgttgaaaaaccggtgccggctatccttatgaactgtgacaatcaaacggtaattgtcaaagtgaatagttctaaggataatatgaaatcgtctagacatgtgaaaagacgattgaagtctgtcaggaaattaagaaactccggagttataacgttggattacatccaaacagcgagaaacctggcagatcccttcacgaagggactatcacgaaatgtgatagacaatgcatcgaaggagatgggtttgagacccatgtga

SEQ ID NO: 35301 - DNA, 672 bp, Oryza sativa
  Clone ID: PAT_MRT4530_39234C.1
acaatcaaccccttttgttttacaatacctagcggttcccgggaagaccaacggggcaatgattaattaaaaggattgccgatcaaacctgtgtcagcacatcacaggtagtgattgcagcttattttgcacatattttacattctattctacaacggccatgaagaaaaaccccatactaatcaaggcttacttttccttgatccagaccctatgaattcgcagccagttctgctttatatgacagttcaatattcttgccatcttgtcaataattcacatcagtatactttagccactaatcaaatagaaaggtatgtataatcaccttttaaccttgatgaagagcctcaatctgtgcttagaacatgatatctatgatcatgaacaccttgcttataccacgtcactgccacagatttgttctcagcggaatgaaacaccttgtaattctgttaacgatgttgagtcatttgtatcatccgtatatatattacagcttgaaattacctgcttggcggtcgttatatagatcattgaagacgtgtgtgataccatagatccatgatttacacaatattgaacatacctttataatgctataacagtatttggctatacttgtagccaaggtttagtgcttgcctcctactgtgctattggcattcccac

SEQ ID NO: 35302 - DNA, 4437 bp, Oryza sativa
  Clone ID: PAT_MRT4530_39235C.1
atggctggttttgccgatgcactgaggccagataaattcaccggtatgctcttcaagagatggcagatcagggtcactctgtggctgacagctatgaaatgcttctgggtgagtactagcaagcctatgggcgttcttaatgctgatcagcagaaagaattcgatgaggccactactctctttgtgggatgcattcttagcgtgcttggcgatcgtctggtcgaggtgtatatgcatatgaccgacactaaggagttgtgggatgcactgaatactgaattcggtgctactgatgctagcaatgatatgtatatcatggagcagtttcatgactacaagatggctgacaaccgttctgtagtcgaacaggctcatgaaatacaaaccatggctaaggaactcgaactccttaagtgtgtcttactcgacaaatttgtggccgggtgcattattgcgaaactacctccatcttggagaggtttcggtactgcactcaaacacaagagacaggaatactccgttgaggggttgatagcgtctcttgatgttgaggagaaagctcgggaaaaagatgccgcgtctaagggcgatggtgggcaatccaatgctaatgttgtgcacaaggcccagaacaagagcaaggggaaatacaaagctcaacagaccaccaacttcaagaagcagaagaagaacaacaacaatcctaaccaggatgagaggacttgctttgtgtgtgggcaacctggtcatctggctaggaagtgtccacagcgcaaggggatgaaggcacctgcaaggcagacttataagtctgctaatgtgaccattgacaacattggagatggaagcgggtatgataatttacctactgttttttcagttaatcagtctactaattggtgggttgatactagggccaatgtcgcacggggttccaccgtcctaatggggaatgggtcacatgcttctgttcatggtgttggcacggtagatctgaagtttacttcgggaaagatcgtgcagctgaagaacgtgcagcatgtcccttctatcgacaggaatcttgttagtggctcccgtctgactagagacggatttaagttggtttttgagtctaataaagtagtcatatctaaacatggatattttattggtaaaggttatgagtgcggaggcctgttccgcttttccctttctgatttctgcaataagtctgtgaaccatatttgtggcagtgtggatgatgaggctaatgtttggcactcacgtttatgtcatattaattttggcttgatgtctcggctttccagcatgtgtttaattcctaagttttccattgtcaaaggttctaagtgccatagttgtgtgcaatcgaagcaacctcgcaagcctcacaaggctgccgaggagagaaacttggcaccactagaactcctacattcagatctttgtgaaatgaatggggtgttgacgaagaaaacaaaagacgaggctctagactattttaaaatttataaggcagaagttgaaaatcaacttgacagaaagataaaaaggcttaggtctgatcatggtggagagtttttatcaaacgagtttgacttattctgtgaggaacatagcatcatacatgagaggacgcctccctattctcccgagactaatgggattgctgaaaggaagaaccgcatactgactgacttggtgaatgccatgttggacaccgcgggactacctaaggcatggtggggggaggcattgttgacctcgaatcatgtgttaaacagagttcctaacagaaataaggacaaaacaccatatgagatatggattgggagaaaaccatcactttcttatttgcgcacatgggggtgcttggtgaaagtcaatgtaccaataacgaagaagcgcaaacttggacctaagactgtggactgtgtctttctgggatatgctcatcacagcattacctatagatttttaatagttaaatccgaggtacctgacatgcatgttggtacaattatgaagtctcgtgatgctaccttgtttgagagctttttcccaatgaaggatacacatagtggttcgagccaaccctctgaaataattcccagttcaatcacaccaccagaacaaactgaacatacacatgaacatgtctctgaggaggatgtcagtgaagctcctcgaaggagtaagagacaaatgacggctaagtcctttggtgatgatttcactgtgtacctcgtggatgacactcctaagtcaatttcagaagcatatgcatctcctgatgcagactactggaaagaggctgtccgtagtgaaatggattccattatcgctaacgggacttgggaggtgacagagcgaccctatgggtgtaaacctgtggggtgcaagtgggtgttcaagaagaagcttaggcctgacggtactattgaaaagtacaaggctcggcttgttgctaagggctatactcggaaagaatgcgaagatttctttaacacttactcacctgttgctagattgaccacaattcgtgtgctactttccctagcagcctcacatggtcttctcgttcatcaaatggacgttaagacagcttttcttaatggagagctggatgaggagatctatatgtatcaacctgatgggtttgtagttgaaggtcaagaaggcaaagtgtgcaaattgttgaagtctttgtatggtctgaaacaagctcctaagcaatggcatgagaaatttgacaaaacattgacatctgcaggctttgtagtcaatgaggcagataaatgtgtgtactatcgccatggtgggggtgagggagttattttgtgcttgtatgttgatgacatactgatatttgggacaaaccttgaggtgataaatgaggttaaatcattcttgtctcaaaattttgatatgaaggatttgggagtagctgatgttatcttaaacattaagctaattagaggtgagaatgggattacactcttgcagtcccattatgtggagaagatcttgaatcgttttggctacattgatagtactatggaattggggcttcactattctgggtatcctgcggtactggaggaatatagtggttctaactggatctctgatgtggatgagatcaaagccactagtggatatgtcttcacactgggtggtggtgctgtttcgtggaggtcttgcaaacagactattttgatgaggtcaatcatggaagcagaactgacggcactggatactgctactgttgaggcagaatggctgcgtgatctattaatggatctgcctattgttgaaaaaccggtgccggctatccttatgaactgtgacaatcaaacgataattgtcaaaatgaatagttctaaggataatatgaaatcgtctagacatgtgaaaagacgattgaagtttgtcaggaaattgagaaactccggagttataacgttggattatatccaaacagctagaaacctggcaaatcccttcacgaagggactatcacgaaatgtgatagataatgcatcgaaggagatgggtttgagacccatatctaatgatacgttaatgctattatatatctgtaatgtcatgatttatttatggaatatattaaatcattatatgcctatattctcaacattcaaaagacacgagatagaagcttatgaaaagttcaaaagaagtgcagtggggactgcattgtacattcatccctgcctgtcagaaatttcagagggtgatgctgcagatagggcgagcaacttgacagatgccactgttgacagcttgattgagtctatcatcattaaagatggggtgaaagccaagtttttctttaacattatgtctcttgctaactctgcaggagagaagttgcttgccttcagtcaatatatacttcccatgaaatttttggaaaggttgttggttaagaggctgggctggcatgtagggaaggagattttcatgatatctggtgatactagtgcagacgacagagaagtggcgatggatcagtttaacaactctgccgatgcaaaagttttgtttggttccatcaaggcctgtggagagggaatctcccttgttggtgcatctcgagtcatcattctagatgttcatttgaacccatctgtcacccgtcaagcaatcggacgtgcattcaggcccggacagcagaagaaagtgtttgtgtacaggcttgttgctgctgattctccagaggtgaagttccatgaaactgcattcaagaaagaagttatcccaaagctatggtttgaatggagtgagctctgcactactgaagacttcaaactgaatcaagttgatattgatgactctgaagatgaactattggaggctaatgctattcgccaggatatcaaggctttgtatagaaggatgttacagtag

SEQ ID NO: 35303 - DNA, 342 bp, Oryza sativa
  Clone ID: PAT_MRT4530_39236C.1
atgccgatgatgcaagaggcgcggcacggggacggtgggagctgcggcagcgcgcggccggagaaggtggtggttcgggtttgtggtggcggcggggtttcaatgctgaggaagtggtggccgagggctcggggcttagaatcgtggccgagaggggcggagtcggccgacaacgtggcggcgggagagctccatccggcggcgagatttggggaaaatttggagaagtggtggaggagtggatggcaaccacgttcacgaggtcggacgcgagcgcgggatgggggaggtggcggatttggctacggagtgggcggcaatggcggtttccggcggacttga

SEQ ID NO: 35304 - DNA, 3501 bp, Oryza sativa
  Clone ID: PAT_MRT4530_39237C.1
atgggcgttcttaatgctgaccagcagaaagaattcaatgaggccactactctctttgtgggatgcattcttagcgtgcttggcgatcgtctgatcgaggtgtatatgcatatgaccgatgctaaggagttgtgggatgcactgaatactaaattcggtgctactgatgctaacaatgatctgtatatcatggagcagtttcatgactacaagatggctgacaaccgttctgtagtcgaacaggctcatgagatacaaaccatggctaaggaactcgaactccttaagtgtgtcttatccgacaaatttgtggccaggaagtgtccacaacgcaaggggatgaaggcacctgcagggcagacctctaagtctgctaatgtgaccattggcaacactggagatggaagcgggtatggttatgagtgtggaggcctgtttcgcttttccctttctgatttctgcaataagtctgtgaaccgtatttgtggcagtgtggatgatgaggctaatggtggaaaacaatgtttcatgacgttgattgatgatgctactagattttgctatgtgtacttgttgaaaacgaaagacgaggctctagactatttcaaaatttataaggcagaagttgaaaatcaacttgacagaaagataaaaagacttaggtctgatcgtggtggagagtttttctcaaacgagtttgacttattctgtgaggaacatgacattatacatgagaggatgcctccctattctcccgagtctaatgggattgctaaaaggaagaaccgcacactaaccgacttggtgaatgccatgttggacaccgcgggattacctaaggcatgcattgcctatagatttttaatagttaaatctgaggtacctgacatgcatgttggtataattatggagtctcgtgatgctaccttctttgagagctttttcccaatgaaggatacacatagtagttctagccaaccctctgaaataattcccagttcaatcacaccaccagaacaaactgaacatacacatgaacatgttactgaggaggatgacagtgaagctcctcgaaggagcaaaagacaaaggacggttaagtcttttggtgatgatttcactgtgtacctcgtggatgatactcctaagtcaattttagaagcatacgcatctcctgatgcagactactggaaggaggctgtccgtagtgaaatggattccattatcgctaacgggacttgggagtgggtgttcaagaagaagctcaggcctgatggtactattgaaaagtacaaggctcggcttgttgctaagggctatactcagaaagaaggcgaagatttctttgacacttactcacctgttgctagattgaccacaattcgtgtgctactttccctagcagcctcacatggtcttcccgttcatcaaatggacgttaagacaacttttcttaatggagagttggatgaggagatctatatggatcaacctgatgggtatgtagttgaaggtcaatacagcaaagtgtgtaaattgttgaggtctttgtatggtctgaaacaagctcctaagcaatggcatgagaaatttgacaaaacattgacatctgcaggctttgcaatcaatgaggcagataaatgtgtgtactatcgccatggtgggggtgagggagttattttgtgcttgtatgttgatgacatactgatatttgggacaaaccttaaggtgataaatgaggttaaatcattcttgtctcaaaattttgatatgaaggatttgggagtagctgatgttatcttaaacattaagctaattagaggtgagaatgggattacactcttgcagtcccattatgtggagaagatcttgaatcgctttggctacattgatagtaagccttctccaacaccttatgatcctagcttgatgcttcgcaagaacaagagaattgctaggaatcaactggaatactcccaaatcattggctcgctgatgtacctggctagtgcaactaggcctgatatctcctttgctgcgagcaagttgagccggtttacctctaatccgagagatgatcactggcgtgcgcttgcgcgagtaatgcgctatctgaaagatactatggaattggggcttcactattctgggtatcctgtggtactggagggatatagtgattctaactggatctctgatgtggatgagatcaaagccactagtggatatgtcttcacactgggtggtggtgctgtttcgtggaggtcttgcaaacagactattttgacgaggtcaaccatggaagcagaactgacggcactggatactgctactgttgaggcagaatggctgcgtgatctattaatggatcttcctattgttgaaaaacaggtgccggctatccttatgaactgtgacaatcaaacggtaattgtcaaattgaatagttctaaggataatatgaaatcgtctagacatgtgaaaagacgattgaagtctgtcaggaaattgagaaactccggagttataacgttggattacatccaaacagctagaaacctggcagatcctttcacgaagggactatcacgaaatgtgatagataatgcatcgaaggagatgggtttgagacccatagtttgcctcctcctctgtgttgcgccgtcgctcatagactactccatcccgctcgccagcgtgcaccggcgatcgggagagcaggtctccggaacctctgccttcgatgtcctgcaccgggagaaggcggcaataaggtttttgggatgcgcttcgcgcgactgcttcctgttcatccgcgacggctcgccttcctctccgctcgcgtgctgcgcgccttcgtcgacgctcgcaaccgcgagtagttcctgccgagcaaccggtctttccgccacctcgagatcttaccttgatggcgttacggatgcgttcaacatgaccgacgaaatgctgggtgctcactcgtttttaaggcagcttatggaccagatttcccttgcaaaaacctaccttgtcgttgcgaaagaagcaaataacctgcagttttcagcagagcttagttcgcagatacggcgggcgccgcagagctttcttgcgcatgctgcagctcatggtggcacggtagcggggagcggagcagcggtggcggcctcctcgcacgcgcgcagcagctccgcatacgggataacctcgccgtccccatgtttccacttcaggccctccacatttgccagctgccgtgaagcaggaggggaggtcggggacatgataagggacggggaggcagtaaaagcggggaacgaggaggtcgtcgaggtggggagtggaagggattggagcgatggtcgagggagcgaaggtgtcggtggtggtgtgcttcatgacggcggcggcggtggcgacggacttctaggtgagtggatgcgccgtagatctgcgttgatgctgatcggtcatgagggcgcgccatcactgcgcctctag

SEQ ID NO: 35305 - DNA, 3534 bp, Oryza sativa
  Clone ID: PAT_MRT4530_39238C.1
atggctggttttgccaatgcactgaggccggataaattcaccggtgtgcattttaagagatggcagatcagggtcactctgtggctgatagctatgaaatgcttctgggtgagtactggcaaggctatgggagttcttaatgttgaccagcagaaagaatttgatgaggccactactctctttgtgggatgcatttttagcgtgcttggtgatcgtctggtcaaggtgtatatgcatatgaccgacgctaaggagttgtgggatgcactgaatactaaattcggtgctactgatgctagcaatgatctgtacatcatgcagcagtttcatgactacaagatggctaacaaccgttttgtagttgagcaggctcatgaaatacagaccatggctaaggaactcgaactccttaagttgtcttacccgacaaatttttggccgggtttcagtactgcactcaaacacaagagacaggaatacttcgttgaggggttgatagcgtctcttgatgttgaggagaaagctcgggaaaaagactccgcgtctaagggcgatggtgggcagtccagcgccaatgtcgtgcacaaggcccggaacaagagcaaagttaatcagtctactaattggtgggttgatgcaagggccaatgtcgcacggggttccaccgtcctaatggggaataggtcacatgcttctgttcatggtgttggcacggcagatctaaagtttacttcggggaagattgtgcagctgaagaacgtgcagcctcacaaggctgctgaggagagaaacttggcacctctagaactcctacattcagatctctgtgaaatgaatggggtgttgatgaagggtggaaaacgatatttcatgtcgttgattgatgatgctactagattttgctatgtgtatttgttgaaaacgaaagacgaggctttagactattttaaaatttataaggtagaagttgaaaatcaacttaacaaaaagataaaaagacttaggtctgatcgtggtggagagtttttctcaaatgagtttgacttattctgtgaggaacatggcattatacatgagaggacgcctccctattctcctgagtctaatgggattgccgaaaggaagaaccgtacactgactgacttggtgaataccatgttggacaccgcgggactacctaaggcatggtggggggaggcattgttgacttcgaatcatgtgttaaatagagttcctaacagaaataaggacaaaacactatatgagatatggattgggagaaaaccatcactttcttacttgcgcacatgggggtgcttggcgaaagtcaatgtactaataatgaagaagcgcaaacttgggcctaagactgtggactgtgtctttctgggatatgttcatcacagcgttgcctatagatttttaatagttaaaaatgtgtctcgtgatgttaccttctttgagagctttttcccaataaagaatacacatagtagttctaaccaaccctctaaaataattcccagtttaatcacaccaccagaacaaattgaacatacacatgaacatgtcactgaggaggatggcaatgaagctcctcgaaggagtaagagacaaaggacggctaagtcttttggtgatgatttcactgtgtacctcgtggatgacactcctaagttaatttcagaagcatatgcatctcctgatgcagactactggaaggacgctgtcggtagtaaaatggattccattatcgctaacgggacttgggagttgatagagcatctctatggatgtaaacctgagggatgcaagtgggtgttcaaaaagaagcttaggcctgatggtaccattgaaaagtacaaggctcggcttgttgctaagggctatactcagaaagaaaacgaagatttctttgacacttactcacccgttgccagattgaccacaattcgtgtgctactttccctagcagcctcacatggtcttctcgttcatcaaatggacgttaagacaacttttcttaatggagaactagatgaggagatctatatggatcagcctgatgggtttgtaattgaaggtcaagatggcaaggtgtgcaaattgttgaagtctttgtatggtctgaaacaagctcctaagcaatggcatgagaaatttgatagaacattgacatctgccggcttcgcagtcaatgaggcagataaatgtgtgtactatcgccatgggggtgagggagttattctgtgcttgtatgtcgatgacatactgatatttgggacaaaccttgaggtgataaatgaggttaaatcattcttgtctcaaaattttgatatgaaggatttgggagtagctgatgttatcctaaacattaagctaattagaggtaagaatgagattacactcttgcagtcccattatgtggagaagatcttgaatcgcttgggctacattgatagtaagccttctccaacaccttatgatcctagcttgttgcttcgcaagaacaagagaattgctaggaatcaactggaatactcccaaatcattagctcgcttatgtacctggctagtgcaactaggcctgatatctcctttgctgtgagcaagttgagtcggtttacctctaatccgggaaatgatcactggcgtgcgcttgagcgagtaatgcactatctgaaaggtggtggtgctgtttcgtggaggtcttgcaaacagaccattttgacgaggtcaaccatagaagcagagatgacggcactggatactgctactgttgaggcagaatggctgcgtgatctactaatggatctgcctattgttgaaaaactggtgccgactatccttatgaactgtgacaatcaaacgataattgtcaaaacatgtgaaaagacgattgaagtctatccggaaattgagaaactccggagttataacgttggattacatccaaacagccagaaacctggcaaatcccttcacgaagggactatcacaaaatgtgatagacaatgcatcaaaggagatgggtttgagacccatagcattcttgaaagaactcacctttgtgagcttgactattggtcgcagtctatggagattttgggtgaatcttctaggaagcttactaaagacctaggactgccgccttcacgcaacacatgcgaaatcaatctagggtttgcctcctactctgtgctgcgtgctgcgccatcgcttgtagaatactccatcccgctcaccggagtgcaccggcgatcgggagagcaggtcttcagaacctctgccttcgacatcctgcaccgggagaaggcggtaataagatctaatgatgcgttaatgctagtatacatctgcaatgtcatgatttatttatggaatatattaaatcattatatgcctataatctcaacatcagcacattaccttcatccccatgcagacttgtttcgggagcttgggcttcgccgccgatactggctttgccgttctaatcttgaaactggacggtgtggatcatctgttccttga

SEQ ID NO: 35306 - DNA, 2778 bp, Oryza sativa
  Clone ID: PAT_MRT4530_39239C.1
tatcatgatttatttatggaataaattaaatcattatgtgcttataatttcaacaatcaaaaactttattataggcattgtgattttactatggctggttttgcaaatgcactgaggccggataaattcatcggtgtgcattttaagacaaggcaaatcagggtcactctgtggctgacagctatgaaatgcttctaggtgagtactgacaaacctatgggagttcttactgctgaccagcagaaagaattcgatgaggccactactctctttgtgggatgcattcttagcgttcttggcaatcgtctagttgaggtgtatatgcatatgaccgacgctaaggagttgtgggatgcactgaatactaaattcggtgctactgatgctagcaatgatctgtatatcatggagcagtttcatgactacaagatggctgacaaccgttctgtagttgaacaggctcatgagatacaaaccatggctaaggaattcgaactccttaagtgtgtcttacccgacaaatttgtggacgggtgcattattgcaaaactacctccatcttggagaggtttcggtactgcactcaaacacaagagacaggaatactccgttgaggggttgatagcgtctcttgatgttgaggagaaagctcgggaaaaagatgtcgcgtttaagggcgatggtgggcagtccactgccaatgttgtgcacacggcccagaacaagagcaaggggaaatacaaagctcagcagaccaccaacttcaagaagaagaacaacaacaacaatcctaatcaggatgagaggacttgctttgtgtgtcaacctggccatctggccaggaagtgtccacctgcaggacagacctctaagtctgctaatgtgaccattggcaacactggagatggaagcgggtatggggccaatgtctcacggggttccaccgtcctaatggggaatgggtcacatgcttctgttcatggtgttggcatggtagatctgaagtttacttcgggaaagatcgtgcagctgaagaacgtgcagcatgtcccttctatcgacaggaatcttgttagtggctcccgtcttactagagacggatttaagttggtttttgagtctaataaagtagtcgtttctaaacatggatattttattggtaaaggttatgagtgcggaggcctgttccgcttttccctttctgatttctgcaataagtctgtgaaccatatggcagtgtggatgatgaggctaatattttactatgtgtacttgttgaaaacgaaagacgaggctctagactattttaaaatttataaagcagaagttgaaaatcaacttgacagaaagataaaaagacttaggtctgatcgtggtggagagtttttctcaaacgagtttgacttattctgtgaggaacatggcattatacatgagaggacgcctccctattctcccgagtctaatgggattgctgaaaggaagaaccgcacactgaccgacttggtgaatgtcatgttggacaccacgggattacctaaggcatgttcaatcacaccaccaaaacaaactgaacatgcacatgaacatgttactgaggaggatgacagtgaagttcctcgaaggagcaaaagtcaaatgacggctaagtcttttggtgacgatttcattgtgtacctcgtggatgacactcctaagtcaatttcagaagcatacgcatctcctgatgcagactactggaaggaggctgtccgtagtgaaatggattccattgtcgctaacgggacttgggaggtgacagagcgaccctataggtgtaaatgtgtggggtgcaagtgggtgttcaagaagaagctcaggcctgacgcctcacatggtcttctcgttcatcaaatggacgttaagacaacttttcttaatggagagctggatgaggagatctatacggatcaacctgatgggtttgtagttgaaggtcaagaaggctttgcagtcaatgaggcagataaatgtgtgtactatcgccatggtgggggtgagggagttattctgtgcttgtatgttgatgacatactgatatttgagacaaaccttgaggtgataaatgaggttaaatcattcttgtctcaaaattttgatatgaaggatttgggagtagctgatgttatcttaaacattaagctaattagaggtgagaatgggattacactcttgcagtcccattatgtggaaaagatcttgaatcgctttggctacattgatagtaagccttctccaacaccttatgatcctagcttgttgcttcgcaagaacaagagaattgctaggaatcaactggaatactcccaaatcattggctcgctgatgtacctggctagtgcaactaggtctgatatctcctttgctgtgagcaagttgagctggtttacctctaatccgggagatgatcactggtgtgcgcttgagcgagtaatgcgctatctgaaaggtactatggaattggggcttcactattctgggtatcctgcggtactggagggatatagtgattctaattggatcactgatgtggatgagatcaaagccactagtggatatgtcttcacactgggtggtggtgctgtttcgtggaggtcttgcaaacagactattttgacgaggtcaaccatggaagcagaactaacggcactggatactgctactgttgaggcagaatggctgcgtgatctattaatggatctgcctattgttaaaaaaccggtgccggtatccttatga

SEQ ID NO: 35307 - DNA, 1745 bp, Oryza sativa
  Clone ID: PAT_MRT4530_3923C.1
taagagcatgtaagtagcatagtatattatatggaatcctctaagtttgcaactgactaacattttttttttttttttgttaggaactgcagtttggtttatattccatcaagtattcagacagttcccccttatctgtgaggtacagtgtatatacagtgtaagttctaaagaaacatttacatatcacagtctacggacggattgattagaaggaatatatggcccttcctgatcattgctattgactgacaatcgtacacatgtgcaggagcggaatcaatcaaatttacaatctggcttccttaccagaacaaatcatctacaccaactgaagttgacggggacgaatcttcgtcctcctcctcctccatctctggctcaggctccatgccaaactctggagactcaatgtcagcaaggttcttcaggtcaaccacagagagctcatcaagctgcttcaccacaaggtccgcggcattaagctcgtagatcgggtgcttgcttgcaacagccacacacttcattctggcatcatgtgcagcctccactgctgaattggagttaccaaaaacgatgcacctctcagggatgaaactcaggagctgcgctgcatagagaaacatttcagggtcaggcttcccccggtacacatcctctgctgccacaactgcatcaaagaagcttcgcacgccaacagcgtcaattgcttcttcgataaccttccttggccgcgtggtggccacggcaagagggatcttatagttggcaagcgtgctcataaactccctcgaaccattcctcatttgataaaaggcagttccacgtaggttgcagcgtatctcctctttccgtgaggacaatctccttaactcagatgggtcccgagaccagcagagaacctcagatatcgcttgctcgcttttcattccttcaatcctcttcaatacaaacgccaggggtggagacttgccctcttcttgcgcgagggtaaaccatgcctgcctttccaattcagcgtcatcctcaacaatcacgccttcccactcaaagatcactccgagccaaccacagcccatgcgctcaagccggagcagcgggttgtgcagcttgggatcatcggccctgttccgtggaggccacgtcgttttgggattggtgatcccaatatcgcccatgtcagcgccttcccccgggatcccccggtactccctgtgagggctggcctccttggtgacccccatggcgagcgccttgacggtccagtccgcgaggcgaggttgatgctgcctgggcgccctggccacaaggcggcgaccggcgaagtgagtgggcagggggcggcaggagacgacatggagagtccggcggaggtggtggtttgccttggacctttggtcgaacaggtggtgggcaacgagggaggtgctggcgctgaccgtatcaaccaccatcatggctggatccgacgcctcgcccccacctagcgctcaagaattaacctcggtccgggaaccaaaattgttggagaggcctagccaatcaatcaatcgatcaatcaatgaatcgaaggggtggtttccttgatccaagctgaggagggaggcggcggcgactggtcgggatcggagtcgaacggcgaccggaggaggaggaggagatttcttcgggaagccgcctaccgtgccccgcctctcgtgtctagcttcttctcgcccgcccttcctaatttctttcctttgttt

SEQ ID NO: 35308 - DNA, 482 bp, Oryza sativa
  Clone ID: PAT_MRT4530_39240C.1
tttgtttttttttttttttaggaagaatatgtattaacatcatgcaagaattaaggcatggtgtttctgaaacatttatgcttctcttttttcagatacaatttccctctgtaccatcctagaagtgaactctggatctgcattattttgctccacaagtcaaccccattctccactctccaaatactacttcactatactccatcacaactgtaacttgaaacacacttcagtaacctccatacgttatggagactctctatgctgcatatttacagcacaattatgcattgcaacttgcagaagtcttctacatcagacgtacggaaggaggaaagaacagtatcagaaacatgcatgtcgacaggttttacatgagctgcatatgttggctattgcaactaggaaagaaatggttcagtagtcagtactacttaagcttaaccatgcctcatgtggtcagttggtcttgctcagcatag

SEQ ID NO: 35309 - DNA, 3690 bp, Oryza sativa
  Clone ID: PAT_MRT4530_39241C.1
catgcgcgcgctcgctcgcctggcctggcctggcctggcagggtaggcggcgcgcgtgcacgacgtacgcgtcgaatggtctgcaaaattggctcttcacccttgcgcagatgcagcctccttttgcagttttgttttgctgcgggaaattcggatttgttttgttttagaaacattccgaaaaatccggtgcgtgaaaacagcgtggagtccggataagttacgcgcgacttatccggttcggttacgcggagtggagatcgtgcgggcgcctctgtactgcgccgtcgctgttaactactccatcctgctcgcaggcgtgcacctgcgatcgggagagcaagtctccggaacctctgccttcgacgtcctgcaccgggagaaggcggcaataaggttttttggaagcgcttcacgcgactactccctgttcgtccgcgaaggctcgccttcctctccgctcgcgtgcttcgcgccttcgtcgacgctcgcaaccgcgagtagttcctgccgtgcaacccgtctttccgccacctcgatcagggtcactctgtggctgacagctatgaaatgcttctgggtaagtactggcaagcctatgggcgttcttaatgctgatcagcagaaagaattcgatgagcccactactctctttgtgggatgcattcttagcgtgcttggcgatcgtctggtcgaggtgtatatgcatatgaccaacgctaaggagttgtgggatgcactgaatactaaattcggtgctactgatgctagcaatgatctgtatatcatagagcagtttcatgactacaagatggctgacaaccgttctgtagtcgaacaggctcgtgagatacaaaccatggctaaggaactcgaactcctgaagtgtgtcttagccgacaaatttgtggccgggtgcattattgcgaaactacctccatcttggagaggtttcggtactgcactcaaacacaagagacaggaatactccgttgaggggttgatagcgtctcttgatgttgaggagaaagctcgagaaaaagatgccacgtctaagggccatggtgggcagtccagtgccaatgttgtgcacaaggctcagaacaagagcaaggggaaatacaaagctcaacagaccaccaacttcaagaagcagaagaagaacaacaataatcctaaccaggatgagaggacttgctttgtgtgtgggcaacctgttaatcagtctactaattggtgggttgatactggggccaatgtacatgtttgtgctgacatctcattgttttctccttatcaggtcgcaccgggttccaccgtcctaatggggaatgggtcacatgcttctgttcatggtgttggcacggtagatctgaagtttacttcgggaaggatcatgcagctgaagaacgtgcagcatgtcccttctatcgacaggaatcttgttagtggcttccgtctgactagagacggatttaagttggtttttgagtctaataaagtagtcatgtctaaacatggatattttattggtaaaggttatgagtgcggaggcctgttccgcttttccctttctgatttctgcaataaatgggggtgcttggcgaaagtcaatgtacgaataacgaagaagcgcaaacttagacctaagactatggactgtgtctttctgggatatgctcatcacagcattgcctatagatttttaatagttaaatctggggcacctgacatgcatgttggtacaattatggagtctcgtgatgctaccttctttgagagctttttcccaatgaacgatacacatagtggttcgagccaaccctctgaaataattcccagtacaatcacaccaccagaacaaactgaacatacacatgaacatgtctctgaggaggatgtcagtgaagctcctcgaaggagtaagagacaaaggacggctaagtcctttggtgatgatttcactgtgtacctcatggatgacactcctaagtcaatttcagaagcatatgcatctcctgatggagactactggaaggaggctgtccgtagtgaaatggattccattattgctaacgggacttgggaggtggcagagcgaccctatgggtgtaaacctgtagggtgcaagtgggtgttcaagaagaagcttaggcctgacggtactattgaaaactacaaggctcggcttgttgctaagggctatactcagaaaggaggcgaagatttctttgacacttactcacctgttgctagattgaccacaattcgtgtgctactttccctagcaacctcacatggtcttcttgttcatcaaatggacgttaagacagcttttcttaatggagagctggatgaggagatctatatggatcaacctgatgggtttgtagttgaaggctttgcagtcaatgaggcagataaatgtgtgtactattgccatggtgggggtgagggagttattctatgcttgtatgttgacgacatactgatatttgggacaaaccttgaggtgataaatgagtcccattatgtggagaagatcttgaatcgctttggctatattgatagtaagccttctccaacaccttatgatcctagcttgttgcttcgtaagaacaaaaaaattgctaggaatcaactggaatactcccaaatcattggctcgctgatgtacctggctagtgcaactaggcatgttatctcctttgttgtgagcaagttgagccggtttacctctaatccaggagatgatcactggcgtgcgcttgagcgagtaatgcgctatctgaaaggtactatggaattggggcttcactatactgggtatcctgcggtactggagggttataatgattctgactggatctctgatgtggatgagatcaaagccactagtggatatgtcttcacactgggtggtgactactccatcccgctcgccggcgtgcaccggcgatcgggagagcaggttttcggaacctctgccttcgacgtcctgcaccgggagaaggcggcaatgaggttttttggaagcgcttcgcgcgactgctccctgttcgtccgcgacggctcgccttcctctccgctcgtgtgcttcgcgccttcgtcgacgctcgcaaccgcgaagatgacatattagggtcactgtggctgacagctatgaaatgcttctgggtcagtactggcaaacctgaaggaattcttactgctgatcagcagaagcaattcgaggaagccactactctctttgtgggatacattcttagcgttcttggcgatcgtctggtcgaggtgaatatgcacatgaccgacgctaaggacttgtgggatgcactgaatactaaattcggtgctactgatgctagcaatgatctgtacatcatggagcagtttcatgactacaggatggctgacaaccgttctgtagtcgaacaggctcaagagatacaaaccatggctaaggaactcgaactccttaaatcgtctcttgatgttgaggagaaagctcgggaaaaggacgctgcgtctaagggcgatggtgggcagtccagtgccaatgttgtgcacaaggcccagaacaagagcaaggggaaatacaaagctcaacagaccaccgacttcaagaagcagatgaagaacaataacaatcctaatcaggatgagaggacttgctttgtgtgtggctag

SEQ ID NO: 35310 - DNA, 408 bp, Oryza sativa
  Clone ID: PAT_MRT4530_39242C.1
tttttggtttttttttttttttttttttttttttttttttttttttgtttttttttttttttttttgtttttgggaacagaaaagcccccggcttagcaaaaaccagcctaaacacggggaacccttaacaaaagggaccccttggccctttggaaaaaaaaaggggggaaaaacaggccaggaccgggttaaaacccagggggaacatctattacggggaacaggcaatatttttttggaggggaagactgaatacgggggtaataaagtacccggggaccgggggggaaacggcaaggggaaaggggggcccctttcaactcacctggccaaaggggggggccccggtattggggggggggaaccattggacccaccggctgggacaatcgggggtttgggggggc

SEQ ID NO: 35311 - DNA, 4524 bp, Oryza sativa
  Clone ID: PAT_MRT4530_39243C.1
atggctggttttgccgatacattgaggccggataaattcaccggtgtgcactttaagagatggcagatcagggtgagtactggcaaacctgaaggagttcttactgctgaacagcagaagcaattcgaggaagccactactctctttgtgggatgcattcttagcgttcttggcgatcgtctggtcgaggtgtatatgcatatgaccgacgctaaggagttgtgggatgcactgaatactaaattcggtgctactgatgctagcaatgatctgtatatcatggagcaatttcatgactacaagatggctgacaaccgttctgtagtcgaacaggctcatgagatacaaaccatagctaaggaactcgaactccttaagtgtgtcttacccgacaaatttgtggccgggtgcattattgcgaaacttcctccatcttggagaagtttcaatactgcactcaaacacaagagacaggaatactctgttgaagagttgatagcgtctcttgatgttgaggagaaagctcgggaaaaagatgctgcgtctaagggcgatgatgggcagtccagtgccaatgttgtgcacaaggcccagaacaagagcaaggggaaatacaaagctcagcagaccaccaacttcaagaagcagaagaacaacaacaacaatcctaatcaggatgagaggacttgctttgtgtgtggccaacctggtcatctggctaggaagtgtccacagcgtaaggggatgaaggcacctgcagggcagacttctaagtctgctaatgtgaccattggcaacactggagatggaaacgggaatcttgttagtggctcccgtctgactagagacggatttaagttagtttttgagtctaataaagtagtcgtgtctaaacatggatattttattggtaaaggttatgagtgcggaggcctgttccgcttttccctttctgatttctgcaataagtctgtgaaccatatttgtggcagtgtggatgatgaggctaatgtctggcactcacgtttatgtcatattaattttggcttgatgtctcggctttccagcatgtgtttaattcctaagttttccattgtcaaaggttctaagtgccatagttgtgtgcaatcaaagcaacctcgcaagcctcacaaggctgctgaggagagaaacttggcacatctagaactcctacattcagatctttgtgaaatgaatggggtgttgacgaagggtggaaaacgatatttcatgacgttgattgatgatgctactagattttgctatgtgtacttgttgaaaacgaaagacgaggctctagactattttaaaatttataaggcagaagttgaaaatcaacttgacagaaacataaaaagacttaggtctgatcgtggtggagagtttttcttatacgagtttgacttattctgtgaggaatatggcattatacatgagaggacgcctccctattctcccgagtctaatgggattgccgaaaggaagaaccgcacactgactgacttggtgaatgccatgttggacaccgcgggactacctaaggcatggtggggggagtctcgtgatgttaccttctttgagagctttttcccaatgaaggatacacatagtaattctagtcaaccttctgaaataattcccagttcattcacaccaccagaacaaattgaatatacacatgaacatgtcactgaggaggatgatagtgaagctcctcgaaggagtaaaagacaaaggacgactaagtcttttggtgatgatttcactgtgtacctcgtggacgacactcctaagtcaatttcagaagcatatgcatctcctgatgcagactactggaaggaggctgtccgtagtgaaatggattccattatcgctaacggaacttgggaggtgacagagcgaccctatgggtgtaaacctgtggggtgcaagtgggtgttcaaaaagaagctgaggcctgacagtaccattgaaaagtacaaggctcggcttgttgctaagggctatactcaaaaagaaggtgaagatttctttgacacttactcacctgttgccagattgaccacaatttgtgtgctactttccctagcagcctcacatggtattctcgttcatcaaatggacgttaagacagcttttcttaatggagagctggatgaggagatctatatggatcaacctgatgggtttgtagttgaaggtcaagaagccaaggtgtgcaaattgttgaagtctttgtatagtctgaaacaagctcctaagcaatggcatgagaaatttgatagaacattgacatctgcatgcttcgcagtcaatgagacagataaatgtgtatactatcgccatggtgggggtgagggagttattttgtgcttgtatgttgatgacatactgatatttaggacaaatcttgaggtgataaatgaggttaaatcattcttgtctcaaaaatttgatatgaaggatttgggagtagctgatgttatcctaaacatcaagctaattagaggtaagaatgggattacactcttgcagtcccattatgtggagaagatcttgaatcactttggctacattgatagtaagccttctccaacgccttatgatcctaacttattgcttcgcaagaacaagagaattgctaggaatcaactggaatactcccaaatcattggctcgctgatgtacctggctagtgcaactaggcctgatatctcctttgctgtgagcaagttgagccggtttacctctaatccaggagatgatcactggcgtgcgcttgagcgagtaatgcgctatctgaaaggtactatggaattggggcttcactattctgggtaccctgcggtactggaaggatatagtgattctaactggatctctgatgtggacgagatcaaagccactagtgggtatgtcttcacactaggtggtagtgctgtttcgtggaggtcttgcaaacagaccattttgacaaggtcaaccatggaagcagagttaacggcactggatactgctactgttgaggcagaatggctgcgtgatctattaatggatctgcctattgttgaaaaaccggtgccggctatccttatgaactgtgacaatcaaacggtaattgtcaaagtgaatagttctaaggataatatgaaatcgtctagacatgtgaaaagacgattgaagtctgtcaggaagttgagaaactccggagttataacgttggattacatccaaacaactagaaacctggcagatcctttcacgaagggactatcacgaaatgtgatagacaatgcatcgaaggaaatgggtttgagacccatcgaagatgctgtcctacagagcattcttgaaagaactcacctttgtgagcttgactgttggtcgcagtctatgaagattttgggtgaatcttctaggaagcttactaaagacctaggagactgcggtcactgcgggcgggcgttggcggcacacgcggcaggtctgcagcagtgcgctagtgcggcactgcggctgcggcggcagccggccaaggcggcggactgcattcacatgctcgtccttgtcccatgcatactgctgttgattgcatgcccctttctcatgctcatcctcaacccatgccgatgcaattcccttcaagacgagaaaactatccgtctttcgcgtcttggggacaagtggaacatcaggctttctgattcgagtggtaacagaaggatggttggtggatgccgaaagtttgcggaagacaatgatgttggagtgggtgatatctgcctgttcgagcctgtattcggcggacttgatagcgggcttcttcttgggcgagaggccgtcgacgacgagcgcgcagtgcacgttgaccgtcacctcccggaggtcgacgtcgcccagccggagcgtcaccggcgcgctgacgtacacgtcgagcggcacgttgccggcctcctcgctctcctccagcgcgccctgcagccccggcccgaagccgtgccgcccctccatggccaccctcaccaccgtcgtgttccggtggccctggtagaacgccggcagccgccccgagcacagcgtcgtgccgcggtacgacaccgccgcccgcgacccggcgccgtagccgatcccgaccatgtcgttggggttctccgcgcggacggacgccaccagcttggcgtacacggtgaggtcggaggagctcacgtcgaaccgcgccacggacatgtcggacacggagtaggacggggccttgggcctgcacgcgtacaggaggtacgccgacgtcgccgccaccgccacgacgaggaggaggaggaagcagcagcaccagcagaggcagccgcgcaggctgccaccgtccgtgatgcggtgccggggcatgttgcggctggcgccaggcgggaccgtggccagcgagctggagccgtactcctccgtgagcatcacgtaccgcggcggcggcggaggcttggacggccccgagcccccgtcgtacgccat

SEQ ID NO: 35312 - DNA, 711 bp, Oryza sativa
  Clone ID: PAT_MRT4530_39244C.1
atggttgaacctgtaaatgaccttcccacatttggtgttgggcattctttgggatctgtgatccaccttctcattggatcaagatacgctgtgcagcgaagtggaaatatattgatggcctttaacaataaggaagcaagcttggcagttccattattttcgcctgtaattgttcccatggcacagagttttgggccaatattttcccagttgacatcatatccaacacttcgttttggggtaaaatcctactatgggatttctcgaaacctcttgataaagttcaaagatgatcaaattgatgaaacatctattcttgcgcaagtactaagctccgaatctgccattagctcactgcttgacatgtcaattcggtcacttcctggagatcatggactaccgttacagcaggtacttcctgatgttccaccagcaatggccgatgcagtaaacagaggaggtgaactcctgacaaatctagcaacagggacaccatgggaggctgttgctaaggaggtaggcactgggggtgcacagtactgcacagtcctgtccgcaaatctacagttcagttttacaagaaatgttcatttggtagcaacggaagatgggtatttcataagactgctgcaacaacaacagcaacaacagttgattttatcacatatgggctcgacttaccctgatataaagtattgcatgtgtgtatga

SEQ ID NO: 35313 - DNA, 453 bp, Oryza sativa
  unsure (1)..(453): unsure at all n locations
  Clone ID: PAT_MRT4530_39245C.1
agcccgcaacggaagagacctggatttgtgaatagganaggattgtggcagtgggttcggcactgtgtcngtgagggggggcctctgggggaccctgtccgcacattgttganagctgcctctgagggtgagctcacgctgattgcctcagagatagcccccactgattgggtggcaactggntgtgcatccgcaccggtgtttgcccactgtccacgtgnctggtgcccctgtgttgtgtggcatgccccactgtgtctggccccacagtggatggatgtgtgccancggaaccccctgctctgggtggttggttggagatgccngtgagcctgatgtgaggggttgatgtcgcaggctggcctggtgctggtgaatgcgatgcacctgcttagaggtgattttanccaaaaacccgccngcnccnttgtggaaaaaaaaaaaaaaaaaaaa

SEQ ID NO: 35314 - DNA, 4039 bp, Oryza sativa
  Clone ID: PAT_MRT4530_39246C.1
gaggcacctcacaagcaagtgcctcaagagaaaagggctcactgaggaacttgctaagctcaccagtacaaagaaggcccactactccatcccgctcgccggcgtacaccggcgatcgggagagcaggtctccggaacctctgtcttcgacgtcctgaaccgggagaaggcggcaataaggcgctgtgattttactatggctggttttgccgatgcactgaggccagataaattcaccggtatgcactttaagagatggcagatcagggtcactctgtggctgacggctatgaaatgcttctgggtgagtactggcaaacctgaaggaattcttactgctgatcagcagaagcaattcgaggaagccactactctctttgtgggatgcattcttagcgttcttggcgaacgtctggtcgaggtgtatatgcacatgactgacgctaaggagttgtgggatgcactgaatactaaattcgttgctactaatgctagcaatgatctatacatcatggagcagtttcatgactataggatagctgacaaccgttctatagtcgaacaggctcatgagatacaaaccatagctaaggaactcgaactccttaagtgtgtcttacccgacaaatttgtggccgggtgcattattgcgaaactacctccatcttcgagaagtttcggtactgcactcaaacacaagagacaggaatactccgttgaggggttggtagcatctcttaatggtgaggagaaagctcggaaaaagacgccgcgtctaagggcgatgaacaagagcaaggggaaatacaaagctcaacagaacaccaacttcaagaagcagaagaagaacaacaacaatcctaatcaggatgagaggacttgctttgtgtgtggccaacctggtcatctggctaggaagtatccacagcgcaagggtatgaaggcacctgcagggcagacttctaagtctgctaatgtgaccattggcaacactggagatggaagcgggtatagtaatttacctactgttttttcagttaatcaatctactaattggtgggttgatactgcggccaatgtcgcacggagttccaccgtcctaatggggaatgggtcacatgcttctgttcatggtgttggcacagtagatctgaagtttactttgggaaagatcgtgcagctgaagaacgtgcagcatgtcccttctatcgataggaatcttgttagtggctcccgtctaactagagacggatttaagttggtttttgagtctaataaagtagtcgtgtctaaacatggatattttattggtaaaggttatgagtgcggaggcctgttccgcttttccctttctgatttctgcaataagtctgtcaaccatatttgtggcagtgtggatgatgaggctaatgtttggcattcacgtttatgtcatattaattttggcttgatgtctcggctttccagcatgtgtttaattcctaagttttccattgtcaaaggttctaagtgccatagttgtgtgcaatcgaagcaacctcgcaagcctcacaaggctgccgaggagagaaacttggcaccactagaactcctacattcagatctttgtgaaatgaatggggtgttgacgaagggtggaaaacgatatttcatgacattgattgatgatgctactagattttgctatgtgtacttgttgaaaacgaaagacgaggctttagactattttaaaatttataaggcagaagttgaaaatcaacttgacagaaagataaaaaggcttaggtctgatcgtggtggagagtttttctcgaacgagtttgacttattctgtgaggaacatggcatcatacatgagaggacgcctccctattctcccgagtctaatgggattgctgaaaggaagaaccgcacactgactgacttggtgaatgccatgttggacaccgcgggactgcctaaggcatggtggggggaggcattgttgacctcaaatcatgtgttaaacagagttcctaacagaaataaggacaaaacaccatatgagatatggattggtagaaaaccatcactttcttatttgcgcacatgggggtgcttggcgaaagtcaatgtaccaataacgaagaagcgcaaacttggacctaagactgtggactgtgtttttctgggatatgctcatcatagcattgcctatagatttttaatagttaaatccgaggtaccggacatgcatgttggtacaattatggagtctcgtgatgctaccttctttgagagcttttttccaatgaaggatacacatagtggttcgaaccaaccctctgaaataattcccagttcaatcacaccaccagaacaaactgaacatacacatgaacttgtctctgaggaggatgtcagtgaagctcctcgaaggagtaagagacaaaggacggctaagtcttttggtgatgatttcactgtgtacctcgtggatgacactcctaagtcaatttcagaagcatatgcatctcctgatgcagactactggaaggaggctgtccgtagtgaaatggattccattatcgctaacgggacttgggaggtgacagagcgaccctatgggtgtaaacctgtggggtgcaagtgggtgttcaagaagaagcttaggcctgacggtactattgaaaagtacaaggctcggcttgttgctaagggctatactcagaaagaaggcgaagatttctttgacacttactcacctgttgctagattgaccacaattcgtgtgctactttccctagcagcctcacatggtcttctcgttcatcaaatggacgttaagacaacttttcttaatggagagctggatgaggagatctatatggatcaacctgatgggtttgtagttgaaggtcaagaaggcaaagtgtgcaaattgttgaagtctttgtatggtctgaaacaagctcctaagcaatggcatgagaaatttaacaaaacattgacatctgcaggctttgcagtcaatgaggcagataaatgtgtgtactatcgccatggtgggggtgagggagttattttgtgcttgtatgttgacgacatactgatatttgggacaaaccttgagcgtgataaatgaggttaaatcattcttgtctcaaatttttgatatgaaagatttgggagtagctgatgttatcttaaacattaagctaattagaggtgagaatgggattactctcttgcagtcccattatgtggagaagatcttgaatcgctttggctacattgatagtaagccttctccaacaccttatgatcctagcttgttgcttcgcaagaacaagagaattgctaggaatcaactggaatactcccaaatcatggctcgttgatgtacctggctagtgcaactaggcctgatatctcctttgctgtgagcaagttgagccgatttacttctaatccgggagatgatcactggcgtgcgcttgagcgagtaatgcgctatctgaaaggtactgtggaattgggacttcactatactgggtatcctgcggtactggagggttatagtgattctaactggatctctgatgtggatgagatcaaagccactagtggatatgttttcacactgggtggtggtgctgtttcatggaggtcttgcaaacagacaattttgacgaggtcaaccatggaagcagaactaacggcactggatactgctactgttgaggcagaatggctgcgtgatctattaatggatctgcctgttgttgaaaaaccgacatgtgaaaagacgattgaagtctgtcaggaaattaagaaactccggagttataacgttggattacatccaaacagcgagaaacctggcagatcccttcacgaagggactatcacgaaatgtgatagacaatgcatcgaaggagatgggtttgagacccatagcattcttgaaggaactcacctttgtgagcttgactgttggtcgcagtctatgaagattttgggtgaatcttctaggaagcttactaaagacctaggagta

SEQ ID NO: 35315 - DNA, 932 bp, Oryza sativa
  Clone ID: PAT_MRT4530_39247C.1
gcaagttctaagctccgaatctgccattagctcactgcttgacatgtcaattcggtcacttcctggagatcatggactaccgttacagcaggtacttcctgatgttccaccagcaatggccgatgcagtaaacagaggaggtgaactcctgacaaatctagcaacagggacaccatgggaggctgttgctaaggaggtaggtagcactttaggtgcggattcgggcgttctacgagcacaaatctcaaaggatgtcaatacacttgttgacgtaattgtttcatggattgagtcaaattctggtccaagattacttcgttcatgatgacacccccacaaaggtttagcaggttgggaatgccagtaccaaacgtcaagaggattcaactgacgagtattgcaaactgtagattgcatttcaaccccgacatgctagtggtgtatatatatgctgtacatcgtagcgcatgacttgttgaatgtaatctatcttgatggagtattatgaatgtacatttccattaaaaaaatgtacatttggaaggactagaatagagcgatgagtttatgggtttgtggctgctctgatcctgacaggcactgggggtgcacagtactgcacagtcctgtccgcaaatctacagttcagttttacaagaaatgttcatttggtagcaacggaaggtctatagttctccgaggaaactggccgaggtatgcacccgtgcttatcattcttcgtaaaactgtaattatttgttaaaactatccttttacttcagatgggtatttcataagactgctgcaacaacaacagcaacaacagttgattttatcacatatgggctcgacttaccctgatataaagtattgcatgtgtgtatgatatatgtactcaaaacttttcaggtgaataatgtaagctttttgat

SEQ ID NO: 35316 - DNA, 2334 bp, Oryza sativa
  Clone ID: PAT_MRT4530_39248C.1
ctgggacaaggattaatgcacgcacgtaaggaatgcccgttgggttatttccagtcgtgacagcaaatcagggtcactctgtggctgacgactatgaaatgcttctgggtgagtactggcaaacctgaaggaattcttattgctgatcagcagaagcaattcgaggaagccactactctctttgtgggatgcattcttagcattcttggcaatcgtctggtcgaggtgtatatgcacatgactgacgctaaggagttgtgggatgcactgaatactaaattcgttgctactaatgctagcaatgatctatacatcatggagcagtttcatgactataggatagctgacaaccgttctatagtcgaacaggctcatgagatacaaaccatagctaaggaactcgaactccttaagtgtgtcttacccgacaaatttgtggccgggtgcattattgcgaaactacctccatcttcgagaagtttcggtactgcactcaaacacaagagacaggaatactccgttgaggggttggtagcatctcttaatgttgaggagaaagctcgggaaaaggacgccgcgtctaagggcgatgttaatcaatctactaattggtgggttgatactgcggccaatgtcgcacggagttccaccgtcctaatggggaatgggtcacatgcttctgttcatggtgttggcacagtagatctgaagtttactttgggaaagatcgtgcagctgaagaacgtgcagcatgtcccttctatcgataggaatcttgttagtggctcccgtctaactagagacggatttaagttggtttttgagtctaataaagtagtcgtgtctaaacatggatattttattggtaaagacgaggctctagactattttaaaatttataaggcagaagttgaaaatcaacttgacagaaagataaaaagacttaggtctgatcgtggtggagagtttttctcaaatgagtttgaattattctgtgaggaacatggcatcatacatgagaggacgcctctctattctcccgagactaatgggattgctgaaaagaagaaccgcacactgactgacttggatacacacagtagttcgagccaaccctctgaaataattcccagttcaatcacaccaccagaacaaactgaacatacacatgaacatgtcactaaggaggatgtcagtgaagctcctcgaaggagtaagagacaaaggacggctaagtcctttggtgataatttcactgtgtaccttgtggatgacactcctaagtcaatttcaaaagcttatgtatctcctgatgcagactactggaaggaggctgtccatagtgaaatggattccattatcgctaacgggacttgggaggtgacagagcaaccctatgggtgtaaacctgtggggtgcaagtgggtgttcaagaagaagcttaggcctgacgttactattgaaaagtacaaggctcggcttgttgctaagggctatactcagaaagaagacgaagatatctttgacacttactcacctgttactagatttactacaattcgtgtgctactttctctagcagcctcacatggtcttctcgttcatcaaatggacgttaagacaacttttcttaatggagagctggatgaggagatctatatggatcaacctgatgggtttgtagttgaaggtcaagaaggcaaagtgtgcaaattgttgaagtctttgtatggtctgaaacaagctcctaagcaatggcatgagaaatttgacaaaacattgacatctgcagtctttgcagtcaatgaggcagataaatgtgtgtactatcgccatggtgggggtgatggagttattctgtgcttgtatgttgatgacatactgatatttgggcaaaccttgagaggtgagaataggattacactcttgcagtcccattatgtggagaagatcttgaatcactttggctacattgatagtaagccttctccaacaccttatgatcctagcttgttgcttcgcaagaacaagagaattgctacgaatcaactggaatactcccaaatcattggctcgctgatgtacctggctagtgcaactaggccagatatctcctttgttgtgagcaagttgagccggtttacctctaatccaggcgatgatcactggcgtgcgcttaagcgagtaatgcgctgtctgaaaggtactatggaattggggcttcactatactgtgtatcctgcggtactggagggttatagtgattctaactggatctctgatgtggatgagattgttaacaaccaaatttggttatatcagtatcggagatga

SEQ ID NO: 35317 - DNA, 2503 bp, Oryza sativa
  Clone ID: PAT_MRT4530_39249C.1
tagagtgaactgcaggctagcaagcagggggcccactaactgggaaaatattggcccaaaactctgtgtcatgggaacaatgacaggcgaaaataatggaactgccaagcttgcttccttattgttaaaggccatcaatatatttccacttcgctgcacagcgtatcttgatccaatgagaaggtggatcacagatcccaaagaatgcccaacaccaaatgtgggaaggtcatttacaggttcaaccatgtttcttaagcacctgtcaaacttaaattgaacttcatctgcgatgaagaaatgatcaaagccgctagcatatggcgttgcgatcaccaaagctcccttgtctgcaagtcgttcaaggaagaaacgataagtgatctgaggagcagctccaacaaaaatcccaccaacgaagtgaacaacgaacgagggctcctgtgatttaggcttcagcacccacgctccctcgatctcggtccaatctccggtcgaaccccagccctcccgggactgcttcgccgcctccgtgatcaccctctcgatctgcgagtagagctgtatcgatccctcggacggcgccgggggagccgacggcgtggcgacccggggcccctccccttcctcagcagagcagcatgagatggcggcgcgcctcctcctcctactcttcccccaaccccaactactcgtcgccgcaactctacttcctcttcgggaaccccagaaacggcagaccgcggaggaggaggagggccccggggtgccgccgccgccgcgcagctgcacggtggacggaggcggcggagacacaacccttatcatcgccgccgactcgacgccaccacgtcgcctcgctgcggcccttgcccctgcgcttgcttgtgtcgctgtggctcgattgcttgcgcggcgcggcgatcgcggccgatctatcgattcgatgcggccgtgggagcggcgtggcgtgggcgcggagggaggcgagtcggtgggccgcgaggacacggacacgaacacgaacaccacagccagtagcgcgaacgcgagcacgagctcgagcaccgccgcgagtggtagcagcggggcgaggcggaatggggcggctgcggcggcgggggaggggtgggggagaagctccctgtcgacggcgaccatcaacctgagccaggagtacacgctcgccatccacaccagctcctaccacgagatctgggcgaagatccatgtggacggcggggatgggcagcgggagggcggcgtcagtggtggtggtggtggggaggaagatgaggaggacgaggacaggtgcaccctcgccggcgtgctccagccggaggacgcggtggtggagcgcgcgctgggggacgcgccggacacggagctgacccgcctcgccgcggactacctccgcagcacgcaccacgcgtcgctgctctgcctctccctccgccgggcgctgcgccgcgcgcgggcgctgtacgggcccatcacggacctcctcgcgctgataccgcacgcgcccccgctcgccgcgccgcaccgcgactgcgcgttcgacgccttcctcctgttcgaccaaatgcccaacccgttcccggcccccgcggccggcttccagggcatgcaccggagcttcgtcggcctcaagaaccacctcgacctgcgcctcctcagggcccgccgcaggcgccggctggtgcgctgcgcgacgcgcgggtcgggcatctgcctaatcgcctgcgccaccggcgctgcgatcgcgggcctcgtgctcgccacgcacgccatcaccgtgctgttggccgcggcccccgcctgcgcggcgtcgcgcggctcctgctgccccgcaaccgcttcgatgaaacgcctgcagcaacacatggaccggcttgacgctgcagccaggggcgcctatgtgttgaacaacgatgtcgatacaatcgagcgcctggtgggcagactccatgccaccgtcgagagtgacaagctgctggtccggctggggctggagcgtggcaggggggagcaccacaccatagaggaggtggtacggcagctgaggaagaaccacccgagcctgctacgccagctggctgacctcgaggagcacatctgcctctacttcgcagccgtcaaccgagctaggttgctccttgtttgcatgaccaacaggtcaaagatgaactggtttaccaatttgaattgtttcttgcatatcatcatcacagtcgaccccgccgactacatccagtacgacgaggcggacgtcgcgtcggaggaggccgtgtgggcgctgtacgagcggtggcgcgacttctacggcgcggagcgcagccacgacgagatgctccggcggttcgggatgttcaaggacaaggcgcgccatgtcctcgagttcaacaagtccggcgcgtccttcaccaaggcgctcaaggaaggagctgacctgacgttggaggagaacgccaaacgcctcggcatccgccgtaggctttaa

SEQ ID NO: 35318 - DNA, 853 bp, Oryza sativa
  Clone ID: PAT_MRT4530_3924C.1
tttaaaagggtttattgcgtcagccgaggggagggggcgcgcggaccgggtccacgggagtggggcccacgcggcagcctcacggtccacggtggaccgggtgcacccgggctcacaccggccggcgccgtgggtcccacgcgtcagccgcacccgagggcgcgggcggctgacggccgggccccacgcggcagccgctcggcgcgcccgaaggcggccacgccggcgcggccggcgggaggcggcgcgcccgcgcccctatggtcgccggcggcggccatgggcacgtcggagcggcggccgagagaggggaggggaagggggaaacgaggcggccggtccacggctcaccctaggtcgacggcgacgacgaaaaggcagcccggagcggaggaaggcggcggcgcggctcgggtcgacggggtcggcggcgctccggcggtcggcgagcgaaacggaggggtggacgaggtcggcgaggatgcggcgaagccgaaggaggcggcgccgaggtgggaggtggtccggggcgacgacggtggcggaccggagctcggcggcgacggcggagagagagagcgacggcgcgagctcgattccggcgaggaggaagggcggcgagaggcggaaacggacggaggagggcgcgggcgaggcggcggaagcggcgggaggaaggggatgacgggtgggccccacccgtcagcgagggtggcgggcgggcccgcccgtcagcggcgcgcgcgcggggagaggccgggtgggccgcggggagaggagagggagggggagggagatgggccgagccggcccaagagggagagggagggaaaggggactttttagagttttt

SEQ ID NO: 35319 - DNA, 233 bp, Oryza sativa
  Clone ID: PAT_MRT4530_39250C.1
gttcgtttgtgaagagcaggcaacatcagggatacaataccacatgtttctcgttctgactatggatctgccagcctggatttatctcaatgatactgtttataccatggatctacgagttattatcatagctctgtgccacagcagcgttcttacctgatgcaccggaccgagtgatcaacaacattgtctactatgctgctccagtcatcacaatagagtaaaccctatta

SEQ ID NO: 35320 - DNA, 759 bp, Oryza sativa
  Clone ID: PAT_MRT4530_39251C.1
tcaacgctcccggacgatgtgctgctcgagatcttcgtgcgctccgacgctgcatccatagtccgctccgccgccacctgcaagtcgctccgccgccgcatccttcaccagcaattccgccaccggcaccgcgccggcaacggcaacgccagcctcctcctcggcgtctcctacaggctccgcaccgatcttaataccttcgtgggcgttacgtcgtcgtcctcgccgctccgcttcaatgccagcctcctggagtcgttcgagcccatggcctcgcgcgacggcctcctcgtcctcaagcagcgcgtcgccaacaatgccggcgacggcggcgagcaccgcagcaacggcttctttttcaaggggaggagctacagtttcaatgtgtgcgtctgcagcatcttcaccggcggcggcgacgtcaccacgttcctccctcccatggatcctgccatgcatgtcaacatggagagccacaagaacatctacccgccggcgttgctcgccgtgggcgccgccggcggcggcggcggccggtcgtcgttcgagctgcttgtcatggactgcaacctgcgaacccagacgttctcgtcggagaaaggaggatggaacgccgtccgcgcggctcacctggcacccggccaccaccagcggcggccgcggatgccggtgcccaactcgctccccgccatcgtcgggcgcgccgtgcactggctcggtgtcgcgagcgactactggcaagacggcgcctactgttga

SEQ ID NO: 35321 - DNA, 552 bp, Oryza sativa
  Clone ID: PAT_MRT4530_39252C.1
tttatcctcagcctatctgggtggagggccctttgttggagccaccagctccaggaaaaaaagcagaaaaggcacaacctgtactggctcttagctgagactggtcggggtgccaccaaaaaaataggataggatagacttcgttcagcgtacagctaccgagtcaagagcagatcgcacctttgctgctggagcttgaagatggctgctactgaagctgcggccacccccgccactgcccctccccagaattcatccctgtatgtgggtgatctggatcgtgaggcaactgaagcgtccctgtatgagttgttctcccaggtcggccctgtggcatccatccgtgtgtgccgtgatgctgtgacccgtcgttcactgggctatgcctatgtgaactacaacagtgccttggactcagccgctgctgagcgtgccctggaggccctgaactacactgaggtgaatggcaagcccattcgcatcatgtggagccaccgtgaccctcaattcaggaagtcaggcgtgggcaacatcttcatcaagaaacctgac

SEQ ID NO: 35322 - DNA, 252 bp, Oryza sativa
  Clone ID: PAT_MRT4530_39253C.1
atggcgaccgaccacatcggcggggaagaaagggtggaggcgctggcggccgggagactcggtggttgtcgtcggtggtcatcgtcgtcgtcgctcgagcttggcgccggtgaccccgagcttctggaggccggcggtcggggatggagatggcccccgccggtcggggatggaggccgcggcgccgccgcccacttcctccttgcctccgcacgccgtcgagccctcctcaccgctgccacgcatcgctga

SEQ ID NO: 35323 - DNA, 5829 bp, Oryza sativa
  Clone ID: PAT_MRT4530_39254C.1
ttttttttttttttttttttcatctctttttttttttttttttttaagtccccttcattctagggaaatcaaatttaatttctggtccaggttgagatagttgagctgaattatgtacagaaataaagcggtgctacatcatcggtggggaacaagaagaacgagtttaaacatatatatgatacagaatagataagataaaaatgaaaacacttctcccttggatcatagagcctccaggtttgcaagttttagcttcttttcaacagccaagtgatcttccactgcaatgcaagtacagcgcagaatattggcaagaaaaatagccatttcagcttcacttccatgaatatggtcatggcgtgcgaggccgacactatgagtcagctgttctgcccaagtgtagatgcgagcggtcaacaaccataacttatcagcaacagagttccggaggtcatcccaaatgctgctagagagaaacgaaggaagggtgacaggcaagtcactcagtacatttgttgggttaacaatgagaagtggcatatagatgcagcagctaccacatagcaggccaacgaaatggagtaccgtggagggatgggctgtaacacagccaatatctaatgcatccagaagccactgctttttcatacgactatcagcataatatagagcaccagcaacttcaacaaggacattccaccagacaccatcaagccttgtactcagtattgtagtctttatgttccccagctcatctacagaaccacaaccgctagaacacattcttgccctgatgattatctttttggccacatcaatatgctctagctcattgaaggatgacgaaatttcgacctgcagcatatcacccagcaaacctttctgtgcaactgtaaggcatttgatagcagcagaccactcctctatgaattcaggctgaccatctttatggagactcaggagaggtgacaagctttgaatgcacttcttaatacatgagaaaccactagactcttcagatacatcctccactagacactcgcgaatgcccttccagaatgatgttcttaacatgcttctctgctcagatgagtaatccaagtacgaagatgtgggggaatacaagtactcagttaaatcctcagacaatttgtctaatcttgagagagagaagagtttcattagggttgataaatattggagcaaaatggactgcaaatttatttctaatctcctgaatctggataagtctgtcagatcatcaataaagtgcagaagaggactgatatgacttgcatgagctagagaaatatataggcattcttccctcaataatttaggatcatgatgattcgtcaacatatcaggaatgtgtacctcaacattcatgcaccgccgcacaataaccccccagtctatagatggcaatctaggagctttggaaaggcatctcaaaacagttgcgactgtacttgttgacaccatactatcaggcttttcgaagttaagatccctcaaccactgacttaagttccacactaagctttcatcagaaaaacttgtcgattgattggaatcactagaatttctttgagaacaatcatcatcaaaaataatctgattctttgatagccacctgcttctaagaaatgaaatagcccatgcagcataatcttttatgtggtcatcctcagcatccttggcaagaagaaatatctcctgaatcattgacgttgaaagagtctcaccaacagaacttgtgagtacaggacctctcaccaaagatgactccttttcgtgcttaatttgtgaatttgtcggctgccgacagatcccagtgaggtctccagcaccagcaccaaaagcgttgacagtaccaagcatgcctcctaaatggacaagaggaggatatggatgggtatatatgtgtttaagagtgtcaagaagatctttgacatcagtaaatttcatagcatgcaccccatcattcaatatagaagacaggaaagatccagcaccaatacagatcgccatcagcaaattctgaaagatagtcccagatttcttaaggctcaggagattagtagctaaagaagtgtagcgattgaacaaagcatccaagtcatcattcagcaattccaccttctggcaaaaagctaaaacagatggaagggcaaggcaagagcccatacatagcgatgccgaatcttcttcatcaaataacaaagagctagaatccacatctggtatccatgatatcaatatattcttgacttcaataatagcttcataagctccaagcctatatagtgaaacaacagagtttcccaggccaagaacaagtcctgcaacagcccaaggatcatcttctaagctaacatatttttcttccattccttccaaggattttattccacaaatacttagcttcttgagggaatagcatgaaaatggacatagctgaactaatgaagtcgtcaaagtgtgaagaatttcttcaactgatgcacgctcagtaagttgtgtagtcgcttctaattctgaatcagctgcattatctgctctggctaaaagagcttggcaacaataacccaatccgagtccacaagctccttttacaaggtagctttcagtttttgagattacctcaaggagtccattgataacctgaagcttgctccttttgtccgtgggatgaaaacaattcgatattagtcccagagaaagagccgtggaccactgttgatgttcatgctcatattggaatagccatctcaaaagaaaatctgatgcagaagagattactagatgggctgttggaggaacaaccaagcacaatgctccaatagcaagagcaatgctaacaacaacactaggagtggatacaggaacacacttgcacagaatcttaaatatatcatcagctgcttttgaagccttgttcaactttgaggattctttagtgtctagacaagcaataacagcttgcatccaatttgaaacaaatgatttccatgaatgcagtgcaagaagagctaccaccatatttcttgatatatacatagattcagccatctccactaatgcttgttcatatgcagcatgtactctaggcaaatccttagatttcccttcatgaaggatgtccttcggggtaaaattgagagttagaagagctgcaccaggaaaccgatgatgcgctgactttcctacaatttgagactgaagtgaattaaagcctgacgcggccgtattaaacatgcaacaggacagagtgcctatttctttaaacaccgcctgagggaaagcatccagtagcttctcaaatttatgcactgtggttattttatccgtagtcaatcgacgacggttaatgtgctcaaaattgataatctcggcctggaagttatccattgctttcagaacttccagatttcgttcagtggtaaagcattcataatttatccgccagaaatcaggaatagcatctttaataagcgagatcttatagtgggacaaggactgaaaagcagttcctcttgctttaacccagagagggtcaacatttttctccctgtaagttccaatgctccacaatatttgtatcaagtgttttgaggttccaggatatgcttcagaatccattgctccccatctcaatagaatgcataagccatgggaaacagtaggatctatcgaaaaatcaagcagctgctttgatataactttccaggcagtatagaaatcaactacatcttcttcgcagagataggagaggctctccaggccaagagcttgaacaacagaatcacgactctcaatacaagccgagacagatagtatgagatcaacgcctctatctgggttctgcttgcacacatcacgtactgatgcagctatacttgtgaaaacttctctatcatcaacagaattggaaaaattttcaggatccagagttccttgcaagttttggaatgcccaatcagtgacagtccacatcttgcaaagcaatcgaacagctataggatacagaaccgattttacgtcctttttaagcattgatgatatcaattgcagtgagagtggaagcacaaaaccatgtacagcgagtgatggcaatgactctagcaaactaagcaaaatatttgcatcgcagttattgttgctgtacaggaccttcgtatagaagaggataagtaccaacaacggcatacccagttttgggtctgttgcaccaagaagagccaaggactgagcagcagaagtaccaatttttgggtgcattaccaaaacagatactgcagagcttagcagagatgatattgctactgattgtatctttttcgaagacaggctgtccagtgaaagcttttccttgcgaagggctgacaggtactcgtttatttgatgtgtccaatagtttggttcggtcgaatttccagcagactcagctaaccccctgctagttatatattttgtaaaaatgaaacccgatgaagacgactgagaccatagatgatgtacaagtttaggaagaatagatgtaggtttgcttatgtgatgaaccattgagctgtcctgttgttcagatgaacaagatgccagcaaatctaaaacaagcacgtgaaatcttgatagaacatgagatgccactgatttgacagatttagatggagatataacaaggttgataacaggcagaacacaaacaatctcctcgctgaagtgatgtactgcttcatttgttctgagtgcattttcatgtctccactcaatcaaaaaggccagtagtttcaatccagacagttgctcatgttcaaactccagcccactgagaatgaaagcaagggagctgagaacaacagaaatctctggaagatagcataaaccaaggtccttttgagccaaaaacaaatgttttgataatccaagtacaacagaagtatttcccataaattggtgatgaagtgagcattgtgatagaagcatttctatcaactccacactatttgcttgggcatcataagttgccatttgagcatgagcaaacttcctcaataataccacataagcatccaccaagcactccacggagctaagccagagccgcacttcctcaccatccccacggccaaaatgcagcaagcactccgcaagcaatttcagcaccgggactgcagaatccggccttgccgctgcaacagccgctgcggccagtgcgccaatcaaatccttcacgaacgcagtgtcccccttcctcaccgcagcaaacataacgaatggcctcaaaaaccctacaaccccgtgtaccccctcggcgaccaacctggccgcctgccgctgcagctccgcgcgcgcgccatcggcccccgaggcgagcgcctggacgaacgggtgatcgtggggcgggaagcgcgacgcggcggagccggagcgaagcgcgcaggagacgagcgcggcgacggccttgacgaagcaggaggcgaggcgcggggacggggaggcggagaggggcgcgatgaggagcgggagggcgagctccggggagaggaggtcggcgcgggatgcggcgagtcgggcgacggacgccgcggcgtgcgccgcgacggccgggtgcggcgacgcgaggagcgaggagagcgcgtcgtgcgccgcggaggggagtggcgggggcacggaggtgaggaggtggcggaagagggccgcgacggcgtgccgctgcagggtggggtcggggacgcgggtgcggtcgacgagtcgccccaacgccaccgcccccgcccccgcccccgccgccgccgcggcggcggaggaggaggaggccat

SEQ ID NO: 35324 - DNA, 123 bp, Oryza sativa
  Clone ID: PAT_MRT4530_39255C.1
atgaccacgacgagtggcaggactccctcgccgcggctgaggtacaacgagcttttgcagccgatgctggcagtggtcgccaccttgaggaccatcaagcgtttccagagtagcacgccatag

SEQ ID NO: 35325 - DNA, 404 bp, Oryza sativa
  Clone ID: PAT_MRT4530_39256C.1
caattggatgaaacaaccaagtcatgccaagcaacagtggtgggccaaacaagctcaaggctggtgagccaaacaaatctgcaactgaccagccaatttagtagcgttcaggcagattgtcgcaagcaactacagctgcacaggtcggtgttgtctacttggatcagactcaagctcaagctcaagctttgctgccacttaaacgtcgccatccatatgtggtatctatcctgaactgactacatgtgctccgaggagcattcccacccgttggtggtgtctgggtgactggaatggtaatagtataagggttcaaatggtgtaaaaataaagtcatggcatcatcagggcgtggacaagtggaaactggatggtgcatatgaaatgctgaaatgaaaatgcac

SEQ ID NO: 35326 - DNA, 197 bp, Oryza sativa
  unsure (1)..(197): unsure at all n locations
  Clone ID: PAT_MRT4530_39257C.1
cgattcggtataaattcatctgtccanacccatagacccgggatgttgtgtgccaccctctgtggaaactaatttttgggggtcccttggtttgttattcgttccacgagnctccactggtgtggaagtgtcctttttgtagaaatggganacctttataancccttttataggagtgactttatcatccaaaaaaa

SEQ ID NO: 35327 - DNA, 450 bp, Oryza sativa
  Clone ID: PAT_MRT4530_39258C.1
gagaaacaagccatgctgcagctctatagcatataaatgtaaccatttggaatacagggaataaatgaggcgtgcatacatgcatgctatactatgcaaggcaggacgaacacaggtgcaaagcacatgtcattatacgtgagacacataacacatacagagagttggaacgatcgaaaaaggaaggtgagatctgcgataagagaatgagaacatggacatgagtggggagagctaaatctgatcactggcggagagcggtatggcgaatttgctgactgtggggaggcacagggtgaggaccaccgccagatggatgtaaaggcctcagtcctgagaaacattgttaaagaacctgatgtggccaaaagccgggaactggagcggagtgtcacactaccaaagactggtggacggaatgcaacgtagagcatcaatagaggcagacgc

SEQ ID NO: 35328 - DNA, 349 bp, Oryza sativa
  Clone ID: PAT_MRT4530_39259C.1
gtaaaaacccaggggcttgataaaaaaaagtagatgagcaatcataggtcaacggtggaatcgaggaaaacctccgccaggtccacaggcggtcatatcgcaggaaaaaaagggaccaatataacaatatcacaatatgccgcaactgtcgaaaggcagctcaagggcattttgagaaatgctaaaaaatcccaaagggaaggtgacatgtttgacgggacgtgtaataggatcataaaaatcaagctataggaagatcgaacggatcggaccagtgtttttaaaaaaaccgcaagcaagatgaacaaggttttcccagaacggatgcgctgtgaaatcaccaaggcca

SEQ ID NO: 35329 - DNA, 292 bp, Oryza sativa
  unsure (1)..(292): unsure at all n locations
  Clone ID: PAT_MRT4530_3925C.1
cggtccggtccatgntccagtctcccaccgtccagtcccagacagagtcctacaggcgcacgattcctcacctcctcatcggccggcgccgccgcggggccaagccgtcgtcgcctcctcgctgcggggccaagccgccaccgccgccgggaccaatcgcctcctcgcacagtcggcacatcggcgtcgacggagcaacccacgccggatctgacaagacggataagggctgcagtcgcgggaaaatgacatagagcgctgcggttgccgccgacgccagctggtttgtgcg

SEQ ID NO: 35330 - DNA, 617 bp, Oryza sativa
  Clone ID: PAT_MRT4530_39260C.1
ctccattaagatgctggaggggatcattgcaacttcatacagtgaaggcgataagttctacatcgaccccatgaagcttttgcctctctcacgcttcttgccacagccaaagtatgatgctagcctaatttatagcttactgtttccggtgttaaatttgcttgtagattcgggttcacgtgcaaacttgaattgataacaccatgtcatgccaactgctatctttctcccaacaagtatttctaaaactcaattgaacattgataattctcaagaaagctaataagtgttacaaatactagcagctctaagaaatatattcaaattctaatgtatgcctattaagcccaaagattccactattgtagtctgcattgtttggaattaattgatgaatctactgcaggttctgactacagaaatagtgcagcttctctgtcctatatgactatacgaaatgttacaagcaaagcatgaggaatgaatataaaaaactaaacaaatagtgaaatatctatctaattaacaccaaggagttgcgtaactctgtttgccttctctgcaggggccaaagtcaaggagggggcagaggtggtggccgtggtggtggaagaggc

SEQ ID NO: 35331 - DNA, 352 bp, Oryza sativa
  Clone ID: PAT_MRT4530_39261C.1
ggatggatcatattatatttattacatttttttacattttttttttgtttaaaaacataaagcgcggggctgagatatttttaataaaaataggtgggacacaaaaaaatttagggtgaactagtcccccttttcccaaaagttgaagggagatcaggtgaaacaaaaacaaagcagggtctcggggggtcaattgcaaagggacgttgacctggggggaacacccgaacatgggggggaggccttgtcggctattattggacccattaaacaggggtttttttgactgtgacggtttatttgccaacaaacttctagtaaacagggggtttgtgggggaaaaaactttttg

SEQ ID NO: 35332 - DNA, 918 bp, Oryza sativa
  Clone ID: PAT_MRT4530_39262C.1
atggacgagggcgccagatgtgacactgctgtagaattgtgttttttaaggccattgtccaaggaccaactgcccaatctggtactacttgtcttcggcaaaacagatttacagggagaattcgcaaccgctgttcgctccgagtggagattcccgtcgattcctatcagtatgccctacgcactgcctcagcgatttcatattgtgcacatggacataaaatacatcatatgcctattcattcatattttgcagatttcaagaaaggcatcacggaaagatccaagcggagccttaagttcttggaacactagcactcacttctgttggtggaaaggtgtcatgtgcaccactgcacggccgtttcgcgtctcaacgctgaatctctccgcccaaagcttggcaggggaaatcacctcctcccttgcaaacctcacgtttcttcgtgcacttgacttgtcctcaaatcgcttctttggtcggttccctctccttaaccacctacagcatctgggttttctttacatgaatgacaactcactcgatgggattatttcggacacacttacaaattgttccaaattgacacaaatagacctctctaataaccagctgcagggtgcaattcctcctagaataggatccctagagtatctgaaccttggcaataatagtctcactggaatcatccctgcaaccattggaaaccttgtcaaatttggatatttgaaccttggtatgaataatctcactggaatcatccctgcaaccgttgaaaatctcaccctgttaacagttctcaggcttgaatacaatcagtttgaaggaaaaatcccagatggggtctggcaattggcaaatctgacatatcttctcctaggtcagaataggctatcaggtggattccacaggccctaa

SEQ ID NO: 35333 - DNA, 757 bp, Oryza sativa
  Clone ID: PAT_MRT4530_39263C.1
cgtctcgccttccagccatatgggccagcgccaccgagccaccgccgccggtctcaccgctcgccggctcgccgtctcgccttccagccatcgccgccgctccggcgacagccccttcgcctccgcactcaccattcccgcttctacggcgtgccatagcgccgccgacgcggggggactcgcggcagtgcctctcctccagacgaccagaccaaacgcgtggcggcggcgccgtggaaggcacggtggagaccgccaagacgagagcaaaattctcatccgggagggacgcatcggggaggggacaggtcacaggttgaggcgcagcagccgcgtggaaggtcgctcgctggtggccacgggggaatcccctgatgcgaggtcgtcgtcatggagacatccgctgctggtcagttctgttcctcaccaagagaacggtcatttcattaccttgtcggagaatcagttatatacctgcagatggttacttttgtctgttgacgtcattcctgagcagaagccggaggaaggtgacactctgacggatcgtatcggtatggctgacacgagacgtctggctgcagctgtggttcgtcgagtcttctttcccgggccagaggtcgccgtcgtacaaagcatgtacccgttccggccatctggacacacggctgagcgaggttgcttgctcatggcgaccgtctacgacgtcgacgacgatgccacttgctccgaggaggttggctgggctgcatgctga

SEQ ID NO: 35334 - DNA, 1551 bp, Oryza sativa
  Clone ID: PAT_MRT4530_39264C.1
atggagggcggcggcggcggcggccatggccatcacggcggcggcggcggtggccatggccatcacggtggcatcggaggaggggaggcgcagatcaaggggacgctgacgcacggcgggaggtacgtgcagtacaacgtgtatggtaacctgttcgaggtttcgtccaagtacgtccctcccatccgccccgtcggccgcggcgcctgcggcatcatctgtgcggttgtgaatgcgcagactcgtcaggaggtggcaatcaagaagatcggcaacgcgttcgacaaccagatcgacgccaagcgcaccctgcgagagatcaagctgcttcggcacatggatcatgataatgctcttgttgtcatctcaataaaggacatcatacggccaccaaggagggagaacttcaatgatgtctacattgtctatgagctcatggacactgatcttcaccaccttcttcgatcaaaccagccactaacagatgatcactgtcagtattttctctatcaggtactacgaggattgaagtatgtgcattcagcaaatgtcttgcacagagacctcaggccaagtaatttgctgctgaatgcgaaatgcgatcttaagatcggagactttggattagcaaggaccacaaatgaaactgacttcatgatggagtatgttgttactcgatggtacagggcacctgaactcctgctaaactgctcagagtacactgcagctattgatatctggtcggtaggctgcatccttggtgagatcgttacaagggagcctttgtttcctggaaaggattatgtccatcagctgaggctaataactgagttaataggctcacctgatgactcgagccttgggtttcttcgaagcgacaacgcccgcagatatgtgaggtcgcttcctcaataccccaagcaacaattccgtgcacggttccccactatgtctagtggtgccatggatttgcttgagaggatgcttgtgtttgatcccagcaaaaggattactgttgatgaagctctgtgccatccatacttggcatcccttcatgagatatatgatgaaccagtctgcccagcgcctttcagcttcgatttcgagcagccgtcgctcaccgaagaagatatcaaggagatcatatggagggaggcacttaagttcaaccctgaaccaattcactagatgaatttccaatgaagaacggaagcagatcacactggcagatgatcatccatccactccttggggaagacatgagccaacagcatgatgtatagttgatcaccctctcagcatctcatcttgtggcttgtcagcgacaccctgacatcgcaaattcggacatttatgaaaacaagaaaagcttgatcaaataatttgtagtacgaaaaaaatcaggagcttaactgtatcttcttgttagatttgtatctatcccatttggttgtatgcttaagaaacctgggagcttgtcactagttatggaggtacagcatctccagatactcttcagtcatcagttcagttcaccaaaaaaaaaaaaaa

SEQ ID NO: 35335 - DNA, 522 bp, Oryza sativa
  unsure (1)..(522): unsure at all n locations
  Clone ID: PAT_MRT4530_39265C.1
atgcgccgtcggccgcaccaccaccaccttcagaatcgcagcggcaaggtcatcctcggcatcgccttccctccatcccaacccctccactgtccgtcgtcgtcgtcaccgttcgtcctcgacgtcgacgtcccgtcgncggcccggcacatcgtctcgcggcgccgcctccgtcgtcggattcgcaacggcgtgttccacgccgtcctcgtctccgtccagccactgccggctgcccacatcgcctcctcgctggccccggtcgtcatcgtcgccgtcctcccgtcgttcccggtcgccgtggcgttcgtccctccgtcaagccgttctcgttcgtcgtcctcgctccgtcaagtgccgcagccccgtcatcgtcttcgtcctcggctccgcgtcgccaagccttgtgccggccgcgtctcgccttcatccaagaatggccgccgaagtcgtcttctcgccgttcgtctcagccgcgcccgttcgttgtcgtcgttcccacgcctcgtcgcgtggtggtaa

SEQ ID NO: 35336 - DNA, 407 bp, Oryza sativa
  unsure (1)..(407): unsure at all n locations
  Clone ID: PAT_MRT4530_39266C.1
gcacgaggtcaagatgaagctaaaggagataattaaggaccataccttatgcttgtttgataagttgttcagatttactagagtttagcaccagtgtcatatgatcctccaatcttactaatgccattttaggagcagaaaggaggatcggtttaccttgctttgtctgatagagttgtagtagtttttatttaccctggccttgtgtgtcgatgaggcagagggaagattttactttagtagtacaagctccggacagtgtagcttggttgttcatctaagcactgtaagttagggaagaactatctcaatgttcttttgtttattctgttcaatgttggtgtgaatctttggctgtttgtagagtcctactgtnttgttccaaaaaaaaaaaaaaaaaaaaaaaa

SEQ ID NO: 35337 - DNA, 153 bp, Oryza sativa
  Clone ID: PAT_MRT4530_39267C.1
atgaggaacggcgcgaatggtggcgcgaaggccggggtggcgcgctgcagcggctctggcatgatggggctggtagtggaagaggaggagcgaccagagttgcggcgaaaacaatgcgacgctgagagtggtggcggcggccaccaaccctag

SEQ ID NO: 35338 - DNA, 3645 bp, Oryza sativa
  Clone ID: PAT_MRT4530_39268C.1
atggctggttttgccgatgcactgaggccggataaattcaccggtgtgcattttaagagatggcagatcagggtcactctgtggctgacagctatgaaatgcttctgggtgagtactggcaaacctgaaggagttcttactgctgaacagcagaagcaattcgaggaagccactactctctttgtgggatgcattcttagcgttcttggcgatcgtctggtcgaggtgtatatgcatatgaccgacgctaaggagttgtgggatgcactgaatactaaattcggtgctactgatgctagcaatgatctgtatatcatggagcagtttcatgactacaaaatggctgacaaccgttctgtagtcgaacaggctcatgagatacaaaccatggctaaggaactcgaactccttaagtgtgtcttacccgacaaatttgtggccgggtgcattattgcaaaactacctccatcttggaggagtttcggtactgcactcaaacacaagagacaggaatactccgttgaggggttgattgcgtctcttgatgttgaggagaaagctcgggaaaaagatgccgcgtctaagggcgatggtgggcagtccagcgccaatgttgtgcacaaggcccagaacaagagcaaggggaaatacaaagctcagcagaccaccaacttcaagaagcagaagaagaacaacaacaatcctaatcaggatgagaggacttgctttgtgtgtggccaagttggtcatctggctaggaagtgtccacagcgcaaggggatgaaggcacctgcagggcagacttctaagtctgctaatgtgaccattggcaacactggagatggaagcgggtatggtaatttacctactgttttttcagttaatcaatctactaattggtgggttgatactggggccaatgtcgcacggggttccaccgtcctaatggggaatgggtcacatgcttctgttcatggtgttggcacggtagatctgaagtttacttcgggaaagatcgtgcagctgaagaacgtgcagcatgtcccttctatcgacaggaatcttgttagtggctcccgtctgactagagacggatttaagttggtttttgagtctaataaagtagtcgtgtctaaacatggatattttattggtaaaggttatgagtgcggaggcctgttccgcttttccctttctgatttctgcaataagtctgtgaaccatatttgtggcagtgtggatgatgaggctaatgtttggcattcacgtttatgtcatattaattttggcttgatgtctcggctttccagtatgtgtttaattcctaagttttccattgtcaaaggttctaagtgccatagttgtgtgcaatcgaagcaacctcgcaagcctcacaaggctgccgaggagagaaacttggcaccactagaactcctacattcagatctttgtgaaatgaatggggtgttgacgaagggtggaaaacgatatttcatgacattgattgatgatgctactagattttgctatgtgtacttgttgaaaacgaaagacgaggctctagactattttaaaatttataaggcagaagttgaaaatcaacttgacagaaagataaaaaggcttaggtctgatcgtggtggagagtttttctcgaacgagtttaacttattctgtgaggaacatggcatcatacatgagaggacgcctccctattctcccgagtctaatgggattgctgaaaggaagaaccgcacactgactgacttggtgaatgccatgttggacaccgcgggactgcctaaggcatggtggggggaggcattgttgacctcaaatcatgtaccagacatgcatgttggtacaattatggagtctcgtgatgctaccttctttgagagctttttcccaatgaaggatacacatagtggttcgaaccaaccctctgaaataattcccagttcaatcacaccaccagaacaaactgaacatacacatgaacttgtctctgaggaggatgtcagtgaagctcctcgaaggagtaagagacaaaggacggctaagtcttttggtgatgatttcactgtgtacctcgtggatgacactcctaagtcaatttcagaagcatatgcatctcctgatgcagactactggaaggaggctgtccgtagtgaaatggattccattatcgctaacgggacttgggaggtgacagagcgaccctatgggtgtaaacctgtggggtgcaagtgggtgttcaagaagaagcttaggcctgacggtactattgaaaagtacaaggctcggcttgttgctaagggctatactcagaaagaaggcgaagatttctttgacacttactcacctgttgctagattgaccacaattcgtgtgctactttccctagcagcctcacatggtcttctcgttcatcaaatggacgttaagacagcttttcttaatggagagctggatgaggagatctatatggatcaacctgatgggtttgtagttgaaggtcaagaaggcaaagtgtgcaaattgttgaagtctttgtatggtctgaaacaagctcctaagcaatggcatgagaaatttgacaaaacattgacatctgcaggctttgcagtcaatgaggcagataaatgtgtgtactatcgccatggtgggggtgagggagttattttgtgcttgtatgttgacgacatactgatatttgggacaaaccttgaggtgataaatgaggttaaatcattcttgtctcagaattttgatatgaaagatttgggagtagctgatgttatcttaaacattaagctaattagaggtgagaatgggattacactcttgcaatcccattatgtggagaagatcttgaatcgctttggctacattgatagtaagccttctccaacaccttatgatcctagcttgttgcttcgcaagaacaagagaattgctaggaatcaactggaatactcccaaatcattggctcgttgatgtacctggctagtgcaactaggcctgatatctcctttgctgtgagcaagttgagccgatttacctctaatccgggagatgatcactggcgtgcgcttgagcgagtaatgcgctatctgaaaggtactgtggaattggggcttcactatactgggtatcctgcggtactggagggttatagtgattctaactggatctctgatgtggatgagatcaaagccactagtggatatgttttcacactgggtggtggtgctgtttcatggaggtcttgcaaacagacaattttgacgaggtcaaccatggaagcagagctaacggcactggatactgctactgttgaggcagaatggctgcgtgatctattaatggatctgcctgttgttgaaaaaccggtgccggctatccttatgaactgtgacaatcaaacagtaattgtcaaagtgaatagttctaaggataatatgaaatcgtctagacatgtgaaaagacgattgaagtctgtcaggaaattaagaaactccggagttataacgttggattacatccaaacagcgagaaacctggcagatcccttcatgaagggactatcacgaaatgtgatagacaatgcatcgaaggagatgggtttgagacccatgtga

SEQ ID NO: 35339 - DNA, 372 bp, Oryza sativa
  Clone ID: PAT_MRT4530_39269C.1
atgggaaagctagaagtgatatctgaagctgacagaatgaatgtatttcctggcatacaatgtacttccccatggaattatccagttaaagacatccagagctatgaaaacacaaccaacaatgtttgctatgctgagactcaagcaaactccaacaacaagaagggccacatggagctgaccaaagactttacgcttgccttgctccggtcgatgcttctaccggcctacgcagtctgtcctctgctctcgaagccagctgcaatacctggtgcagcagccatgggaagaagggaattggggaatgtgagtttgctcgagatggatatggctaagggcagggagccagggattgatgactacatgctgtga

SEQ ID NO: 35340 - DNA, 5381 bp, Oryza sativa
  Clone ID: PAT_MRT4530_3926C.1
cttgttggacgttgtcggtgtggtgcgcacggcccaaagtaccgaggggagttcttcgacccacttcttgtcatgtgacatgagcctgtcgtagacacgggtcttgattccttgtagtactatgctgtttgccctctcgacttgtccattgctttgagggtgagagaccaaagcgaagcagatcttgactcccagtccaatgtagtaatcctggaagttggcactgatgaactgggagccgttgttagttatgatgcggtgaggcaatccatatctgcaaaatatccctttaatgaatttgatggtgttgtcggccttaatttcccccatgggtgttgcttcgatccatttggtgaacttgtcgatcgccacgaacaggaacttgtagctgccttgtcctcgtgggaatgttccgagtatgtcgagcccccagcacgagaacggccaagtgagggggatggtttgcagtgcttgtgctggtagctttgtgtgtttgctataaaattgacaagcttcacaccgttgtaccatgtcgcaagcttctttgagggcagttggccagaaaaatccttgtcgaaaggcttttccgaccaatgtacgaccggtggcaagtgatccacagatcccttcgtgtatgtcgaggaggaggtgtttgccgtcgtcggacgagacgcatttgagaagtaccctgtttggcgccttcttgtatagatcattgctgatcatacaatagattttggcttgacgggttattttcttggcttctgcattgtcctcaggcagcgcgtcgctattttcgtcgtttgcttctttcatcgatggttttgtcaggacgtccaggaaggtgtcgggttcgagtggctcccgtctagacgcacgccgtgccagattgtctggttcgatgttgtccttgcggtatacgtgtcagacctcgattccatcaaatcttttttccagcttcctgacttcagcgaggtacttggataactcggggctagagtacttgtagtctttgtgcacctggtttgcgactagttcggaatcccctttcatgatcagtcgcttgactccaagtgcagctgcagctcttatcccagcgagtagtccttcgtactcggctgtgttattggtcgccctgaagttgaggtgaattgcatgcttgaactgatctcccgaaggtgatgtcaagatgaaccctgcccctgctccttggctattgagtgcgccgtcaaacgccattgtccacatttcgttgtcggtttgactgtcgagaacctgggacttgatggctgttcgtggcacaaaatggacatcaaactggcttagcttgactacccatttcgcaatgcggccggcaacatctttgtttctcacgacttcaccaagagggaaggaggaaacaactgtgaccctgtgggcttggaggtagtggcgtagcttttttgacgtcataattactgcatagagcagtttttgaatctgtgggtatcttgtcttcgcgtcatggagagctttgctgacgtagtagactggtctttgcaccttttctctctcgacaacgatgacagtactcatagaatatggcgtggcggcaatatagaggaataattcttcattaggttggggagcaacaagtacaggggggtttgacaggtagcgcttgagtgcgatgaacgcctctttggcttactgtgtccatacaaatttgtcttgttttttcagcagagcgaagaaggtttgtcctcgttctcccatcctagtgacgaacctgcttagtgccgccatgcatccggttagcttctgtacttccttgagccttgtgggcgacttcatgttctcgattgccttgatcttctcgggatttgcttctattcctctgccagagacgaggaacccgagcagcttgcccgatggtactccgaacgtgcacttctcaagattgagtatgaggcgatatcgtcagaggttgtatgtttcccgtagatcgttaatcaatgagtcgcctgtcttggtcttgacaacaatgtcatcgatgtaggcctcgacattattcccaagctgatcgttaagtgccccttggaccgtgcgttgcaaagtgtttcctgcggttatcagtccaaacggcatcttaacatagcagaatacactgaacggcgtgatgaatgctgtcttctcctcgtcctcttttgccatgcaaccaactgttaagtccaccagttggtctattcgaggaagagggaagtgatccttgggggcacgctttgttgaggtcggtgaagtcgacgcacatcctccacttcccgttggccttccgcaccatgactgggttggctagccactctgggtggagtacctctctgatgaaaccagctttgagaagcttgtcgagctcttctcatatggcctgttttcgatctggtgcaaatcttcacaatttttgttttactggcttggcattgggtcgcaccatgagtttgtactcaatcacctccctaggtacccccggcatgtcggacggtttcttgggtggctcagctgtggcgggtgggctggcagtgtgctcgaccatgtcgaggctccgcttgtcgcattgcaccgccagctttgcattcccttgaatagtgattgttcctttcggcccgggcatcttgagcacttgatacgcgtagtgagatgcggccatgaacttcgcgagtgcatttctcccgatgatggcgttgtatgctgtatcaaattcagcgacatcaaaggtgatatgaggcaacgtaattttgcccaatggcttggacgacgactgaggagtaatcccatggaagggttgattggtgggagtcaactcgcttcgtgggattcccatcacatccaaggtgcaggcgaagaagaggttgatggagctgccaccatctatgagaactcgcgcgactttgatgttccgaatagtgggctcgaccacgatcggatatcgtcctgggatgatagcagccttgggatggtcctcatctgagaactcgatcttctgttcggaccacttcatcttgggtgcggccccctgccatgtcgaacaaacttcacgctccattttcttgtattctcgctttgagtagtacgccgtggaacctccgaagatgtgcgagacatggagatcggaatctaggtatgccgagtccaagtcctgagtggttgcctcagtggccttctcgactactcgtactcgcttgcccttctccaatgccagttgcttttccagcgactttttgaagacgaggcaatcatctagagaatgtttgtccgacttgtgtatagggcaccatattctcttcgtgtcgctgccttgtgggtctgggtgcttgggagggcgcttgtattctgacgcgaggacttccgcttgagctttccttttcccacttttgctacttttcttcttgcttggttcaagtgcgtccttggctggtttcttctctccccccaacttcggcttgtcgttcttgcgtcaaagtgcgtcatccgcatgagcgcatcgatcgacgatctcgaaaaatcttcgagtagttgtgatccgtcttgttgccaactcctgggtagtatagcgatttctgacaccggttttgaaagcacgaatcacagaggcatcggtgatttcggggtttgtatttctgcactcattaaagccgattggtttatactggattatattgttatttcacgtggagtagacttgaaggaattcttctgggtcagtactcccatcgtacttctctgttgctcctggttagaatctctcaggccatcggacatctcgtagcgaacggttgaaagctctatacccggcgctgggggcggtgggttgtcggcgatcgtctgtccttcgcggatgtctatctgatgatgaggatgaagaggatgatgacgacgacgatgagtcactcggctctggcgtgcgattccgaggatgacgtctgggttctcgggaatcctgtcgtcgtccaccgttgttgtcccggcgtcaatctccgtcatcgtcatcgttatggcggcgtcctcgaccaatatcacccggcatccgctgttcgcgatcatcgcgttcgtggcggttgtggcggttatcacggtctcggttctcgctcgggtgtcctcctcgctcttcgttctctcgacgtcgtgaagagagacgatgtctggaacggttttcgttgtcttgcgcgcgtcatgcttctcgacagccatttaaatggtcacggagatcgctggtgccgcggggtggaggggtggcttgttgaggtgaggcccgctactcaggtggttcgccattggcaccgccagctggcggctattttgggtgtgctgtggcagcggcctcctcgaacgcgttgctgaggttggtcactgattcccgtagccgttctgtccaccgtgcgagatcatcatttagaacaggatcataaggggtttccctcagtattgcgttgatgcccccgatgtgctgagccggtgtaaccacttgattctctgcttccgcatcggcgcgcgcagacgcgctggtcccgccgatagcaaacacatcgcgtggtgtgcttgtcgacgatgaaccctggtcgtcgagcgagtgtaggactgatggctcgtggggatcaatgtcgatcaccccaacgaatcggtctgagatgaccgtcgctcctcgttccttgttcacatctctaggagagatttgtgagtgctggaccttaggaggctacgtcttcatggctttgagaagaatcttgcagcttgagaggtcgtgattctttgtcttgtggataggacaatagacatcatgagttggagaagtacgctaaattccactctctttgcaggcacggatgtcagcttgtgcgttgagaaaaacccagcaagcttgcaaggtgtgtttcctagttttgtgaataggacaccaggaccttgtcgcctcagaagttgtccttgtcagctcgtgattcttgtcggaaggacaagatttggccacactaggatcttcctcgggcttggatgtcgtcgacgttccgttctccgctactgcgggaggatccttcgacatggggtcgtccggggttatggccacgacattctcgcttccggtcattgatggaccagtcgagaccggcaccgtggtgtaaaccgggaagacgatttcaccgacttgagtccacaccagcattgttgtagtcggaactcctaggttgacgctggggtcgacgctgttgttgacgagacttgacgacaatagtagtagaaccttgagcaccaagtccccttacctggggcaccattgttaacgggggatccccgtagaccagatatagagggtattggggtacgctggtacgaggatctacgtaatatgacat

SEQ ID NO: 35341 - DNA, 5000 bp, Oryza sativa
  Clone ID: PAT_MRT4530_39270C.1
gtagttggctatactattaaacttgctctcaggccgccgcagcagttgacgcacgcccggggtgcgcgggtcgatgaggatcgtgacgcggaaaggcccacacaatccaggggagagccgccgccgtacggccgcgctgcggctttgtgcgttgcgtgcgtggcgacatgcatgcaccccgacggttgatgaatgatgagccggccgcccagttgagaaactacgaatccagcgtggattccggccagatgtatccgttccgagaggtcgcagttcgcacgggttacacggggtggcgggcgcaccgtggaccgagtccacgcatgcgctggtccgcgggcgcaccacgtggcagacacgtggcggccacgacggacggcggtcggccggccgggagcgacggcgcacggcccgatggtcgccggcgacgaccaccggcgcgacggcacgcacgggaggcgacgaaaagaggggaaagggaaaggagatgaagggggtcctcaccgaggagcgccggcgacgggacgaccatggggaggcgaccggcggcggaaaggatggcggcggccgacacgggaggcgacgggaacggcggtccgacgacgcccgaccatggcggagccgcggccgagggccggcaggaccggcgaccgagaggtaccacgttccggtgggtttccggcgatgaacaacggtgaccgaggtgctgcacggcgggctggaggcggcgtatggtggaggtggctcgggatgcacggtggaagggtggttgcggtggtggaatggggaaacggagcggaggccggggtagagcttggcacggcgttgccgacggcgcaagcggcgaggtgcggcgacgactaacgcagcggcagcggccggctgaaggcggtgtgtggcggtagtggctcggcctcgcgatgggaaggtggttccggcggtggaggagggagatggagtggatgccggggtgcggtggggtggtgtgatgctataggtggtggcggcgcagcgcggcagcgacgggagcggcggtggcgggcggctggagatcgccggcgagcggcggcgaaggggatcggcgtggagagctcggtagagggcgtgggggaaggaatctcgtcccgagattctgggatggttatcttggactgaactgttgaggttggcaattttggtaaccttagaattcaatcggttgcccggggatcggcttaattcttctgataccttgcaacttgcttcttcaagtgctaccctgattgcggcactggttgaaccttcaattgatcttcgcagaacgacgactctgaactgatcttctcgctccttgcacgaagcttgaggctcgaattgacttgacttccgaacagacatgaagctgacagctggtcctctaggtttgacaaccttgcctggatgcgtcgactagaggaaagcgagggcggccggcgcggaggaagacgatggcgaacggcgacggcaagccacgggaggacgacgtcggcgggcggacgagcttcgggtttacaggtgtagattgtactatggctggttttgccgatgcactgagaccggataaattcaccggtgtgcactttaagagatggcagatcagggtcactctgtggctgatcgctatgaaatgcttctgggtgagtactggcaaatctaaaggaattcttactgctgatcagcagaagcaattcgaggaagccactactctctttgtgggatgcattcttagtgttcttggctatcgtctggtcgaggtgtatatgcatatgaccgacgctaaggagttgtgggatgcactgaatactaaatttggtgctactgatgctagcaatgatctgtatatcatagagcagtttcatgactacaagatggctgacaaccgttctgtagtcaaacaggctcatgagatacaaaccatggctaaggaactcgaactccttaagtgtgtcttactcaacaaatttgtggccgggtgcattattgcgaaactacctccatcatggagaagtttcggtactgcactcaaacacaagagacaggaatactccgttgaggggttgatagcgtcttttgatgttgaggagaaagctcgggaaaaagacgccccgtctaagggtgatggtgggaagtgtccacagcgcaaggggatgaaggcacctgcagggcagacttctaagtctgctaatgtcgcacggggttccaccgtcctaatggggaatgggtcacatgcttctgttcatggtgttggcacggtagatctgaagtttacttcgggaaagatcgtgcagctgaagaacgtgcagcatgtctcttctatcgacaggaatcttattagtggctctcgtctgactagagatggatttaagttggtttttgagtctaataaagtagtcatgtctaaacatggatattttattggtaaaggttatgagtgcggaggcctgttccgcttttccctttctgatttctgcaataagtctgtgaaccatatttgtggcagtgtggatgatgaggctaatgtttggcactcacgtttatgtcatattaattttggcttgatgtctcggttttcaagcatgtgtttaattcctaagttttccattgtcaaaggttctaagtgccatagttatgtgcaatcgaagcaacctcgcaagcctcacaaggctgccgaggagagaaacttggcaccactagaactcctacattcagatctttgtgaaatgaatggggtgttgacaaagggtggaaaacgatatttcatgacgttgattgatgatgctactagattttgctatgtgtacttgttgaaaacgaaagacgaggctctagactattttaaaatttataaggcagaagttgaaaatcaacttgacagaaagataaaaaggcttaggtctgatcgtggtggagagtttttctcgaacgagtttgacttattctgtgaggaacatggcatcatacatgagaggatgcctccctattctcccgagtctaatgggattgttgaaaggaagaaccgcacattgactgacttggtgaatgccatgttggacacagcgggactacctaaggcatggtggggggaggcattgttgacctcgaatcatgtgttaaacagagttcctaacagaaataaggacaaaacaccatatgagatatggattgggagaaaaccatcactttcttatttgtgcacatggaggtgcttggcgaaagtcaatgtaccaataacgaagaagcgcaaacttggacctaagactgtggactgtgtctttctgggatatgctcatcacagcattgcctatagatttttaatagttaaatccgaggtacctgacatgcatgttggtacaattatggagtctcgtgatgctaccttctttgagagctttttcccaatgaaggatacacatagtggttcgagccaaccctctgaaataattctcagttcaatcacaccaccagaacaaactaaacatacacatgaacatgtctctgaggaggatgtcagtgaagctcctcgaaggagtaagagacaaaggacggctaagtcctttggtaatgatttcactgtgtaccacgtggatgacactcctaagtcaatttcagaagcatatgcatctcctgatgcagacaactggaaggaggctgtctgtagtgaaatggattccattatcgctaactggacttgggaggtgacagagcaaccctatgggtataaacctgtggggtgcaagtgggtgttcaagaagaagcttaggcctgacggtactattgaaaagtacaaggctcggcttgttgctaagggctatactcagaaagaaggcgaagatttctttgacacttactcacctgttgctagattgaccacaattcgtgtgctactttccctagcagcatcacatggtcttctcgttcatcaaatggacgttaagacagcttttcttaatggagagctggatgaggagatctatatggatcaacctgatgggtttgtagttgaaggtcaagaaggcaaagtgtgcaaattgttgaagtctttgtatggtctgaaacaagctcctaagcaatggcatgagaaatttgacaaaacattgacatctgcaggctttgcagtcaatgaggcagataaatgtgtgtactatcgccatggtgggggtgagggagttattctgtgcttgtatgttgacgacatactaatatttgggacaaaccttgaggtgataaatgaggttaaatcattcttgtctcaaaattttgatatgaaggatttgggagtagctgatgttatcttaaacattaagctaattagaggtgagaatgagattacactcttgcagtcccattatgtggagaagatcttgaatcgctttggctacattgatagtaagccttctccaacaccttatgatcctagcttgttgcttcgcaagaacaaaagaattgctaggaatcaactgaaatactcccaaatcattggctcactaatgtacctggctagtgcaactagggctgatatctcctttgctgtgagcaagttgagccggtttacctctaatccgggagatgatcactggcgtgcgcttgagcgagtaatacgctatctgaaaggtactatgaaattggggcttcactatactgggtatcctgcggtattggagggttatagtgattctaactggatctctgatgtggatgagatcaaagccactagtggatatgtcttcacactgggtggtggtgctgtttcgtgcaggtcttgcaaacagaccattttgacgaggtcaaccatggaagcagagctgacggcactggatactgctactgttgagacagaatggctgcgtgatctattaatggatctgcctattgttgaaaaaccggtgtcggctatccttatgaactgtgacaatcaaatggtaactgtcaaagtgaatagttctaaggataatatgaaatcgtctagacatgtgaaaagatga

SEQ ID NO: 35342 - DNA, 492 bp, Oryza sativa
  Clone ID: PAT_MRT4530_39271C.1
ctgcaggcatctagcactaatgaacatgggatgatgagcgcttacctgtgtgagtactacagtgactgatctgaattaaaatttcctgcactgatctttattaattgtatctcagttacctgagtaattagctttagggtgtgttgcctagtttttaagcgatactcctgtcaaagcttttgatgaatttctaggtcttgtctgtcttgtttgttacataccacagtcagatgatgtggattctgagaacagcactaaattgttcatatattattagtacaagtgagttcaaggtatttgtgtattcatttatgtgccacagcaaactgactgaatgttacgtgtgttagttttggtgattggtactcatgaagtgtatgatgtactttgttaaggtaaacctctgattgatatttaaaactaggtttaataatggattttcactgttcaactcttattcacaagtcaggcatttcctttcgaactcaccat

SEQ ID NO: 35343 - DNA, 4299 bp, Oryza sativa
  Clone ID: PAT_MRT4530_39272C.1
atggcgaagactatggagcaagaatggcgtgaggcgaagagtcgtgcgagtgccttgccaggccagaggcgtctcaggcgaagggtgcaaggcgaagactatctgccgaaggaagacgacttcgccttggcaagttcgcccccgcgagggccgaagaagcctttccggcccatcaagcctaggggcaatagggccggcgatcgccagatggcccatcaagggcccatgagcccctatatcatcatgtacccttgtaaatgtccctttcataaggactactctatcccgctcgccggcgtgcaccggcgatcgggagagcaggtctccggaacctctgccttcgacgttctgcaccgggagaaggcggcaataaggcactgtgattttactatggctggttttgccgatgcactgaggccggataaattcaccggtgtgcattttaagagatggcagatcagggtcactctgtggctgacagctatgaaatgcttctgggtgagtactggcaaacctgaaggagttcttactgctgaacagcagaagcaattcgaggaagccactactctctttgtgggatgcattcttagcgttcttggcgatcgtctggtcgaggtgtatatgcatatgatcgacgctaaggagttgtgggatgcactgaatactaaattcggtgctactgatgctagcaatgatctgtatatcatggagcagtttcatgactacaaaatggctgacaaccattctgtagtcgaacaggctcatgagatacaaaccatggctaaggaactcgaactccttaagtgtgtcttacccgacaaatttgtggccgggtgcattattgcaaaactacctccatcttggaggagtttcggtactgcactcaaacacaagagacaggaatactccgttgaggggttgattgcgtctcttgatgttgaggagaaagctcgggaaaaagatgccgcgtctaagggcgatggtgggcagtccagtgccaatgttgtgcacaaggcccagaacaagagcaaggggaaatacaaagctcagcagaccaccaacttcaagaagcagaagaagaacaacaacaatcctaatcaggatgagaggacttgctttgtgtgtggccaagttggtcatctagctaggaagtgtccacagcgcaaggggatgaaggcacctgcagagcagacttctaagtctgctaatgtgaccattggcaacactggagatggaagcgggtatggtaatttacctactgttttttcagttaatcaatctactaattggtgggttgatactggggccaatgtacatgtttgtgctgacatctcattgttttcttcttatcaggtcgcacggggttccaccgtcctaatggggaatgggtcacatgcttctgttcatggtgttggcacggtagatctgaagtttacttcgggaaagatcgtacagctgaagaacgtgcagcatgtcccttctatcgacaggaatcttattagtggctcccgtctgactagagacggatttaagttggtttttgagtctaataaagtagtcgtgtctaaacatggatattttattggtaaaggttatgagtgcggaggcctgttccgcttttccctttctgatttctgcaataagtctgtgaaccatacttgtggcagtgtggatgatgaggctaatgtttggcattcacgtttatgtcatattaattttggcttgatgtctcggctttccagcatgtgtttaattcctaagttttccattgtcaaaggttctaagtgccatagttgtgtgcaatcgaagcaacctcgcaagcctcacaaggctgccgaggagagaaacttggcaccactagaactcctacattcagatctttgtgaaatgaatggggtgttgacgaagggtggaaaacgatatttcatgacattgattgatgatgctactagattttgctatgtgtacttgttgaaaacgaaagacgaggctctagactattttaaaatttataaggcagaagttgaaaatcaacttgacagaaagataaaaaggcttaggtctgatcgtggtggagagtttttctcgaacgagtttgacttattctgtgaggaacatggcatcatacatgagaggacgcctccctattctcccgagtctaatgggattgctgaaaggaagaaccgcacactgactgacttggtgaatgccatgttggacactgcgggactgcctaaggcatggtggggggaggcattgttgacctcaaatcatgtgttaaacagagttcctaacagaaataaggacaaaacaccatatgagatatggattggtagaaaaccatcactttcttatttgcgcacatgggggtgcttggtgaaagtcaatgtaccaataacgaagaagcgcaaacttggacctaagactgtggactgtgtttttctgggatatgctcatcatagcattgcctatagatttttaatagttaaatccgaggtaccggacatgcatgttggtacaattatggagtctcgtgatgctaccttctttgagagctttttcccaatgaaggatacacatagtggttcgaaccaaccctctgaaataattcccagttcaatcacaccaccagaacaaactgaatatacacatgaacttgtctctgaggaggatgtcagtgaagctcctcgaaggagtaagagacaaaggacggctaagtcttttggtgatgatttcactgtgtacctcgtggatgacactcctaagtcaatttcagaagcatatgcatctcctgatgcagactactggaaggaggctgtccgtagtgaaatggattccattatcgctaacgggacttgggaggtgacagagcgaccctatgggtgtaaacctgtggggtgcaagtgggtgttcaagaagaagcttaggcctgacggtactattgaaaagtacaaggctcggcttgttgctaagggctatactcagaaagaaggcgaagatttctttgacacttactcacctgttgctagattgaccacaattcgtgtgctactttccctagcagcctcacatggtcttctcgttcatcaaatggacgttaagacagcttttcttaatggagagctggatgaggagatctatatggatcaacctgatgggtttgtagttgaaggtcaagaaggcaaagtgtgcaaattgttgaagtctttgtatggtctgaaacaagctcctaagcaatggcatgagaaatttgacaaaacattgacatctgcaggctttggagtcaatgaggcagataaatgtgtgtactatcgccatggtgggggtgagggagttattttgtgcttgtatgttgacgacatactgatatttgggacaaaccttgaggtgataaatgaggttaaatcattcttgtctcaaaattttgatatgaaagatttgggagtagctgatgttatcttaaacattaagctaattagaggtgagaatgggattacactcttgcagtcccattatatggagaagatcttgaatcgctttggctacattgatagtaagccttctccaacaccttatgatcctagattgttgcttcgcaagaacaagagaattgctaggaatcaactggaatactcccaaatcattggctcgttgatgtacctggctagtgcaactaggcctgatatatcctttgctgtgagcaagttgagccgatttacctctaatccgggagatgatcactggcgtgcgcttgagcgagtaatgcgctatctgaaaggtactgtggaattggggcttcactatactgggtatcctgcggtactggagggttatagtgattctaactggatctctgatgtggatgagatcaaagccactagtggatatgttttcacactgggtggtggtgctgtttcatggaggtcttgcaaacagacaattttgacgaggtcaaccatggaagcagagctaacggcactggatactgctactgttgaggcagaatggctgcgtgatctattaatggatctgcctgttgttgaaaaaccggtgccggctatccttatgaactgtgacaatcaaacgataattgtcaaagtgaatagttctaaggataatatgaaatcttctagacatgtgaaaagacgattgaagtctgtcaggaaattaagaaactccggacttataacgttggattacatccaaacagcgagaaacctggcagatcccttcacgaagggactatcacgaaatgtgatagacaatgcatcgaaggagatgggtttgagacccatgtga

SEQ ID NO: 35344 - DNA, 2483 bp, Oryza sativa
  Clone ID: PAT_MRT4530_39273C.1
atggcgataaccatacaaagacttcaacaatttgcacactttgccttcttgaccttcaactacaaacccatcaggagtgtcatccacgaggaactactcgcgattgcgagcgtcgacgaaggcgcgaagcacgcgagcggagaggaagacgagccatcgcggacgaacagggagcagtcgcgcgaagcgcttcccaaaaaccttattgccgccttctcccggtgcaggacgtcgaaggcagaggttccggagacctgctctcccgatcgccagtgcacgccgacgagcgggatggagtagtctttcagatagcgcattactcgctcaagcgcacgccagtgatcatctcccggattagaggtaaatcggctcaacttgctcacagcaaaggagatatcaggcctagttgcactagccaggtacatcaacgagccaatgatttgggagtattccagttgattcctagcaattctcttgttcttgcgaagtaacaagctaggatcataaggtgttggagaaggcttactatcaatgtagccaaagcgattcaagatcttctccacataatgggactcatttatcacctcaaggtttgtcccaaatatcagtatgtcgtcaacatacaagcacaaaataactccctcacccccaccatggcgatagtacacacatttatctgcctcattgactgcaaagccttcaactacaaacccatcaggttgatccatatagatctcctcatccagctctccattaagaaaagctgtcttaacgtccatttgatgaacgagaagaccatgtgaggctgctagggaaagtagcacacgaattgtggtcaatctagcaacaggtgagtaagtgtcaaagaaatcttcgccttctttctgagtatagcccttagcaacaagccgagccttgtacttttcaatagtatcgtcaggcctaagcttcttcttgaacacccacttgcaccccacaggtttacacccatagggtcgctctgtcacctcccaagtcccgttagcgataatggaatccatttcactatggacagcctccttccagtagtgtgaatgccaaacattagcctcatcatccacactaccacaaatatggttcacagacttattgcagaaatcagaaagggaaaagcggaacaggcatccgcactcataacctttaccaataaaatatccatgtttagacacgactactttattagactcaaaaaccaacttaaatccgtctctagtcagacgggagccactaacaagattcctgtcgatagaagggacatgctgcacgttcttcagctgcacgatctttcccgaagtaaacttcagatataccgtgccaacaccatgaacagaagcatgtgacccattccccattaggacggtggaaccccgtgcgacagtaggtaaattaccatacccgcttccatctccagtgttgccaatggtcacattagcagacttagaagtctgccctgcaggtgccttcatccccttgcgctgtggacacttcctagccagatgaccaacttggccacacacaaagcaagtcctctcatcctgattaggattgtttttgttcttcttctgcttcttgaagttggtggtctgctgagctttgtatttccccttgctcttgttctgggccttgtgcacaacattggcactggactgcccaccatcgcccttagacgcggcatctttttcccgagctttctcctcaacatcaagagacgcaatcaacccctcaacggagtattcctgtctcttgtgtttgagtgcagtaccgaaactcctccaagatggaggtagttttgcaataatgcacccggccacaaatttgtcgggtaagacacacttaaggagttcgagttccttagccatggtttgtatctcatgagcctgttcgactacagaacggttgtcagccattttgtagtcatgaaactgctccatgatatacagatcattgctagcatcagtagcaccgaatttagtattcagtgcatcccacaactccttagcgtcggtcatatgcatatacacctcgaccagacgatcgccaagaacgctaagaatgcatcccacaaagagagtagtggcttcctcgaattgcttctgctgttcagcagtaagaactccttcaggtttgccagtactcacccagaagcatttcatagctgtcagccacagagtgaccctgatctgccatctcttaaaatgcacaccggtgaatttatccggcctcagtgcatcggaaaaaccagccatagtaaaatcacagtgccttattgccgccttctcccggtgcagaacgtcgaaggcaaaggttctggagacctgctctcccgatcgccggtgcacgccggcgagcgggatggagtagtcattcgccttaggcttaagatggtggtggtagtgttgtggaagcagcctgagcagtaacttcttgtccgcctggttggacat

SEQ ID NO: 35345 - DNA, 252 bp, Oryza sativa
  Clone ID: PAT_MRT4530_39274C.1
tcgtgtttaaagatacacgagcagcgacgcgagccatctatgaaagccttggacggtggataatgtcatcaaatctattttactattttatccgcgcctggcgtgccactttcaacactaatcgtgggtggagaaggaccaccttctgtttgtggacagtgcagaaagactacgtcccgctcgttgacaagcatggtcttgcacgtggatactgaaggcagtttgaactcgcttgctgaatcaagaggatat

SEQ ID NO: 35346 - DNA, 160 bp, Oryza sativa
  Clone ID: PAT_MRT4530_39275C.1
ggaggcaagccatgttatttaccttactaatttttgaatattacagggaaaaatttcacaggagaacccatgcatcacctgacattggattgaccatgcaaatggacactggattatgcatccacatgaggttaaagatttcagaacatcctaatgaaac

SEQ ID NO: 35347 - DNA, 1753 bp, Oryza sativa
  Clone ID: PAT_MRT4530_39276C.1
atggggacgaggaggaggaggaatccggtgatattcttgttcttgtggttcgtcatggcgtttgagctgtgtgcatctctgaatcatgaaggtgtcgctcttatgaggtttaaagagatgattgatgctgacccatttgatgctctgttggattgggatgaagggaacgccagcccctgttcttggttcggtgtggagtgctcggatgatggtcgagttgtggccctgaacttaccaaatcttggtctaaagggtatgctacctcaggagattggaacacttgcccatatgcgttccatcattctacacaataactctttctatggaatcatccccacagagatgaaatatttacatgagttaaaggtgttggatctaggatacaatactttcagcggaccatttccatcggagctaagaaatattttatccctgaaatttctctttctcgaaggcaacaaactttctggcagtttgccaattgaatatgagctcgcctcgatggaccagacttctttaaataagatatctacagaaaggaagactagtactgtggtacctttttctccaacagcaagtgggcaattacatactgctactttgggaggaataactaaattcaaacgctcagagcttgaaacagcctgtgaaggtttcagcaacataattgacacactacctagattcacattgtataaaggaactctcccgtgtggagcagaaatagctgctgtgtctacattggtgacttacgcaagtgggtggacaactgtagctgaagcacaattcaaggataaggttgaagtcttatcaaaagtgagccataagaatttaatgaaccttgtgggttactgtgaagatgaagaaccattcactcggatgatggtgtttgagtatgtttcaaatggaacactgtttgaacacttgcatgttaaagaagcagaccaattagactggcagtcatgcttacggatagcgatgggagtgatgtactgtctgaactacatgcaacagctgaaccctcctgtactgctgagagacctaagtacttcttgcatatacttgactgaagacaatgctgcaaaggtttccgacatcagtttttggggtgataaaaaagaagacgaaaaatctgaggcttctgatgagcacatcacagtttataagtttgctttgcttctgcttgagacaatctctggaaggcgcccatattctgatgattatggcctccttattctttgggcacatagatacctcattggtgacaaacccctgatggacatggttgaccccacactcaaatcagtccctgaggagcaagtcagagaactcacaaagctggtgaaattatgcttaagtgaagatcccatggagaggccaacggtggcagaggtaaccgcatggatgcaagagatcactgggatttctgaagaagaggcgattccaaaaaatagtccgttgtggtgggctgaacttgagatcatcacatcataaaaagccagttcattgcgcaatattattgctgcggcaacggtgtccattcttgcctagatcacagcaattgtacagtcgtttaggacccattttgggcagccattcagttgtacagatatgcctgcactgctcacacccattctttcattctttggttcatgaaacacacataatctctgaagtccactaaacagttgtgacgaaagcgaggagtataaattttctactagtttctacacacaaaaaaaaaaaaaaaaaa

SEQ ID NO: 35348 - DNA, 3224 bp, Oryza sativa
  Clone ID: PAT_MRT4530_39277C.1
atggcagatcagggtcactatgtggctgacagctatgaaatgcttctggcgttcttggcgatcgtctggaacgaggtgtatatgcacatgaccgacgctaaggagttgtgggatgcactgaatactaaatttggtgctactgatgctagcaatgatctgtacatcatggaggagtttcatgactacaggatggttgacaaccgttctgtagtcgaacaggctcatgagatacaaaccatggctaaggaactcgaactccttaaaagtttcggtactgcactcaaacacaagagacaggaatactccattgaggggttgatagcgtctcttgatgttgaggagaaagctcgggaaaaggacgccgcgtctaagggcgatggtgggcagtccagtgccaatgttgtgcacaaggcccagaacaagagcaaggggaaatacaaagctcaacagaccaccaacttcaagaagcagaagaagaacaacaacaatcctaatcaggatgagaggacttgctttgtgtgtggccaacctagtcatctagctaggaagtgtccacagcgcaaggggatgaaggcacctgcagggcagacttctaagtctgctaatgtgaccattggcaatactggagatggaagcgggtatggtaatttacctactgttttttcagttaatcagtctactaattggtgggttgatactggggccaatgttgcacggggttccaccgtcctaatggggaatgggtcacatgctcctgttcatggtgttggcacggtagatctgaagtttacttcgggaaagatcgtgcaactgaagaacgtgcagcatgtcccttctatcgacaggaatcttgttagtggctcccgtctgactagagacggatttaagttggtttttgagtctaataaagtagtcgtgtctaaacatggatattttattggtaaaggttatgagtgcggaggcctgttccgcttttccctttctgatttctgcaataagtctgtgaaccatatttgtggcagtgtggatgatgaggctaatgtttggcactcacgtttatgtcatattaattttggcttgatgtctcggctttccagcatgtgtttaattcctaagttttccattgtcaaaggttctaagtgccatagttgtgtgcaatcgaagcaacctcgcaagcctcacaaggctgccgaggagagaaacttggcaccagtagaactcctacattcagatctttgtgaaataaatggggttttgacgaagggtggaaaacgatatttcatgacgttgattgatgatgctactagattttgctatgtgtacttgttgaaaacgaaagacgaggctctagactattttaaaatttataaggcagaagttgaaaatcaacttaacagaaagataaaaaggcttaggactgatcgtggtagagagtttttctcaaatgagtttgacttattccgtgaggaacatggcatcatacataagaggacacctccctattctcacgagtctaatgggattgccgaaaggaagaaccgcacactgactgacttggtgagtgggactgtaacaccctgcgggactacctaaggcatggtggggggaggcattgttgacctcgaatcatgtgctaaacagagttcctaacagaaataaggacaaaacaccatatgagatatctattgggagaaaaccatcactttcttatttgcgcacatgggggtgcttggcgaaagtcaatgtaccaataacgaagaagcgcaaacttggacctaagactgtagaccgtgtctttctgggatatgctcatcacaacattgcctatagatttttaatagttaaatctgaggtacctgacatgcatgttggtacaattatggagtctcgtgatgctaccttttttgagagcttcttcccaatgaaggatacacatagtagttctagccgaccttctaaaataatttatagttcaatctcaccaccagaacaaactgaacatacacatgaacatgtcactgaggaggatgacagtgaagctcctcgaaggagtaagagacaaaggacggctaagtcttttggtgatgatttcactgtgtacctcgtggactgacactcctatgtcaattttagaagcatatgcatctcctgatgcagactactggaaggaggctgtccctagtgaaatggattccattatcgctaacgggacttgggaggtgacagagcgaccctatgggtgtaaacctctggggtgcaagtgggtgttcaagaagaagcttaggcctgatggtactattgaaaagtacaaggctcggcttgttgctaagggctatactcagaaagaaggcgaagatttctttgacacttactcacctgttgctagattgaccacaattcgtgtgctactttccctagcagcctcacatggtcttctcgttcatcaaatggacgttaagacaacttttcttaatggagagctggatgaggagatctatatggatcaacctgatgggtttgtagttgaaggtcaagaaggcaaagtgataaatgaggttaaatcattcttgtctcaaaattttgatatgaaggatttgggagtagctgatgttatcctaaacattaagctaattagaggtgagaatgggattacactcttgcaatcccattatgtggagaagatcttgaatcgctttggctacattgatagtaagccttctccagcaccttatgatcctagcttgttgcttcgcaagaacaagagaattgctaggaatcaactggaatattcccaaatcattggctcgctgatgtacctggctagtgcaactaggcctgatatctcctttgctgtgagcaagttgagccggtttacctctaatctaggagatgatcactggcgtgcgcttgagcgagtaatgcgctatctgaaaggtactatggcattggggcttcactatactggatatcctgcgatactggagggttatagtgattctaactggatctctgatgtggatgagatcaaagccactagtggatatgtcttcacactgggtggtggtgctgtttcgtggaggtcttgcaaacagaccattttgacgaggtcaaccatggaagcagagttgacggcactgcatactgctactgttgaggcagaatggctgcgtgatctattaatggatttgcctattgttgaaaaaatggtgccggctatcttttga

SEQ ID NO: 35349 - DNA, 230 bp, Oryza sativa
  Clone ID: PAT_MRT4530_39278C.1
tcgactgttttaaaaaaaagaagggagcgccataattttatcccgccggttgataacaaagactgaccatgcaaaactaactaattatctacacacacataactaacttgggtggatagagatagattgatactcacttttttagtcagaggcgggcacgcagctacctttgtatggaatggcatgcctggcgcaggcggcggccggcaggtaggtccgccagtgagggg

SEQ ID NO: 35350 - DNA, 4134 bp, Oryza sativa
  Clone ID: PAT_MRT4530_39279C.1
atgctgctcttgtcggcggtgatccgtggtggccgatgcatcatcgccggtgattgtgacgccgatagggccgggagcgaaatcgacgtccacgaccctgacgccgagatctgggtgacgcgcgacgtgcaacggagttcggaagccgacgtgcagagaaggggttgcgcggtgctgcggatctcggacaggaggcagagccgcggaggaccgacagctggtggaggcgtacgacgcgccggcggatggggtggcgcgatctggatgggaaggacggagcggtggtgctcacggacggggacggggacagcgacggaggatcgcgacgaggaggcggaggcggaggcggagggggagagaaggcggcggcggccgccgatcccgtcgccgagctcctaccgctgtgggttctcccacaaaggataccctttttactgcccatgggctgaaccccattctgagcacagtgtccagcccatcgagaaggaggccagctcgcgcatcaagctcacgagcaggtcgcaccttcgccgcacctgggctctgccagcgagcacggtgcggtggcctccgctgccgtcgtggagacaagctccggggttgccaaggttcataaagtttgatttcaatattgcacaaacttatcctgaggccgactactccatctcgctcgccggcgtgcaccggcgatcgggagagcaggtctccggaacctctgccttcgacgttctgcaccgggagaaggcggcaataagggtcactctgtggctaacagctatgaaatgcttctgggtgagtactggcaaacctgaaggagttcttactgctgaacagcagaagcaattcgaggaagccactactctctttgtgggatgcattcttagcgttcttggcgatcgtctggtcgaggtgtatatgcatatgaccgacgctaaggagttgtgggatgcactgaatactaaattcggtgctactgatgctagcaatgatctgtatatcatggagcagtttcatgactacaagatggctgacaaccgttctgtagtcgaacaggctcatgagatacaaaccatggctaaggaactcgaactccttaagtgtgtcttactcgataaatttgtggccgggtgcattattgcaaaactacctccatcttggagaagtttcggtactgcactcaaacacaagagacaggaatactccgttgaggggttgatagcgtctcttgatgttgaggagaaagctcgggaaaaagatgccgcgtctaagggcgatggtgggcagtccagttccaatgttgtgcacaaggcccagaacaagagcaaggggaaatacaaagctcagcagaccaccaactttaagaagcagaagaagaacaacaacaatcctaatcaggatgagaggacttgctttgtgtgtggccaagttggtcatctggctaggaagtgtccacagcgcaaggggatgaaggcacctgcagggcagacttctaagtctgctaatgtgaccattggcaacactggagatggaagcgggtatggtaatttacctactgtcgcacggggttccaccgtcctaatggggaatgggtcacatgcttctgttcatggtgttggcacggtagatctgaagtttacttcgggaaagatcgtgcagctgaagaacgtgcaacatgtcccttctatcgacagaaatcttgttagctgctcccgtctgactagagacagatttaagttggtttttgagtctaataaagtagtcgtatctaaacatggatattttattggtaaaggttatgagtgcggaggcctgttccgcttttccctttctgatttctgcaataagtctgtgaaccatatttgtggcagtgtggatgatgaggctaatgtttggcactcacgtttatgtcatattaactttggcttgatgtctcggctttccagcatgtgtttaattcctaagttttctattgttaaaggttctaagtgccatagttgtgtgcaatcaaagcaacctcgcaagcctcacaaggctgccgaggagagaaacttggcaccactagaactcctacattcagatctttgtgaaatgaatggggtgttgacgaagggtggaaaacgatatttcatgacgttgattgatgatgctactagattttgctatgtgtacttgttgaaaacgaaagacgaggctctagactattttaaaatttataaggcagaagttgaaaatcaacttgacagaaagataaaaaggcttaggtctgatcgtggtggagagtttttctcaaataagtttgacttattctgtgaggaacatggcatcatacatgagaggacgcctccctattcccccgagtctaatgggattgctgaaaggaagaaccgcacactgagcaacttggtgaatgccatgttggacaccgcgggactacctaaggcatgttcaatcacaccaccagaacaaactgaacatacacatgaacatatcactgaggaggatgacagtgaagctcctcgaaggagcaaaagacaaaggacggctaagtcttttggtgatgatttcactgtgtacctcgtggatgacactcctaagtcaatttcagaagcatacgcatctcctaatgcagactactggaaggaggctgtccgtagtgaaatagattccattatcgctaacgggacttgggaggtgacagagcgaccctatgggtgtaaacctgtggggtgcaagtgggtgttcaagaagaagctcaggcctgacagtactattgaaaagtacaaggctcggcttgttgctaagggctatactcataaagaaggcgaagatttctttgacacttactcacctgttgctagattgaccccaattcgtgtgctacttttcctagcagcctcacatggttttctcgttcatcaaatggacgttaagacagcttttcttaatggacagctggatgaggagatctatatggatcaacctgatgggtttgtagttgaaggtcaagaaggcaaagtgtccaaattgttgaagtctttgtatggtctgaaacaagctcctaagcaatggcatgagaaatttgacaaaacattgacatctgcaatctttgcagtcaatgaggcaaataaatgtgtgtactatcaccatggtgggggtgagggagttattctgtgcttgtatgttgatgacatactgatatttgggacaaaacttgaggtgataaatgaggttaaatcattcttgtcgcaaaattttgatatgaaggatttgggagtagctgatgttatcttaaacattaagctaattagaggtgagaatgggattacactcttgcagtcccattatgtggagaagatcttgaatcgctttggctacattgatagtaagccttctccaacactttatgatcctagcttgttccttcgcaagaacaagagaattgctaggaatcaactggaatactcccaaatcattggcttgctgatgtacctggctagtgcaactaggcctgatatttgctgtactatggaattggggcttcactatactgggtatcttgcggtactggagggttatagtgattctaactggatctctgatgtggatgagatcaaagccactagtggatatgtcttcacactgggtggtggtgctgtttcgtcgaggtcttgcaaacagaccattttaacgaggtcaaccatggaagcagaactgacggcactggatactgctactgttgaggcagaatggctgcgtgatctattaatggatctgcctattgttgaaaaaccggtgccggctatccttatgaactgtgacaatcaaacggtaattatcaaagtgaatagttctaaggataatatgaaatcgtctagacatgtgaaaagacgattgaagtctgtcaggaaattaagaaactccggagttataacgttggattacatccaaacagctagaaacctggcagatcccttcacgaagggactatcacgaaatatgatagacaatgcatcgaaggagatgggtttgagacccatagcattcttgaaagaactcacctttgtgagcttgactgttggtcgcagtctatggagattttgggtaaatcttctaggaagcttactaaagacctag

SEQ ID NO: 35351 - DNA, 603 bp, Oryza sativa
  unsure (1)..(603): unsure at all n locations
  Clone ID: PAT_MRT4530_3927C.1
aaaagtaaaaactgatactaagagtattgttaatctgtaccacaaaatagtcgtacgaatgaaaaaattacaggctcaatcatacacaagtgataaaaattactcacaggtgaatcaaactagaaaacaaaaaagatgattcagccaaaaatccattgtgaaactaggatcctggtggctttgctggatcttgctataactggccggtgtcttgtgataggtaatggagagggcaactgggtggcaagtggtagtccatgatggaatcatggaagggtgttagcggtgtggtatagagatgggctcgacgttgcacagtaacagccctccatcatctacaagcacgaaaaaaatacaaaaacatccttgttcatgttcttagaacaacaattaaagaaaaatagcaaacactcatccccanggatccncctatctcttcactatcccttgaccaantgcaatnttgaccgtgcacccnccatccaattnatttnttggaaatacntttattgattgcaaaaaattggctccnccgaaaaagaatncaancatcattctcctatcnttngcatcccaatgancncgttttttnccgccatgacc

SEQ ID NO: 35352 - DNA, 3999 bp, Oryza sativa
  Clone ID: PAT_MRT4530_39280C.1
atggctcatctggcaacaggtggtggcggtggtgatattgggaaaaggattggtcatggtggtggtgatggtggagatgacgatggcgatgatgatgattacttcgatgattttgatgatggcgacgaagaagaaggtggtctttttcggagacgaattgtcattcaggagcttttcaatagagagtttgtggatgctgtgatgcaagagtggtgtaaaacgatgagtaatttgcctgctggtctccgccaagcttatgagatgggtttggtaagttctgcccagatggtccgatatttggcgatatttgcaaggcctactcattctaggtccttctcacgagctcttcctggatggctttccagaggtcttgttggaaggtttgagcaagaatgggatttggctgtcgtcaatgctctgactgcatcttgttgcaatgtgatggttcttgggcttctggcaccatgccgctcatatgggagcacatcccgatttgacttccagaatgcaattgagaaacttcccaacaacatttttgagaagagttatcctttgagacagtttgatctacaaaaacgaatcagtgctttcttttacaaagcggcagagcttagcttgttaggggtagttgctggttctattcaaggtggtctctcaaaagccttgtctgcaagaaaggaaaggagcacaaatgcccttggctatggagccttcctaggactatatgcaaacttgcggtatcaactattgtgtggactggatcagtatatggtcaggcgatttgatgttcttggtgtggcaatcttcttcagcacagcactaagattgacgaatattcagattggtgaatcatcgagacgcacatggcttggggaggaagctgatccacagtactcagatcggctgctgagagcatataaaagaccagtcgaggttgctggagaccaacaagattcaaggtggtttatatcgaaggatgcgattgtatctggccttggtcttctcggcatcaagcaagactactccatcccgctcgccggcgtgcaccggcgatcgggcgagcaggtctccaaaacctctgccttcgacgtcctgcatcgggagaaggcggtctccgaaacctctgccttcgatgtcctgcaccgggagaaggcggcaataaggtttttgggaagcgcttcgcgcgactgctccctgttcgtccgcgacggctcgccttcctctccgctcgcgtgcttcgcgccttcgtcgatgctcgtaaccgcgagtagttcctgccgagcaaccggtctttccgccacctcgatcagggtcactctgtggctgacagctatgaaatgcttctgggtgagtactggcaagcctatcggcgttcttaatgctgatcagcagaaagaattcgatgaggccactactctctttgtgggatgcattcttagcgtgcttagcgatcgtctggtcgaggtgtatatgcatatgaccgacgctaaggagttgtgggatgcactgaatactaaattcggtgctactgatgctagcaatgatctgtatatcatggagcagtttcatgactacaagatggctgacaaccgttctgtagtcaaacaggctcatgagatacaaaccatggctaaggaactcgaactccttaagtgtgtcttacccgataaatttgtggccgggtgcattattgcgaaactacctccatcttggagaggtttcggtactgcactcaaacacaagagacaggaatactccgttgaggggttgatagcgtctcttgatgttgaggagaaagctcgggaaaaagacgtcgcgtctaagggcgatggtgggcagtcgagtgccaatgttgtgtacaaggcccagaacaagagcaaggggaaatacaaagctcaacagaccaccaacttcaagaagcagaagaagaacaacaacaatcctaatctggatgagaggacttgctttgtgtgtggccaacctggtcatctagccaggaagtgtctacaacgcaaggggatgaaggcacctgcagggcagacttctaagtctgctaatgtgagcattggcaacactggagatggaagcgggtatgtcgcacggggttccaccgtcctaatggggaacgggtcacatgcttctgttcatggtgttagcatggcagaagttgaaaatcaacttaacagaaagataaaaaggcttaggactgatcgtggtagagagtttttctcaaatgagtttgacttattccgtgaggaacatggcatcatacataagaggacacctccctattctcacgagtctaatgggattgccgaaaggaagaaccgcacactgactgacttgggactacctaaggcatggtggggggaggcattgttgacctcgaatcatgtgctaaacagagttcctaacagaaataaggacaaaacaccatatgagatatctattgggagaaaaccatcactttcttatttgcgcacatgggggtgcttggcgaaagtcaatgtaccaataacgaagaagcgcaaacttggacctaagactgtagaccgtgtctttctgggatatgctcatcacaacattgcctatagatttttaatagttaaatctgaggtacctgacatgcatgttggtacaattatggagtctcgtgatgctaccttttttgagagcttcttcccaatgaaggatacacatagtagttctagccgaccttctaaaataatttatagttcaatctcaccaccagaacaaactgaacatacacatgaacatgtcactgaggaggatgacagtgaagctcctcgaaggagtaagagacaaaggacggctaagtcttttggtgatgatttcactgtgtacctcgtggatgacactcctatgtcaattttagaagcatatgcatctcctgatgcagactactggaaggaggctgtccgtagtgaaatggatttcattatcgctaacgggacctgggaggtgacagagcgactctatgggtgtaaacttgtggggtgcaagtgggtgttcaagaagaagctcaggcctgacggtactattgaaaagtacaaggctcggcttgttgtgataaatgaggttaaatcattcttgtctcaaaattttgatatgaaggatttgggagtagctgatgttatcttaaacattaagctaattagaggtgagaatgggattacactcttgcagtcccattatgtggagaagatcttgaatcgctttggctacattgatagtaagccttctccaacaccttatgatcctagcttgttgcttcgcaagaacaagagaattgctaggaatcaactggaatactcccaaatcattggctcgctgatgtacctggctagtgcaactaggcttgatatctcctttgctatgagcaagttgagccgttttgcctctaatccgggagatgatcactggcgtgcgcttgagcgagtaatgcactatctgaaaggtactatggaattggggcttcactatactgggtatcctgcggtactggagggttatagtgattctaactggatctctgatgtggatgagatcaaagccactagtggatatgtcttcacactgggtggtggtcctgtttcgtggaggtcttgcaaacagaccattttgacgaggtcaactatggaatcagagctgacggcaccggatactactactgttgaggcagaatggctgcgtgatctattaatgaatctgcctattgttgaaaaaccagtgccgactatccttatgaaatgtgacaatcaaacggtaattgtcaaagtgaatagttctaaggataatatgaaatcgtctagacatgtgaaaagacgattgaagtctgtcaggaaattgagaaactccagagttataacgttggattacatccaaacagctagaaacctggcagatcccttcacgaagggactatcacgaaatgtgatagacaatgcatcgaaggagatgggtttgagacccatgtga

SEQ ID NO: 35353 - DNA, 716 bp, Oryza sativa
  Clone ID: PAT_MRT4530_39281C.1
cccacgcttccgcgttggggttctcgcgacgtggattgtagtattgcaaataataataaccgggcgtgtttgtgttatgtcaccgggaaatgtgttttgctgatgtgtacgcgttggggttctcgcgacgtcgattgtagtattgcaaaacacatttccaaataataataaccgggcgtgtttgtgttatgtcaccgggaaatgtgttttgctgatgtgtacgcgttggggttctcgcgacgtcgattgtagtattgcaaatttgctgctttttaataatggaataaatatccccaccgctgcactttaaggatgcacaaaaaaaaaaaaaaaaaaaaaaaaaaaaaaaaaaaaaaaaaaaaaaaaaaaaaaaaaaaaaaaaaaaaaaaaaaaaaaaaataaaaaaaaaaaattaaaaaaaaaaaaagggggggcccgttttaagaagaaccaaagtttactaccccgtccttccaacgtaaaagcttttttttggggccacttaaaattaaattaatgggccgggttttaaaaacgtcggaattggaaaaaaccttgggttacccaaatttaaatccctttgaaaaaaacccccttttcccaagttggctaaaaaccaaaaaggcccgaaccaatcgcattttccaaaaattgggccaaccctgaaagggccaaaggggaaccccccttggaaggggcctatataaaccccggcg

SEQ ID NO: 35354 - DNA, 523 bp, Oryza sativa
  Clone ID: PAT_MRT4530_39282C.1
ggagcaatggcggagtcgacggcggcgacggcgccaccgggggacgagccggaggcgaaggggaggagcaactccatcctgctccccatcctcgggatccttctcgtctacctgctgtaccggtacctccggccgcgcctccgcggcctgcggctcgaccgcctcacgtcccgccgtgctgctccggttcgtgcggcccgcgtgcgcgctcacctccgacgaggcctccgccgccgcgcgccggatcggcgcggtcagccacccgaacctcgtgccgctccgcgcgttctacgtcgggccgaggggggagaagctgctcgtgcaccccttctacgccgccggctcgctccggcgattcttgcaagagggaattgttgattcacaaagatggaatataatttgcaagctctctatcagtattgtcaagggactggattacctgcatacagggtttggagaaaccgattattcacggggaacatcaagacgaacaacatttctgctcgatgctaattacgagtgc

SEQ ID NO: 35355 - DNA, 3861 bp, Oryza sativa
  Clone ID: PAT_MRT4530_39283C.1
atggctggttttgccgatgcactgaggccggataaattcaccggtgtgcattttaagagatggcagatcagggtcactctgtggctgacagctatgaaatgcttctgggtgagtactggcaaacctgaaggagttcttactgctgaacagcagaagcaattcgaggaagccactactctctttgtgggatgcattcttagcgttcttggcgatcgtctggtcgaggtgtatatgcatatgaccgacgctaaggagttgtgggatgcactgaatactaaattcggtgctactgatgctagcaatgatctgtatatcatggagcagtttcatgactacaaaatggctgacaaccgttctgtagtcgaacaggctcatgagatacaaaccatggctaaggaactcgaactccttaagtgtgtcttacccgacaaatttgtggccgggtgcattattgcaaaactacctccatcttggaggagtttcggtactgcactcaaacacaagagacaggaatactccgttgaggggttgattgcgtctcttgatgttgaggagaaagctcgggaaaaagatgccgcgtctaagggcgatggtgggcagtctagtgccaatattgtgcacaaggcccagaacaagagcaaggggaaatacaaagctcagcagaccaccaacttcaagaagcagaagaagaacaacaacaatcctaatcaggatgagaggacttgctttgtgtgtggccaagttggtcatctggctaggaagtgtccacagcgcaaggggatgaaggcacctgcagggcagacttctaagtctgctaatgtgaccattggcaacactggagatggaagcgggtatggtaatttacctactgttttttcagttaatcaatctactaattggtgggttgatactggggccaatgtacatgtttgtgctgacatctcattgttttcttcttatcaggtcgcacggggttccaccgtcctaatggggaatgggtcacatgcttctgttcatggtgttggcacggtagatctgaagtttacttcgggaaagatcgtgcagctgaagaacgtgcagcatgtcccttctatcaacaggaatcttgttagtggctcccgtctgactagagacggatttaagttggtttttgagtctaataaagtagtcgtgtctaaacatggatattttattggtaaaggttatgagtgcggaggcctgttccgcttttccctttctgatttctgcaataagtctgtgaaccatatttgtggcagtgtggatgatgaggctaatgtttggcattcacgtttatgtcatattaattttggcttgatgtctcggctttccagcatgtgtttaattcctaagttttccattgtcaaaggttctaagtgccatagttgtgtgcaatcgaagcaacctcgcaagcctcacaaggctgccgaggagagaaacttggcaccactagaactcctacattcagatctttgtgaaatgaatggggtgttgacgaagggtggaaaacgatatttcatgacattgattgatgatgctactagattttgctatgtgtacttgttgaaaacgaaagacgaggctctagactattttaaaatttataaggcagaagttgaaaatcaacttgacagaaagataaaaaggcttaggtctgatcgtggtggagagtttttctcgaacgagtttgacttattctgtgaggaacatggcatcatacatgagaggacgcctccctattctcccgagtctaatgggattgctgaaaggaagaaccgcacactgactgacttggtgaatgccatgttggacaccgcgggactgcctaaggcatggtggggggaggcattgttgacctcaaatcatgtgttaaacagagttcctaacagaaataaggacaaaacaccatatgagatatggattggtagaaaaccatcactttcttatttgcgcacatgggggtgcttggcgaaagtcaatgtaccaataacgaagaagcgcaaacttggacctaagactgtagactgtgtttttctgggatatgctcatcatagcattgcctatagatttttaatagttaaatccgaggtaccggacatgcatgttggtacaattatggagtctcgtgatgctaccttctttgagagctttttcccaatgaaggatacacatagtggttcgaaccaaccctctgaaataattcccagttcaatcacaccaccagaacaaactgaacatacacatgaacttgtctctgaggaggatgtcagtgaagctcctcgaaggagtaagagacaaaggacggctaagtcttttggtgatgatttcactgtgtacctcgtggatgacactcctaagtcaatttcagaagcatatgcatctcctgatgcagactactggaaggaggctgtccgtagtgaaatggattccattatcgctaacgggacttgggaggtgacagagcaaccctatgggtgtaaacctgtggggtgcaagtgggtgttcaagaagaagcttaggcctgacggtactattgaaaagtacaaggctcggcttgttgctaagggctatactcagaaagaaggcgaagatttctttgacacttactcacctgttgctagattgaccacaattcgtgtgctactttccctagcagcctcacatggtcttctcgttcatcaaatggacgttaagacagcttttcttaatggagagctggatgaggagatctatatggatcaacctgatggctttgtagttgaaggctttgcagtcaatgaggcagataaatgtatgtactatcgccatggtgggggtgagggagttattttgtgcttgtatgttgacgacatactgatatttgggacaaaccttgaggtgataaatgaggttaaatcattcttgtctcaaaattttgatatgaaagatttgggagtagctgatgttatcttaaacattaagctaattagaggtgagaatgggattacactcttgcagtcccattatgtggagaagatcttgaatcgctttggctacattgatagtaagccttctccaacaccttatgatcctagcttgttgcttcgcaagaacaagagaattgctaggaatcaactggaatactcccaaatcattggctcgttgatgtacctggctagtgcaactaggcctgatatctcctttgctgtgagcaagttgagccgatttacttctaatccgggagatgatcactggcgtgcgcttgagcgagtaatgcgctatctgaaaggtactgtggaattggggcttcactatactgggtatcctgtggtactggagggttatagtgattctaactggatctctgatgtggatgagatcaaagccactagtggatatgttttcacactggttggtggtgctgtttcatggaggtcttgcaaacagacaattttgacgaggtcaaccatggaagcagagctaacggcactggatactgctactgttgaggcagaatggctgcgtgatctattaatggatctgcctgttgttgaaaaaccggtgccggctatccttatgaactgtgacaatcaaacgacatgtgaaaagacgattgaagtctatcaggaaattaagaaactccggagttataacgttggattacatccaaacagcgagaaacctggcagatcccttcacgaagggactatcacgaaatgtgatagacaatgcatcgaaggagatgggtttgagacccatagcattcttgaaggaactcacctttgtgagcttgactgttggtcacagtctatgaagattttgggtgaatcttctaggaagcttactaaagacctaggagtatga

SEQ ID NO: 35356 - DNA, 232 bp, Oryza sativa
  Clone ID: PAT_MRT4530_39284C.1
ctaccccttcagccagatagctatgttactgcgagatcctgtcagatatgtccgtcatatttgtgtggggagactagatccattgtgttatacatggttcacacttctaaactgtactccctccatttcacaatttaagtcattctaacatttcccacatttatattaaagttattgaatctacacttatatatatttctacattcatttacatttttctaaatgatgaaat

SEQ ID NO: 35357 - DNA, 1889 bp, Oryza sativa
  Clone ID: PAT_MRT4530_39285C.1
ccagcctcgagacgacaagaatctcaagccaccctcccctcgccgctgcctcttccctccacccgaggggaaaaagcgagcaagcaaactgtgcggagcaagcacggcaaggcaaggcaaggtgacccaccgccattggcttcttccgttttatccaggagaaaggaggaggagtactgggagataggagcaatggcggagtcgacggcggcgacggcgccaccgggggacgagccggaggcgaaggggaggagcaactccatcctgctccccatcctcgggatccttctcgtctacctgctgtaccggtacctccggccgcgcctccgcggcctgcggctcgaccgcctcacgtcccgcctcccggcgtgcctccgccggagcaggacggccaacaccatgctcccctacttcgcgccgatcgccgaccgcctcggcgcgctgcagccgtacctggcccccatcgccgaccgcctcggggtgggcgcgcagggcggcgtcggcgcaggggcgtacggcagggcggacgcgctcgtcaagttccccggcggggaggcgctctccgtcgccgccatcctcgaggcgccgggggaggtggtggccaagtcgtcgcacagcaccctgtaccgcgccgcgatgcgctccggggaggccgccgtgctgctccggttcgtgcggcccgcgtgcgcgctcacctccgacgaggcctccgccgccgcgcgccggatcggcgcggtcagccacccgaacctcgtgccgctccgcgcgttctacgtcgggccgaggggggagaagctgctcgtgcaccccttctacgccgccggctcgctccggcgattcttgcaagagggaattgttgattcacaaagatggaatataatttgcaagctctctatcagtattgtcaagggactggattacctgcatacagggttggagaaaccgataattcacgggaacatcaagacgaacaacattctgctcgatgctaattacgagtgcaagatatcagactttggcctctaccttctgctgaatcctgctggtgcccaggagatgcttgaaacttcagcagcacagggttacaaggcacctgagctgatcaagatgagagatgccactagagagactgatatctacagcttgggagtagttctgcttgagatgcttgcccagaaggaatcagcaaaggataacacgccaaaccctcgcgacatcctattgcctgtctcgttcaaaaatttggttcttgagaggaagatttctgatgcattcagctccgatcttgtcaggcagagcaagaagtcagggaaggaaaagaatttgaatgctttcttcgagttggcaacagcttgctgtagcccttcaccatcattgagacctaacacaaagtttatactcaaaaagctcgaagagattgcaaaataaattaaactgggtagtttaccggcttgctatttaatcggcattgcattatagcagcatatacagcaatgacgagtactgaggcatttcagcctggccaaggctagaaacctgctgaatttgtgctggccagggaactgaatagccttgacatgaactcagagtaacatacatgctggaggggtgcttcagatgcaggatcactgtgtttttcttgtgcattacctggaaccgaaaaaaaaaatgtagaactgctgttcataggccagtgcccctgaagaactgtataacacactgttagtgaaatgtatatgttgtacttttaatgcatcgaaacactccatgtgaactggaatgttcctcatccagacgccatgaaactaaagttactgtagagattacgatgctcccaaaaaaaaaaaaaaaaaaaaaaaaaaaaaaaaggggggggggcctcgtgccga

SEQ ID NO: 35358 - DNA, 4604 bp, Oryza sativa
  Clone ID: PAT_MRT4530_39286C.1
ctactcttctttggcaagctcatcagctctggtttggcatgggaggttgcagcctccttttgcagttttgttttgctgcgggaaattcggatttgttttgttttgaaaacattccgaaaaatccgatgcgtggaaacggcgtggagtccggataagttacgcgcgacttatctggtttggttacgcggagtggagatcgtgcgggcgccctgatcaagcgacctatctctatataaaccgagccgccgccttcacgcaactcacgcgaaatcaatctagggtttgcctcctactctgtgctgtgccgtcgctcgtagactactccatcccgctcgccggcgtgcaccagcgatcgggagagcaggtctccggaacctctgccttcgacgtcctgcaccgggagaaggcgacaataaggtttttgggaagcgcttcacgcgactgctccctgttcgaccgcgatggctcgccttcctctctgctcgcgtgctgcgcgccttcatcgacgctcgcaaccgcgagtagttcctgccgagcaaccggtctttccgccacctcgatctaatgatgcgttaatgctagtatacatctgtaatgtcatgatttatttatggaatatattaaatcattatatgcctatattctcaacaatccaaaaaccttattataggcgctatgattttactatggctggttttgccgatgcactgaggccggataaatttaccggtgtgcactttaagagatggcagatcagggtcactctgtggctgacagctatgaaatgcttctgggtgagtactggcaagcctatgggcgttcttaatgctgaccagcagaaagaattcgatgaggccactactctctttgtgggatgcattcttagcgtgcttggcgatcgtctggtcgaggtgtatatgcatatgaccgacgctaaagagttgtgggatgcactgaatactaaattcggtgctactgatgctagcaatgatctgtatatcatggagcagtttcatgactacaagatggctgacaaccgttctgtagtcgaacaggctcatgagatacaaaccacggctaaggaactcgaactccttaagtgtgtcttacccgacaaatttgtggctgggtgcactattgcgaaactaactccatcttggagaggtttcggtactgcactcaaacacaagagacaggaatactccgttgaggggttgatagcgtctcttgatgttgaggagaaagctcgggaaaaagatgccgcgtctaagggcgatggtgggcagtccactgccaatgttgtgcacaaggcccagaacaagagcaaggggaaatacaaagctcagcagaccaccaacttcaagaagaagaacaataacaacaatcctaatcaggatgagaggacttgctttgtgtgtggtcaacctggctatctggccaggaagtgtccacaacgcaaggggatgaaggcacctgcagggcagacctctaagtctgctaatgtgaccattggcaacactggagatggaagcgggtatggtaatttacctactgttttttcagttaaccagtctactaattggtgggttgatacaggggccaatgcacatgtttgtgctgacatctcattgttttcttcttaggtcgcacggggttccaccgtcctaatggggaataggtcacatgcttttgttcatggtgttggcacggtagatctgaagtttacttcgggaaagatcgtgcagctgaagaatgtgcagcatgtcccttctatcgacaggaatcttgttagtggctcccgtctgactagagacagatttaagttggtttttgagtctataaagtagtcgtgtctaaacatggatattttattggcaaaggttatgagtgcggaggcctgttctgcttttccctttctgatttctgcaataagtctatgaaccatatttgtggcagtgtggatgatgaggctaatgtatggcactcacgtttatgtcatattaattttggcttgatgtctcggctttccagcatgtgtttaattcctaagttttccattgtcaaaggttctaagtgccatagttgtgtgcaatcaaagcaacctcgcaagcctcacaaggctgctgaggagagaaacttggcacctctagaactcctacattcagatctctgtgaaatgaatagggtgttgacgaagggtgaaaaacgatatttcatgacgttgattgatgatgctactagattttgctatgtgtacttgttgaaaacgaaagacgaggctctagactattttaaaatttataaggcagaagttgaaaatcaacttgacagaaagaaaaaaaagacttaggtctgatcgtgatgtagagtttttctgaaacgagtttgacttattctgtgaggaacatgacattatacatgagaggacgcctccctattctcccgagtctaatgggtttgctgaaagcgagaaccgcacactgaccgacttggtgaatgccatgttggacaccgcgggactacctaaggcatggtggggggaggcattgttgacctcgaatcatgtgttaaacagagttcctaacagaaataaggacaaaacaccatataagatatggattgggagaaaaccatcactttcttacttgcgcacatgggggtgcttggcgaaagtcaatgcatcaataacgaagaagcgcaaacttggacctaagactgtggactgtgtctttctaggatatgctcaccacagcattgcctatagatttttaatagttaaatctgaggtacctgacatgcatcttggtacaattatggagtctcgttatgctaccttctttgagagctttttcccaatgaaggatacacatagtagttctagccaaccctctgaaataattcccagttcaatcacactaccagaacaaactgaacatacacatgaacatgttactgaggaggatgatagtgaagctcctcgaaggagtaaaagacaaaggacggctaagtcttttggtgatgatttcactgtgtacctcgtggatgacactcctaagtcaattttagaagcataagcatctcctgatgcagactactggaagtaggctgtccgtagtgaaatggattccattatcgctaatgggacttgggaggtgacagagcgaccctatgggtgtaaacctatggggtgcaagtgggtgttcaagaagaagctcaggcctgacggtactattgaaaagtacaaggctcggcttgttgctaagggctatactcagaaagaaggtgaagatttctttgacacttactcacctgttgctagattgaccacagttcgtatgctactttccctagcagcctcacatggtcttctcgttcatcaaatggacgttaagacagcttttcttaatggagagctggatgaggagatctatatggatcaacctgatgggtttgtagttgaaggtcaagaaggcaaagtgtgtaaattgttgaagtctttgtatggtctgacacaagctcctaagcaatggcatgagaaatttgacaaaacattgacatctgcaggcttcgcagtcaatgaggcagataaatgtgtgtactatcgccatggtgggggtgagggagttattctatgattgtacgttgatgacatactgatatttgggacaaaccttgaggtgataaatgaggttaaatcattcttgtctcaaaattttgatataaaggatttgggagtagctgatgttatcttaaacattaagctaattagaggtgagaatgggattacactcttacagtcccattatgtggagaagatctttaatcgctttggctacattgatagtaagccttctccaacaccttatgatcctagcttgttgcttcgcaagaacaagagaattgctaggaatcaactggaatactcccaaatcattggctcgctgatgtacctggctagtgcaactaggcctgatatctcctttgctgtgagcaagttgagccagtttacctctaatccgggagatgatcactggcgtgcggttgagcgagtaatgcgctatctgaaaggtactatggaattggggcttcactattctgggtatcctgcggtactggagggatatagtgattctaactggatctctgatgtggatgagatcaaagccactagtggatatgtcttcacactaggtggtggtgctgtttcgtggaggtcttgcaaacagactattttgacgaggtcaaccatggaagcagaactgacggcattggatactgctactgttgaggcagaatggctgtgtgatctattaatggatctgcctattgttgaaaaaccgacatgtgaaaagacgattgaagtctgtcaggaaattgagaaactccggagttataacgttggattacatccaaacaactagaaacctagcagatcccttcacgaagggactatcacgaaatgtgatagataatgtatcgaaggagatgggtttgagacccatagcattcttgaaagaactcacctttgtaagcttgactgttggtcgcagtctatgaagattttgagtgaatcttctaggaagcttactaaagacctaggagta

SEQ ID NO: 35359 - DNA, 9062 bp, Oryza sativa
  Clone ID: PAT_MRT4530_39287C.1
atggattctattatcgctaacgggacttgggaggtgacagagcgaccctatgggtgtaaacctgtgggatgcaagtgggtgttcaaaaagaagcttaggcctgatagtactattgaaaagtacaaggctcggcttgttgctaagggctatactcagaaacaaggcgaagatttctttgacacttactcacctgttgctagattgaccacaattcgtgtgctactttccctagcagcctcacatggtcttctcgttcatcaaatggacgttaagacagcttttcttaatggagagctggatgaggagatctatatggatcaacctgatgggtttgtagttgaaggtcaaaaaggcaaggtgtgcaaattgttgaagtctttgtatggtctgaaacaatctcctaagcaatggcatgagaaatttgacaaaacattgacatctgcaggcttcgcagtcaatgaggcagataaatgtgtgtactatcgccatggtgggggtgagggagttattttatgcttgtatgttaatgacatactgatatttggggcaaaccttgaggtgataaatgaggttaaatcattcttgtctcaaaattttgatatgaaggatttgggagtagctgatgttatcttaaacattaagctaattagaggtgagaatgggattacactcttgcagtcccattatgtggagaagatcttgaatcgctttggctacattgatacttgttgcttcgcaagaacaagaaaaattgctaggaatcaactggaatactcccaaatcattggctcgttgatgtacctggctagtgcaactaggcctgatatctcctttgctgtgagcaagttgagccgatttacctctaatccgggagatgatcactggcgtgcgcttgagcgagtaatgcgctatctgaaagatactgtggaattggggcttcactatactgggtatcctgcggtactggagggttatagtgattctaactggatctctgatgtggatgagatcaaagccactagtggatatgtcttcacactgggtggtggtgctgtttcatggaggtcttgcaaacagaccattttgacgaggtcaactatggaagcagagctgacggcactggatactgctactgtagaggcagaatggctgcgtgatctattaatggatctgcctattgttgaaaaaccggtgccggctatccttatgaactgtgacaatcaaacggtaattgtcaaagtgaatagttctaaggataatatgaaattgtctagacatgtgaaattaagaaactccagagttataatgttggattacatcccaacagctagaaacctggcagatcccttcacaaagggactatcacgaaatgtgatagacaatgcatcgaaggagatgggtttgagacccatggtttgcctcctactctgtgctgcgccgtcgctcgtagattactccatcccgctcgctggcgtgcacctgcgatcgggagagcaggtctccggaacctctgccttcgacgtcctgcaccgggagaaggcgacaataaggtttttgggaagcgttttgcgcgactgctccctgttcgtccgcgacggctcgtcttcctcttcgctcgcgtgctgcgtgccttcgtagacgctggcaaacctgaaggaattcttactgctgatcagcagaagcaattcgaggaagccactactctctttgtgggatgcattcttagcgttcttggcgatcgtctggtcgaggtgtatatgcatatgaccgacgctaaggagttgtgggatgcactgaatactaaattcggtgctactgatgctagcaatgatctgtatatcatggagcagtttcatgactacaagatggctgacaaccgttctgtagtcgaacaggctcatgagatacaaaccatggctaacgaactcgaactccttaagtgtgtcttacccgataaatttgtggccgggtgcattattgcgaaactacctccatcatggagaagtttcggtactgcactcaaacacaagagaccggaatactccgttgaggggttgatagcgtctcttgatgttgaggagaaagctcgggaaaaagacgccgcgtctcagggcgatggtgggcagtccagtgccaatgttgtgcacaaggcccagaacaagagcaaggggaaatacaaagctcaacagaccaccaacttcaagaagcagaagaagaacaacatcaatcctaaccaggatgagaggacttgctttgtgtgtgggcaacctggtcatctggctaggaagtatccacagcgcaaggggatgaaggcacctgcagggcagacttctaagtctgctaatgtgaccattggcaatactggagatggaagcgggtatggttctaagtgccatagttgtgtgcaatcgaagcaacctcgcatgcctcacaaggctgccgaggagagaaacttggcaccactagaactcctacattcagatctttgtgaaatgaatggggtgttgacgaagggtggaaaacgatatttcatgacgttgattgatgatgctactagattttgctatgtgtacttgttgaaaacgaaagacgaggctctagactattttaaaatttataaggcagaagttgaaaatcaacttgacagaaagataaaatggcttaagtctgatcgtggtggagagtttttctcaaatgagtttgacttattctatgaggaacatggcatcatacatgagaggacgcctccctattctcccgagtctaatgggattgctgaaaggaagaaccgcacattgactgacttggtgaatgccatgttggacacggcgggactacctaaggcatggtggggggaggcattgttgacttcgaatcatgtgttaaacagagttcctaacagaaataaggacaaaacaccatatgagatatggattgggagaaaaccatcactttcttatttgcgcacatgggggtgcttggcgaaagtcaatgtaccaataacgaagaagcgcaaacttggacctaagactgtggactgtgtctttctgggatatgctcatcacagcattgcctatagatttttaatagttaaatccgaggtacctgacatgcatgttggtacaattatggagtctcgtgatgctaccttctttgagagctttttcccaatgaaggatacacatagtagttcgagccaaccctctgaagtaattcccagttcaatcacaccaccagaacaaactgaacatacacatgaacatgtcactgaggaggatgtcagtgaagctcctcgaaggagtaagagacaaaggacggctaagtcctttggtgatgatttcactgtgtaccttgtggatgacactcctaagtcaatttcagaagcatatgcatctcctaatgcagattactggaaggtggctgtccgtagtgaaatggattcgattatcgctaacgggacttgggaggtgacagagcgaccctatgggtgtaaatctgtggggtgcaagtgggtgttcaagaagaagtttaggcctgacggtactattgaaaagtacaaggcttggcttgttactatgggctatactcagaaagaaggcgaagatttctttgaaacttactcacctattgttagattgaccacaattcgtgtgctactttccctagcagcctcacatggtcttctcgttcatcagatggacgttaagataacttttcttaatggagagctggacgaggagatctatatggatcaacctgatgggtttgtagttgaaggtcaagaaggcaaagtgtgcaaattgttgaagtctttgtatggtctgaaacaagctcctaagcaatggcatgagaaatttgacaaaacattgacatctgcaggctttgcagtcaatgaggcagataaatgtgtgtactatcgccatggtgggggtgagggagttattctgtgtttgtatgttgatgacatactgatatttgggacaaaccttgaggtgataaacgaggttaaattattcttgtctcaaaattttgatatgaaggatttgggagtagctgatgttatcttaaacattaagctaattagaggtgagaatgtgattacactcttgcagtcccattatgtggagaagatcttgaatcgctttggctacattgatagtagtatggaattgtggcttcactattctgggtatcctgtggtactcgagggatatagtgattctaactggatctctgatgtggatgagatcaaagccactagtggatatgtcttcacactgggtggtggtgctgtttcgtggaggtcttgcaaacagaccattttgacgaggtcaaccatggaagcagagttgacagcactggatactgctactgttgaggcagaatggctgcgtgatctattaatggatctgcctattgttgaaaaaccggtgccggctatccttatgaactgtgacaatcaaacggtaattgtcaaagtgaatagttctaaggataatatgaaatcgtctagacatgtgaaaagacgattgaagtctgtcaggaaattgagaaactccggagttataacgttggattacatccaaacagctagaaacctggcggatcccttcacgaagggactatcacgaaatgtgatagacaatgcatcgaaggagatgggtttgagacccatagagggctacccggaggttctggccggaacttccgggcgccgtttcattgcaaaaaatttcctaagtgctgcctggaagttcctggcatttttgcccggaacctcctggcagcttcaccgctttgaagatgaagacttagggggaaagaacggggaaaatagaaatgaagatgaagcaagcagcaagggaactccaccacacaagggagctactataccttttgattacagcaaacttaccattccctctcacaactttgtctccgtgccttccgggcgtgctcctcaatttgatgggacatactatgccgcttggaagcacaagatgaagttgcatttaatctctttgcatccaagtatttggaaagttgtttgtacaggtattgatataccccatgatgacatggagctcacttcggagcaagagcaactcatccaccgcaatgcccaagcttccaatgcaattctctccgccttgagttcggatgagttcaacaaggttgatggacttgagaaggccaaggagatgtgggataatttgcaattggctcatgagggatctcccgccgttcgtgaggccaagattgaattattggaaggaaggcttggaagatttgtgatggatgataaggagacatcacaacagatgtatgataggatgatgatccttgtcaacaagattaaaggacttgggagtgtggacatgacaaatcactttgtggtcaagagacttctctgtgcatttggtccaagaaatcccactcttgtatcaatgatacaggaaatgaaagacttcaagagactcaccccaagtgatattcttggaagaattgtgtctcatgagatgcaagaagaggaagctcgtgaagtgagacaaatggtgaagaatgccaccatgataaaaaatcaagaagttgctttgaaggtaaaaaaagaagaagattcaagttgtaaagaaagtgaagatgaagagatggcttttattgtcaaaagattcaagcactttctttgcaagagtggctatggcaaagggaggaaggatgatgacaagggaaatatgcaatcaaagagagcttgcttcaattgtggcgaatatggccacttcattgccgattgtcccaagtcaaatgaagctaaggctaagggaggcaagaagaagccggagcgtactcatgtggcggaggcacacatggcagaagtgtggtactccggagatgaagaagatcctgaggtcaagcccaagcccaagtcaaaagacaaggttgaaggagaagctagccttagggatgtcaatgaaactcttcaagaaaaatttgttaatttagacaaaagtcataaagatcttgaagttcaatttgacactctttggaatagcacctctcaaccaaatgtggtttctaattcttctaacccttctactagcaatggttatgctaggtgttacaatattgatttgaactcttgtggtactaatattgatgctatgcaagctcttaagaaagagaatgaaaggttgggcacattggtgaaatatggatgcatgaagacataccattcaaaagatgccctttacaagaccatcaccgctcatcctaacaaggatggacacgggctcgggttttcgggtggaagtcctgtgtctaagcgcgtgatggtaaatgggaaagaatgcttgatgtttgtgagagaaggtaaagcaccacaagaaagtgaggtgactagtcttgtgaactgccagggacccggaacatccggacagaccgggagaaacctccgggtgggaatctctgtctctcaaaaattcccactaggaagttccggccgttttgccaggaagttccgggccaatggccatgcacaagacatgaccggaagttccgggcacaaagccaggaggttccggccagagggtctttactatgattcatatgtaatttccaaaaattcagagggcaaagtggttgcctattttaatggaaattacaatgatgagtaccgcacttgtgtgtgggtgccaaaggctttggcatactcctccggtggttcaagttgggttgtggacagtggttgcactaatcatatgactggagagagaagtatgtttacaagtcttgatgaggagagcggaactcgtgagaatattgtgtttggagatgatggtaaaggaaagttgggttataattgcttgtttaccgatgaggatgtgaccgtctttagaagggatgactcctccgttgcattcaaaggcaagttgaagggtgatctctatctggtcgatttcgatgtggatagagtgaatccggaagcttgtttgattgctaaatcttccatgggttggctatggcatcatagactagcccatgttggaatgcggaatttggcaactcttctaaagggggaacacatcctcgggctcactaatgtcacatttgagaaagattatgtgtgtagtgcttgccaagcctggaaacaagttgggaatccacatcctatcaagaacatcatgactacaacacgccctcttgagcttctacatatggatttattcgggcccgtggcctacataagtattggaggtaacaagtatggttttgtcattgttgataatttttcccgctttacttgggtgtattttctccatgacaagagtgaggctcaagatgtcttcaagcgcttcgccaagcaaggccaaaacctctataatctcaccatcaagaggagggaatcaagcacgagttctccacccccctatgatcctcctcaaaatggcattgttgagaggaagaaccaaactcttattgaagccgcaagagcaatgcttgatgagtacaagacttcggatatcttttgggcggagaccgtgagcaccgcatgccatgccatcaatcgcctctacctccacaaaatcctaaagaaaacttcatatgagctcttgagtggtaagaagccaaatgtttcatattttcgtgtctttgggagtaaatgcttcattttgagtaagaggcctcgttcatctaagttctcacgtaaggtggacgagggattcttacttggctatgagtcaaatgcacatgcctaccatgtcttcaacaaaacctccagtattgttgaagttacaagggatgtgacatttgacgaatctaatggctcccaaggagagcaagttgttgtacatgttgtagatgatgcggatcctagacaagcaattgattctaaggctattggagacatacgaccagtcaagacgcaggatgacgaagaagatagggatcaaccttcgtcatcgacatccaatagccctacaacaagtcaagagtcagttgacccggaagttccgggaccagatgattggaacctccggacctccccaggcccggaagttctgggtccatctgctaggaagttccaggcaaaggatagtcaaggcgtgcctacggcacaagtggatgggattgatgccgagggcactgtagagcatcctgatcgggctcatgtcccctcggtgcaccatccaagaatacatcacattgtccaaagagatcatcccgtcgacaacatacttggtgatataagaaagggggtgatggctatgcaagaggagtttaataacttcactcgcaaccaagtatggacattggtggagagacccgaccaaaatgtcattggcaccaagttatatcaaatggatgttaagagcgcctttctcaatggacccctcttggagttagtctatgtggagcaaccaccggggttcgaggatccaaagttgccaaaccatatgtacaagctccacaaggcgctcaacgggctcaaacaagcccctagagcgctgggagggccccaacgtgttcctctacttcctccccatctgcagcgcgggaacgccatcatctccatgtcgcggttcgacatcaactccctgatggaggctgtgcagaggcaccgcgtcacgcacctgttctgcgtgccgccggtcattatcgcgctcaccaagcacgggagggcagctgccattgacacggtgggagaatgggacaccggtgtcgaggctggcgaggagcagctccgcgacgtcacaactctccaccatcgcccactatgtactatgactcgtgagaaaagacagaaagcctctcaggatgtgtccggtgatgagagtcctcctattcggtatactcgtggtcgtttgggtaaagagaaagtggttgagggcggcagtggcagtggcactcgtacttctcctagatttacaaggcaatccagtaaccgtcctgttcagattagggatgttgacagtggtcaagtgatgcccctaatacaagaggtcgcgggagaggtggtggtcgcagttctggggctggaagggcatctcatgatttccctgtga

SEQ ID NO: 35360 - DNA, 808 bp, Oryza sativa
  Clone ID: PAT_MRT4530_39288C.1
tcagaagacaacacaacggcctttgcaaaacaggctgatttttcttgtctaggagacacgatgcctcaactggcaatcggcaagcaaaccagatagtactgaagaattcacgtttcaggtcacatattcaatttcatgcgggatacacagagatattcacgatggctacaagctctcatattcatgtcaaatggtagatgctcgcgacttgagagaatcgcaacgcgactggagaaaaatgcaatctgatttcttctgctcacgcattcaaagtttctgtccataacatgagtgaagctctcacggctcaacggctgaaacgctctgaaatcgacttcggtatgaggctggttgtgtttgactgtttctccagccttgcaatctcttcgacagatctcattatttgctctgaacttgtttcaatcacttgtcccccaagtatcatttcatctaaaattgtatgcagcttgttgaagttaaatacgatgtcaagctcacacacattcttgaagcatctgtccaatgtttcaacaaaaacttgcacaagatcaagcaccgcaagttcattttcagagccatcaaagacaaaacctaagtacaatgtggccaaatgtttgtagatcaatttcgctcccggtccaaagattgcatcaaccttgacgaaattgcttacactgtccggccttgcagacaacaactggaagacggcgcggacgagttcctgatgcttctcgggggcatggtagctgtagaacttgaggaggcgcggcttgccctgcgtgctcatgaccatcacggcctggatcat

SEQ ID NO: 35361 - DNA, 528 bp, Oryza sativa
  Clone ID: PAT_MRT4530_39289C.1
atggcggcggcggcgggctcggcaaaggaggagtttgcggcggcggcaccgggctcggtggagggcggcgccggtcggtggagatgccggtcgggtaggtcggcgccgggcgggcggcatcgggctcggtgggggtcggcgacgtgcgtcggtgaggacgcgggcggcgacgacaaggaaggccaacacctgtccggtcagtgtagaggctcgtgggaggacgacggcggtggcggcgggctcggtggtggcggcgcctggctcggtggagggcgtcgccggtcggtggaggcggcgccgggctcggtggaggaggcgggctcggtggtggcggcggcgggctcggtggcggcggtggcggtctcggtggcggtggcggcgagggaggacgacggcggcgaaatttgtcatattgtcaaaatcaatttcaagctgttggaaacaaggttatatagacaaatgaccaaaataaaagttatagatcttgataacctctacaattttgttgttgaccatatttccatttga

SEQ ID NO: 35362 - DNA, 474 bp, Oryza sativa
  Clone ID: PAT_MRT4530_3928C.1
atgacgtcggcgatgacgtcacctccggcggtggctcgggcggctcggcggctcggcggctcggtcgcgcaaactcgtcggcgaatgacggcgcggcggcgcgaacggaaggcaccagcacgatgcgggcgacgaggcgaactcaccggtgaccaaagcaacggcggaggagcaacggacaacgtcggcgacgatgaagaagcggcggcgaccttcggcttgacgacggcgacggtgttccggcggtcaacagcgacggcggaggggcggacgaggacggcggcgacttggcgaccacgatggcgacctccccgagcgacggcgacggctggagcgacggcgaagcacggctggagcgacggcgacgacggcggctcgaggttacacggcgctagggctcttccgacggcgagaggcgaaagcaaaggtggcgacgggaagaggagacaccggggatccttttataggggttga

SEQ ID NO: 35363 - DNA, 2325 bp, Oryza sativa
  Clone ID: PAT_MRT4530_39290C.1
atgggcttcttctccccctccaactccaccccggccaagctctacctcggcatatggtacaacgacatccctgtgcgcaccgtggtctgggtcgccaaccaagaaaccccggtcacaaatggcacggccctgtccctgaccgactcctccgacctcgtcgtgtccgacgccgacggccgcgtccgctggacggccaacgtcaccggtggcgccgccggcgccggcaacggcaacacgaccgcggtgctgatgaacaccggtaacctcgtcgtccggtcgccgaacggcaccgccctgtggcagagcttcgagcacccgaccgactcgttcctgcccgggatgaagctgcggatgatgtacacgacgcgcgcctccgaccggctggtgtcgtggaggggccccggcgacccgtcgccggggagcttctcgtacggcggcgacacggacacgctcctgcaggtgttcatgtggaacgggacgcggccggtgatgagggacgggccgtggacgggcgacgtggtggacggccagtaccagacgaacagcaccgccatcaactacctcgccatcctcagccgcgacgacgaggtctccatcgagttcgccgtccccgccggcgcgccgcacaccaggtacgcgctcacctacgccggcgagtaccagctccagcggtggagcgccgcctcgtcggcgtggtcggtgctccaggagtggcccaccgggtgcggccgctacggccactgcggcgccaacggctactgcgacaacacggcggcgcctgtcccgacgtgcaggtgcctcgccggcttcgagccggcggcgagcggcggttgccggcgggcggtggcggtgcggtgcggcgacggcttcttggccgtggccgggatgaagccgccggacaagttcgtgcacgtggcgaacgtggcgacgctcgaggcgtgcgccgcggagtgcagcggcaactgctcgtgcctggcgtacgcgtacgccaacctgagcagcagcaggtccaggggcgacacgacgaggtgcttggtgtggtcaggggacctgatcgacacggccaaagttggcctcgggagcggccacagcgacacgctctacctcaggattgcaggccttgatacgggtggaacggcgaagagcgacgcagtcaagattgtgctgccagttttagcttgtattttgactgttctatgcatttcctttgcatggttaaaaatcaaaggcaagagaagaaataggcagaagcacagagagctaattttggatgtcatgagtacatccgatgatgttgggaaaagaaaccttgtccaggattttgaattcctatttgtaaaatttgaggacattgctctagcaactcacaacttttcagaagcatataagattggggagggaggttttggcaaagtttacaaggcaatgataggtggtaaagaagttgctgttaaaagattaagtaaagattctcagcaaggaaccgaggaattcaggaatgaagttattcttatcgcaaaattgcagcatagaaatttggttcgccttcttggttgttgtgttgagagagatgaaaaactgctaatttatgagtatttgcctaacaaaggcttagatgctaccctttttgatggctcgagaaaaccaaaactagattggacaatgcggtttaatataatcaaaggagtagctaggggacttctttatctgcaccaagattcaagattaaccataattcatagagatctcaaagccagcaacgttttaatggatgcagagatgagacccaagatagcagattttggtatggcaaggatcttttgtgataatcaacaaaatgcaaatacccggcgtgttgttggaacatatggttacatggctcctgaatatgcaatggaaggtatcttctctactaaatccgacgtctacagctttggcgtgttactattggaagttataaccggtattaggagaagttccacaagtaacatcatggactttccaaacctcataatctatgcgtggaacatgtggaaggaagagaaaaccaaggatttggcggactcatcaattattggtagttgcttacttgatgaggttttgctttgcatccatgtagcactattgtgtgttcaagacaacccaaatgacaggccacttatgtcatctactgtgttcattctggagaatgggagtagttctgcacttccagccccaagtcgccccgcctactttgcatacagaagtgatgaatcggagcaatcaagagaaaatattcagaactcaatgaatacttttaccctaacaaatatagaggggcggtaa

SEQ ID NO: 35364 - DNA, 216 bp, Oryza sativa
  Clone ID: PAT_MRT4530_39291C.1
atggcgtcgtcctcctccactaccagtagtgctaatcctctccagggaagttcggtgagtgagaagcttgggaaaaccaaccatgcactatggaacgtgcagggacacctgactggcgcagcggagaagccagacgctgagatcactgtcacagctgacggcaagacggagaagaaggcgaatccggcgtttgaagattgggaagccgtggattag

SEQ ID NO: 35365 - DNA, 572 bp, Oryza sativa
  Clone ID: PAT_MRT4530_39292C.1
ggctaaatggttccaatgcaagtattctgttaggaatcactactctgggttgcctggtcatccaagttcttgtcaaaatagacagaattatgggatttgagctcttcacttcttatagctacttcctcatagataaggccttgattaccttatttatagaaataaactagggtgttttagttgcttaagaaagcatctgcccaaggaaaatgttgttgaaaatgaaggtatttggtattgcggacttggttataagtgaattggatattgagatgcctagttacctgggactgcttacactgctacaaaacgattggcacacaagaaaaagatccatggaaacatggagaatggagatgttcagttcatctattgtccaaagatctctggtttatcttgtagtgcatggctaaaaataacatttgagattcgggggaaataatggtggaaggagtgcttggtaagttggaaaatagctcaggacaccacttgtttctggaatgtccgtctgtttcttcggattgtagaaattgaagggtggaactccttgcagaggattagatcatgctcca

SEQ ID NO: 35366 - DNA, 190 bp, Oryza sativa
  Clone ID: PAT_MRT4530_39293C.1
gagaatatgggactgtgtcagacgtcggaagaatctgcaaatgctgacctttgacatacagaatcaggtcatggactacacaaacttcaaaccgagttggtgaacttggatgcttcaccaacgcataaacaccacgtatgtagtattatgagccagcattcttgttcgaagacgggggctcatgtcatac

SEQ ID NO: 35367 - DNA, 1705 bp, Oryza sativa
  Clone ID: PAT_MRT4530_39294C.1
atggcggcggccacgcgcgccgcgacggcgtcggcggcgaggcaggtgacgaagcggaacttcgcggaggccgtgcaggatctggcggcccacgtggaggcgtgcgactacgtggccatcgcggcgcagaggacgggcgccccgacgggctggcggcgcgcgctgccggtggacaccccggagacggcgtacctgaaggctaagctcgccgcggagtccttccagccgctccacttcgccatctgccccttccgcgttgatgccacatccccttcgaccctcgtcgcctatccgtacaattttcatttatttcccagagatgagttacagttgggaatgcctgcttacagtttttcctgtcaatcatcttatttatcatctatggctcatagtggttttgatttcaatatgtgcatttatgatggttctctagtaaatacccttaggcaactgattttgggtagtgaatcgtatggttcaaggcccagtttcagcattgatgtttgcagtgatcgccaagttcaactggttttggaggcagcaaatcatatctctgatgaccttgtacctcttgttgttccggacaaagctgggacagctagggcaattggcagcatgtgcttgtataaaataaaaggaaggtgtcacgtattcaggatccgttcttatggaaatcattttcagatggacataaaaaaaatggaggatgaacataatttgaagttccgtggttttcgagaagttattgatctactatcatcttcacagaaaccaattatatcttataatttcttgaatgatttcacaatgatacactccaaatttgttgcacctcttccaccaaacttgcatgaattcatgtgctccttgaggatggtattttctaatgttattgacatcagtcacatgtggagagaaattggccctttgagaaaagcgaagaatatacaaggtgctctgagttacctacaaagacaatactttgtgccgatggatgtagaaatacctcagcaagatggtaacaacagtgtcaccaaaagtggggaaaatgttctgagaataacaaagttgtttgctaaactaagtaatttactgaaaatcagtcccaatggtcaaactcactctggtgataagtgtcacacagttgaggaatattcttacatattgtatccgagttgtacggctgaagaatctgaagatgataaatccagtaatgagtcaaataccaccagatcagtgagaactgataatgttgttttcctatgggggtttagggagacatctgtcaaagaactgagatctcgccttgcaagcttgcatcatgccttctcaaaagattttgagctcagattattggataactcgtgctcagctttgatattccacagttctgatacggcaatagatttactaagagaaataaactcggaaagtccctctctgaataatttcttttcggaaggcctgaaagctgcaggctttgatgcctacaggaaggtttgcaggtcagggctttgggattcagatttagctgaggccctggatggtgtttcatctgaaccatctacttcaacgctttctgggcgtggcacctctgagatatgctggaatacttcgctgatgctagatctaaaggaatatccgggtcgctcttgtctttacggagcttccacagaaaacccaggcactccgaggtgaaggtcat

SEQ ID NO: 35368 - DNA, 1542 bp, Oryza sativa
  Clone ID: PAT_MRT4530_39295C.1
atggccgcctccagaagcgagcttctccggccggcattcggcgagccctctccttcgctaggaccattcgtcgttaaccctcacacctgcagctacaggtggtggcagaagttcctgatcgtgctggtgctgtacacggcgtgggcgtcgccgttcgagctggccatggagaagtcggcctcggccgcgctcgccgtcacggagctggtggtcgacgccttcttcgccgtcgacattgccgtctccttcttcgtggcgtaccgcgacgcctccaccggcctcctcgtaaccgaccgcaagaagatcgccaccaggcacctggcacgaccatgcttggcgctggatgtcgcctcaacgattcctttacagatgatctaccggatagtgagcggcaaaagacaagcattgtatgggttgctcaatcttctccggctctggcgattacggcgcgtcagcaagctctttgcaaggttggagaaggacattagattcagttacttgtggaccaggcttatcaagctcctctacgtgacgctgttcgcagtgcacttcgcctcgtgcatctacctgtggatggcgttccaccacaaggcgaaggagctgacgtggatcggcagccagttccacggcttcgaggaccgcagcgtgtggttctgctacacctgcgccgtgtactggtccatcaccacgctcgccaccgtcggctacggcgacctgcacgccgccaacacgggcgagatgttgttcagcatcgccttcatgctcttcaacatgggcctcacctcctacatcatcggcaacatcaccaacctcgtcgtccacgaaaccaccaacaccttcaagatggtcgcggagatgaaggcagagtcatttccccccaaggcggatatcatcctggagaacgaggcttcgacggactgctacatcatcgtgtctggtgaagtggaggtattgacaacccttgaggatggtacagagaagcaagtgatgagaatagggccacggggaatggcaggggaaattggggtgatgttcaacatcccacagccgttcaccatccggagcagaaagctcacgcagctcgtccgtataagccacagccatatggtctcgaccatccggcctaacactgcagatggggtcgttgtattctccaattttgttctgtaccttgaatctctgaaggtgaaggcaaaggaaacagcctttgttagggatcatcttcgcaatggctactccacggtattaggaagtgcaaccatgtttgatgtagatgaatccaaagagtcagctcacaaaatgttgccatgcaaagaacccaaacgggtatctattcatgaacacctcttaaatgggactggcacagcactgaacggctcatctgggaagctcgtcatactgccagattctatgcaagatctgatgaaactttcagaaaagaagtttgggaaggcagcgagagggattctcaccgtgggaggtgccgaggtagaggacattgaagtgataagagatggcgatcacctgttctttagttggtag

SEQ ID NO: 35369 - DNA, 383 bp, Oryza sativa
  Clone ID: PAT_MRT4530_39296C.1
ctcactgatggggaggacgctatccggcaactgccgaggtataccctttacccttcgatatacgtcacatatcaatatggcatgcccgcgcatgtagggacattctctatacgtgttaaggaaatccttcacggaattggcaaatggaaagagacctactcagacaagattgggttgtcaacgtatcgtgtgcggttcgacgtctccgagtcctgcttggagaccgcctggcctgcgatataaaagggacccgctgggaggacctgcgggatcgaatctcacagccaacgccaccaccacagcctacgaagtcggaccctacatgagccaaatcgctgggaggtctagtcgaatcaactcgattatgatctcgccggtttcat

SEQ ID NO: 35370 - DNA, 1782 bp, Oryza sativa
  Clone ID: PAT_MRT4530_39297C.1
atggccgcctccagaagcgagcttctccggccggcattcggcgagccctctccttcgctaggaccattcgtcgttaaccctcacacctgcagctacaggtggtggcagaagttcctgatcgtgctggtgctgtacacggcgtgggcgtcgccgttcgagctggccatggagaagtcggcctcggccgcgctcgccgtcacggagctggtggtcgacgccttcttcgccgtcgacattgccgtctccttcttcgtggcgtaccgcgacgcctccaccggcctcctcgtaaccgaccgcaagaagatcgccaccaggcacctggcacgaccatgcttggcgctggatgtcgcctcaacgattcctttacagatgatctaccggatagtgagcggcaaaagacaagcattgtatgggttgctcaatcttctccggctctggcgattacggcgcgtcagcaagctctttgcaaggttggagaaggacattagattcagttacttgtggaccaggcttatcaagctcctctacgtgacgctgttcgcagtgcacttcgcctcgtgcatctacctgtggatggcgttccaccacaaggcgaaggagctgacgtggatcggcagccagttccacggcttcgaggaccgcagcgtgtggttctgctacacctgcgccgtgtactggtccatcaccacgctcgccaccgtcggctacggcgacctgcacgccgccaacacgggcgagatgttgttcagcatcgccttcatgctcttcaacatgggcctcacctcctacatcatcggcaacatcaccaacctcgtcgtccacgaaaccaccaacaccttcaagatgagggacatggtgcagaggacgtcggtgttcgggagaacgaaccggctgccggtggcgatgagggagcagatgatggaaagcctgcagctcaggttcagggcggaggagcagctgcagcaggagatgctgtccgagctgcccaaggccgtgcggtcaggcatcgcgcagcacatgttcagaggggcggtccagagctgctacctgttccagggcgtctccgacaagctcgtcctgccgctggtcgcggagatgaaggcagagtcatttccccccaaggcggatatcatcctggagaacgaggcttcgacggactgctacatcatcgtgtctggtgaagtggaggtattgacaacccttgaggatggtacagagaagcaagtgatgagaatagggccacggggaatggcaggggaaattggggtgatgttcaacatcccacagccgttcaccatccggagcagaaagctcacgcagctcgtccgtataagccacagccatatggtctcgaccatccggcctaacactgcagatggggtcgttgtattctccaattttgttctgtaccttgaatctctgaaggtgaaggcaaaggaaacagcctttgttagggatcatcttcgcaatggctactccacggtattaggaagtgcaaccatgtttgatgtagatgaatccaaagagtcagctcacaaaatgttgccatgcaaagaacccaaacgggtatctattcatgaacacctcttaaatgggactggcacagcactgaacggctcatctgggaagctcgtcatactgccagattctatgcaagatctgatgaaactttcagaaaagaagtttgggaaggcagcgagagggattctcaccgtgggaggtgccgaggtagaggacattgaagtgataagagatggcgatcacctgttctttagttggtag

SEQ ID NO: 35371 - DNA, 889 bp, Oryza sativa
  Clone ID: PAT_MRT4530_39298C.1
atgccgtactacgtagatcctcgttccaacggaccccaggtctacgggtatcctccgttgacagtggcgcgccaggtagggcgacttggtgctcaaggttctactactatgacttcaagcctcttcgacgacagcgtcgaccccggcatcaaccaaggagcctcaacttcaacgatgctggtgtggactcaagtcggcgaaatcgtcttcccggtctacaccacgatgccgatctcgaatggcccagcaattaccaggagcgagaatggcgtggttacgaccccggtcgactccacgtcgaaagatcctcctgcagaagcggagaacggaacatcgcccacatttgagcccgagaaggatcctaacacggccaaatcttgtctccccgacgagaagcacgagccgacaaggataacttccgaggcgacaaggacctggtgtcctatccacaagaccaaaaggcacaccttgcaagcttgctcggtttttcccgacgtacaagctgaaatccgcaagactcacgacctctcgagctacaaggtccttctcagtgccatgaggacgtcgcctcctaaggcctcatcatcaacaagtacagcacgcaacgtgtacgctattgatgggaccagcacatctacaggcggcaacacggaagcggaggatcaattggctacgcaggcccaacatatcagaaccatcaatgcaatactgagggaaaccccttatgatcccgtcttgaacgctgatcttgatcagtggatgaaacgactacgggaatcagtggccaacctcagtaacgcgttcgaggaagccgctgccagggcaccaccagaacaaccgccgacaggcggcgctaatggggaacagcctgaacagcggacgccacctc

SEQ ID NO: 35372 - DNA, 834 bp, Oryza sativa
  Clone ID: PAT_MRT4530_39299C.1
atggcgccgcccgtctgcttctccgacctgccacctgaagccctcgacgacatcgcccgccgcgccggcgccctcaacaacgtcgtgtgctccgccgtctgcaggccatggcggcgcgccctgaaaaccacgcgcctcgggctactgaagcaaccgaaccggccgtatagcgtcaacctagagctgtggtgcggcagcatcgagcttcatcccatccgccgctgcatcaacggcgaacgaaccgtccgcatcgccaaccacgacggcgccgcgccagtaacccgcatcgtcggttcttcccacggctggctcgtcaccgtcgacgaggacggcggcctgtccctgctcgaggccgtcaccggcaggttgtacccgctgcctcccatcacttcgtccggtagcaagaaggtggccaaggacctcgaccagatgggcgagtccatgttccagaaggccgagctggttcccggccaccggctgggcaccttcgccgtgatgctgatccacggcggcgggttcggcatgtcgttcctccgtccaggcgccaaatgctggacggcggtgcgcgtcccgaaatggatgaagcaaaagttcgtcgacgtcgtgttccaccagggcgcgttctacacggtcagccgcgacgccgaggtgagcgcctggacgccggacgcgtctcggagccgaggcaggagtgcgcgtaggtctccctcgtggtgtcgatcggcggcggcgacctgctcatggtgtctcggttgcacgagcgcgagggggcgtggctcgccgtggaggacctcggggaggcggccatcttggtggggagcagctgcagcttga

SEQ ID NO: 35373 - DNA, 547 bp, Oryza sativa
  Clone ID: PAT_MRT4530_3929C.1
gcacgagggcggctgagatctctgccagccgtccactccatgttccaccacctccgccgccgcctcctctgcaccgcggcggcgccgccgatccgcgtggcgctgacggagtcctccggccgaggggtcttcgccacccgccccatctccgccggcgaggtcctccactccgcgcagcccctcgtctcccacccttcccctcccctcatccacgaggtgtgctacagctgcctcaggaggaagtccgggagcggcggcggctcgagcgggagctgctacttctgcagcgacgcgtgcagggagcacgccaagggattccatggcgttgaaaagaaagcggattggtctttgtttgatgaccactgcagttcacgcggtctattgtacccgtacatggcatagcgactagcttgcatggttatctcaggagctgttagtgcagactgtcttgacatactccagcctgcccgcttgcaccaggggacacttaccgagatggtggaagagtttgcgttgctgcctccccttttcggatggccgggttttt

SEQ ID NO: 35374 - DNA, 893 bp, Oryza sativa
  unsure (1)..(893): unsure at all n locations
  Clone ID: PAT_MRT4530_392C.1
ccggccgggaagtcagcttcagttcgctgcatctctcctgcaagaattaatatatctttcagactcccagagattacacctgatcgatcgaattgatcgcgatgacgacgatggctaaggtgatcacttcggttgtcattgcagccgtggtagcgcttgcaatggtgtcgctggtcgctgcggactctggcactgcgaccttctacacgcccccttacactccgtcggcgtgctacgggttcgaggaccaggggacgatgatcgcggcggcgagcgacgtgttctggaacggcggggcggcgtgcgggcagcagtacgtggtgacgtgcacgggcccgaccaaccagggcgtgccgcagccgtgcaccgggcagagcgtcaccgtgaagatcgtcgaccactgcccctccggctgcgcgggcaccatcgacctctcgcaggaggccttcgccatcatcgccaaccccgacgccggcaaggtcttcatcgactaccaacaggtgtaataattctacggttgaggtgatgaagaccgcacgtgtgtcactatatataataaagtgcatctccaaattaaaataagggcaagctagcttggattggagcgaacttgtgtgttccataattatggttaattaattaattagtacgtaccaaaaataacagattgtaactgggagagagtgaaaaaatgtctctcctgatctataaagttaccttgtggttgagaaagaaacatactccttacccatactaaaaaaaaaaaaatcggcggcggnnnnnnnnnnnnnnnnnnnnnnnnnnnnnnnnnnnnnnnnnnnnnnnnnnnnnnnnnnnnnnnnnnnnnnnnnnnnnnnnnnnnnnnnnnnnnnnnnnnnnnnnnnnnnnnnnnn

SEQ ID NO: 35375 - DNA, 5493 bp, Oryza sativa
  Clone ID: PAT_MRT4530_39300C.1
atggctggttttgccgatgcactgaggccggataaattcaccggtgtgcattttaagagatggcagatcagggtcactctgtggctgacagctattaaatgcttctgggtgagtactggcaaacctgaaggagttcttactgctgaacagcagaagcaattcgaggaagccactactctctttgtgggatgcattcttagcgttcttggcgatcgtctggtcgaggtgtatatgcatatgaccgacgctaaggagttgtgggatgcactgaatactaaattcggtgctactgatgctagcaatgatctgtatatcatggagcagtttcatgactacaagatggctgacaaccgctctgtagtcgaacaggctcatgagatacaaaccatggctaaggaactcgaactccttaagtgtgtcttacccgacaaatttgtggctgggtgcattattgcgaaactacctccatcttggagaagtttcggtactgcactcaaacacaagagacaggaatactccgttgaggggttgatagcgtctcttgatgttgaggagaaagctcgggaaaaagatgccgcgtctaagggcgatggtgggcagtccagtgccaatgttgtgcacaaggcccagaacaagagcaaggggaaatacaaagctcagcagaccaccaacttcaagaagcagaagaagaacaacaataatcctaatcaggatgagaggatttgctttgtgtgtggtcaagttggtcatctggctaggaagtgtccacagcgcaaggggatgaaggcacctgcagggcagacttctaagtctgctaatgtgaccattggcaacactggagatggaagcgggtatggtaatttacctactgtcgcacggggttccaccgtcctaatggggaatgggtcacatgcttctgttcatggtgttggcacggtagatctgaagtttacttcgggaaagatcgtgcagctgaagaacgtgcagcatgtcccttctatcgacaggaatcttgatacacatagtggttcgaaccaaccatctgaaataattcccagttcaatcacaccaccagaacaaactgaacatacacatgaacttgtctctgaggaggatgttagtgaagctcctcgaaggagtaagagacaaaggacggctaagtcttttggtgatgatttcactgtgtacctcgtggatgacactcctaagtcaatttcagaagcatatgcatctcctgatgcagactactggaaggaggctgtccgtagtgaaatggattccattgtcgctaacgggacttgggaggtgacagagcgaccctatgggtgtaaacctgtggggtgcaagtgggtgttcaagaagaagcttaggcctgacgcctcacatggtcttctcgttcatcaaatggacgttaagacagcttttcttaatggagagctggatgaggagatctatatggatcaacctgatgggtttgtagttgaaggctttgcagtcaatgaggcagataaatgtgtgtactatcgccatggtgggggtgagggagttattttgtgcttgtatgttgacgacatactgatatttgggacaaaccttgagtcccattatgtggagaagatcttgaatcgctttggctacattgatagtaagccttctccaacaccttatgatcctagcttgttgcttcgcaagaacaagagaattgctaggaatcaactggaatactcccaaatcattggctcgttgatgtacctggctagtgcaactaggcctgatatctcctttgctgtgagcaagttgagccgatttacctctaatccgggagatgatcactggcgtgcgcttgagcgagtaatgcgctatctgaaaggtactgtggaattggggcttcactatactgggtatcctgcggtactggagggttatagtgattctaactggatctctgatgtggatgagatcaaagccactagtggatatgtcttcacactgggtggtggtgctgtttcatggaggtcttgcaaacagaccattttgacgaggtcaaccatggaagcagagctaacggcactggatactgctactgttgaggcagaatggctgcgtgatctattaatggatctgcctgttgttgaaaaaccggtgccggctatccttatgaactgtgacaatcaaacggaaattaagaaactccggagttataacgttggattacatccaaacagcgagaaacctggcagatcccttcacgaagggactatcacgaaatactactccatcccgctcgccggcgtgcaccggcgatcgggagagcaggtctccggaacctctgccttcgacgtcctgcaccgggagaaggcggcaataagggtcactctgtggctgacagctatgaaatgcttctgggtgagtactggcaaacctgaaggagttcttactgctgaacagcagaagcaattcgaggaagccactactctctttgtgggatgcattcttagcgttcttggcgatcgtctggtcgaggtgtatatgcatatgaccgacgctaaggagttgtgggatgcactgaatactaaattcggtgctactgatgctagcaatgatctgtatatcatggagcagtttcatgactacaaaatggctgacaaccgttctgtagtcgaacaggctcatgagatacaaaccatggctaaggaactcgaactccttaagtgtgtcttacccgacaaatttgtggccgggtgcattattgcaaaactacctccatcttggagaagtttcggtactgcactcaaacacaagagacaggaatactccgttgaggggttgatagcgtctcttgatgttgaggagaaagctcgggaaaaagatgccgcgtctaagggcgatggtgggcagtccagtgccaatgttgtgcacaaggcccagaacaagagcaaggggaaatacaaagctcagcagaccaccaacttcaagaagcagaagaagaacaacaacaatcctaatcaggatgagaggacttgctttgtgtgtggccaagttggtcatctggctaggaagtgtccacagcgcaaggggatgaaggcacctgcagggcagacttctaagtctgctaatgtgaccattggcaacactggagatggaagcgggtatggtaatttacctactgttttctcagttaatcaatctactaattggtgggttgatactggggccaatgtacatgtttgtgctgacatctcattgttttcttcttatcaggtcgcacggggttccaccgtcctaatggggaatgggtcacatgcttctgttcatggtgttggcatggtagatctgaagtttacttcgggaaagatcgtgcagctgaagaacgtgcagcatgtcccttctatcgacaggaatcttgttagtggctcccgtctgactagagacggatttaagttggtttttgagtctaataaagtagtcgtgtctaaacatggatattttattggtaaaggttatgagtgcggaggcctgttccgcttttccctttctgatttctgcaataagtctgtgaaccatatttgtggcaaagttgaaaatcaacttgacagaaagataaaaaggcttaggtctgatcgtggtggagagtttttctcgaacgagtttgacttattctgtgaggaacatggcatcatacatgagaggacgcctccctattctcccgagtctaatgggattgctgaaaggaagaatcgcacactgactgacttggtgaatgccatgttggacaccgcgggactgcctaaggcatgtgaagctcctcgaaggagtaagagacaaaggacggctaagtcttttggtgatgatttcactgtgtacctcgtggatgacactcctaagtcaatttcagaagcatatgcatctcctgatgcagactactggaaggaggctgtccgtagtgaaatggattccattatcgctaacgggacttgggaggtgacagagcgaccctatgggtgtaaacctgtggggtgcaagtgggtgttcaagaagaagcttaggcctgacggtactattgaaaagtacaaggctcggcttgttgctaagggctatactcagaaagaaggcgaagatttctttgacacttactcacctgttgctagattgaccacaattcgtgtgctactttccctagcagcctcacatggtcttctcgttcatcaaatggacgttaagacagcttttcttaatagagagctggatgaggagatctatatggatcaacctgatgggtttgtagttgaaggtcaagaaggcaaagtgtgcaaattgttgaagtctttgtatggtctgaaacaagctcctaagcaatgtcatgagaaatttgacaaaacattgacatctgcaggctttgcagtcaatgaggcagataaatgtgtgtactatcgccatggtggggatgagggagttattttgtgcttgtatgttgacgacatactgatatttgggacaaaccttgaggtgataaatgaggctaaatcattcttgtctcaaaattttgatatgaaagatttgggagtagctgatgttatcttaaacattaagctaattagaggtgagaatgggattacactcttgcagtcccattatgtggagaagatcttgaatcgctttggctacattgatagtaagccttctccaacaccttatgatcctagcttgttgcttcgcaagaacaagagaattgctaggaatcaactggaatactcccaaatcattggctcgttgatgtacctggctagtgcaactaggcctgatatctcctttgctgtgagcaagttgagccgatttacctctaatccgggagatgatcactggcgtgcgcttgagcgagtaatgcgctatctgaaaggtactgtggaattggggcttcactatactgggtatcctgcggtactggagggttatagtgattctaactggatctctgatgtggatgagatcaaagccactagtggatatgttttcacactgggtggtggtgctgtttcatggaggtcttgcaaacagacaattttgacgaggtcaatcatggaagcagagctaacggcactggatactgctactgttgaggcagaatggctgcgtgatctattaatggatctgcctgttgttgaaaaaccggtgccggctatccttatgaactgtgacaatcaaacgacatgtgaaaagacgattgaagtctgtcaggaaattaagaaactccggagttataacgttggattacatccaaacagcgagaaacctggcagatcccttcacgaagggactatcacgaaatgtgatagacaatgcatcgaaggagatgggtttgagacccatattaaatcattatatgtctataatctcaacaggtcatcgcttgttactcttagaagttgccgcctactagacggcttggaggagttgcctagtgacctctctgagaagattgtggagaaggcctag

SEQ ID NO: 35376 - DNA, 244 bp, Oryza sativa
  Clone ID: PAT_MRT4530_39301C.1
aagatgcataaaaaaatagtgacactactaggaaaagcattatcgcaagcggccgaaaagggtctttgcaggcggggcggccgtccgcctgtaagccaacaactgtgaagatcgccgatcttcgcaggcggggcggccgtctgcctgcgaagataatttcgcaggcggacgttggctagtccggtccgcctgcgaaaataggaatcggccgcctgcaaaaaaaaaaaacttccgcctgtgaaga

SEQ ID NO: 35377 - DNA, 6458 bp, Oryza sativa
  Clone ID: PAT_MRT4530_39302C.1
gcctcgcctgataggcgcgcgtgcacgacgtacgcgtcgaatggtccgcaaaattggctcctcacccttgcgcagatgcagcctccttttgcagtttaaattggctcctcacccttgcgcagatgcagcctccttttgcagttttgttttgctgcaggaaaattcggatttgttttgttttggaaacattccgaaaaatccggtgcgtgaaaacggcgtggagtccggataagttacgcgtgacttattcggttcggttacgcggagtggtttgtttgcctcctcctctgtgctgcgccgtcgctcgtagactactccatcccgctcaccggcgtgcaccggcgatcgggagagcaggtctccggaaccattgccttcgacgtcctgcaccgggagaaggcggcaataagcgttcttggcgatcgtatggtcgaggtgtatatgcatatgaccgacgctaaggagttgtgggatgcactgaatactaaattcggtgctactgatgctagcaatgatctgtatatcatggagcagtttcatgactacaagatggctgacaaccgttctgtagtcgaacaggctcatgagatacaaaccatggctaaggaactcgaactccttaaatgtgtcttacccgacaaatttatggccggtgccaatgttgtgcacaaggcccagaacaagagtaaggggaaatacaaagctcaacagaccaccaacttcaagaagcagaagaagaacaacatcaatcctaatcaggatgagaggacttgctttgtgtgtgggcaacctggtcatctggctaggaagtgtccacaacgcaaggggatgaaggcacctacaaggcagacttctaagtctgctaatgtgaccattggcaatactagagatggaagcaggtatggtaataatactggagatggaagcaagtatggtaatttacctactgtcgcacggggttccaccgtcctaatggggaatgggtcacatgcttctattcatggtgttgacatggtagatctgaagtttacttcgggaaagatcgtgcagctgaagaacatgcagcatgtcccttctatcgacatgaatcttgatacacatagtagttcgagccaaccctctaaagtaattcccagttcaatcacaccaccagaacaaactgaacatacacatgaacatgtcactgaggaggatgtcagtgaagctcctcgaaggagtaagagacaaaggacggctaagtcctttggtgatgatttcaccatgtacctcgtggatgacactcctaagtcaatttcagaagcatatgcatctcctgatgtagactactggaaggaggctgtccatagtgaaatggattccattatcgctaacgggacttgggaggtgacagagcgaccctgtgggtgtaaacctgtggggtgcaagtgggtgttcaagaagaagcttaggcctgacgtcaatgaggcagataaatgtgtgtactatcgccatggtgggggtgagggagttattctgtgcttgtatgttgatgacatactgatatttgggacaaaccttgaggtgataaatgagtctcattatgtggagaagatcttgaatcgctttggctacattgatagtaagccttctccaacaccttatgatcctagcttgttgcttcgcaagaacaaaagaattgctaagaatcaactggaatactcccaaatcattggctcgctgatgtacctggctagtgcaactaggcctgatatctcctttgctatgagcaagttgagccggtttacctctaatccgggagatgatcactggcgtgcgcttgagcgagtaatgcgctatctgaaaggtactatgaaattggggcttcactataatgggtatcctgcggtactggagggttatagtgattctaactggatctctgatgtggatgagatcaaagccactagtggatatgtcttcacactaggtggtggtgctgtttcgtggaggttttgcaaacagaccattttgacgaggtcaaccatggaagcagaactgacggcactggatattgctactgttgaggctgaatggctgcgtgatctattaatggatctgcctattgttgaaaaaccggtgccggctatccttatgaactatgacaatcaaacgggcaggcggtgcgcgtgcacgatgtacgcgtcgaatgactactctatcccgctcgccggcgtgcaccggcgattgggagagcaggtctccggaatctctgccttcgacatcctgcaccaggagaaggcggcaataaggtttttgggaagcgcttcgcgcgactgctccctgttcgtccgcgatggctcaccttcctctccgctcgcgtgcttcgcgccttcgtcgacgctcgcaaccgcgagtagttcctgccgagcaaccggtctttccgccacctcgtttacatgtgtagatctaatgatgcgttaatactagtatacatctgtaatgtcatgatttatttatggaatatattaaatcattatatgcctatattctcaacaatccaaaaaccttattataggcgctgtgattttactatggctggttttgccgatgcactgaggccgaataaatttaccggtgtgcactttaagagatggcagatcagggtcactctgtggctgccagctatgaaatgcttctgggtgagtactagcaagcctatgggcattcttaatgctgatcagcagaaagaattcgatgaggccactactctctttgtgggatgcattcttagcatgcttggcgatcgtctggtcgaggtgtatatgcatatgaccgacgctaaggagttgtgggatgcactgaatactaaattcgatgctactaatgctagcaatgatctgtatatcatggagcagtttcatgactacaagatggctgacaaccgttctgtagtcgaacaggctcatgagatacaaaccatggctaaggaactcgaactccttaagtgtgtcttacccgacaaatttgtggccgggtgcattattgcgaaactacctccatcttggagaggtttcggtactgcactcaaacacaagagacaggaatactccgttgaggggttgatagcgtctcttgatgttgaggagaaagctcagaaaaaagatgccacgtctaagggcgatggtgggcagtccactgccaatgttgtgcacaaggcccagaacaagagcaaggggaaatacaaagctcagcagaccaccaacttcaagaagaagaacaacaacaacaatcctaatcaggatgagaggacttgctttgtcgcacggggtttcaccgtcctaatggggaatgggtcacatgcttctgttcatggtgttggcacggtagatctgaagtttatttcgcgaaggatcgtgcagctgaagaacgtgcagcatgtcccttctatcgacaggaatcttgttagtggctcccgtctgactagagacggatttaagttggtttttgagtctaataaagtagtcgtgtctaaacatggatattttattggtaaaggttatgagtgcggaggcctgttccgcttttccctttctgatttctgcaataagtctgtgaaccatatttgtggcagtgtggatgatgaggctaatgtatggcactcacgtttatgtcatattaattttggcttgatgtctcggctttccagcatgtgtttaattcttaagttttccattgtcaaaggttctaactgccatagttgtgtacaatcaaagcaacctcgcaagcctcacaaggctgctgaggagagaaacttggcacctctagaactcctacactcagatctctgtgaaatgaatggggtgttgacgaagggtgaaaaacgatatttcatgacgttgattgatgatgctactagattttgctatgtgtacttgttgaaaacgaaagacgaggctctagactattttaaaatttataaggcagaagttgaaaatcaacttgacagaaagataaaaagacttaggtctgatcgtggtggggagtttttctcaaacgagtttgacttattctgtgaggaacatggcattatacatgagaggacgcctccctattctcccgagtctaatgggattgctgaaaggaagaaccgcacactgactgacttggtgaatgccatgttggacaccgcggactacctaaggcatgttcctaacagaaataaggacaaaacaccatatgagatatggattgggagaaaaccatcactttcttacttgcgcacatgggggtgcttggcgaaagtcaatgtaccaataacgaagaagagcaaacttggacctaagactgtagactgtatctttctgggatatgctcaccacagcattgcctatagatttttaatagttaaatctgaggtacctgacatgcatgttggtacaattatggagtctcgtgatgcaaccttctttgagagctttttcccaatgaaggatacacatagtagttctagccaaccctctaaaataattcccagttcaatcacaccaccagaacaaactgaacatacacatgaacatgtcactgaggaggatgacagtgaagctcctcgaaggagcaagagacaaaggacgactaagtcttttggtgatgatttcactgtgtacctcgtggatgacactcctaagtcaatttcagaagcatacgcatctcctgatgcagactactggaaggaggctgtccatagtgaaatggattccattatcgctaacgggacttgggaggtgacagagcgaccctatgggtgtaaacctgtggggtgcaagtgggtgttcaagaagaagctcaggcctgacggtactattgaaaagtacaaggctcggcttgttgctaagggctatactcagaaagaaggcgaagatttctttgacacttactcacctgttgctagattgaccacaattcgctttgctgtcaatgaggcagataaatgtgtgtactatcgccatggtgggggtgagggagttattctgtgcttgtatgttgatgacatactgatatttgggacaaaccttgaggtgataaatgaggttaaatcattcttgtttcaaaattttgatatgaaggatttgggagtagctgatgttatcttaaacattaaactaattagaggtgagaatgagattacactcttgcagtcccattatgtggagaagatcttgaatcgctttggctactttgatagtaagccttctccaacaccttatgatcctagcttgttgcttcgcaagaataagagaattgctaggaatcaactggaatactcccaaatcattggctcgctgatgtacctggctagtgcaactaggcctgatatctcctttgctgtgagcaagttgagccggtttacctctaatccgggagatgatcactggcgtgcgcttgagcgagtaatgcgctatctgaaaggtactatggaattggggcttcactattctgggtatcctgtgatactggagggatatagtgattctaactggatctctgatgtggatgagatcaaagccactagtggatatgtcttcacactgggtggtggtgctgtttcgtggaggtcttgcaaacagactattttgacgaggtcaaccatggaagcagaactggcggcactggatactgctactgttgaggcagaatggctgcgtgatctattaatggatttgcctattgttgaaaacccggtgccggctatccttatgaactgtgacaatcaaacggtaattgtcaaagtgaatagttctaagaataatatgaaatcgtctagacatgtgaaaagacgattgaagtctgtcaggaaattgagaaactccgaagttataacgttggattacatccaaacagctagaaacctggcagatcccttcacgaaggtactatcacgaaatgtgatagataatgcattgaaggagatgggtttgagacccatgaaaattcggatttgttttgttgttggaaacattccgaaaaatcctgtgcgtgaaaacggcgtggagtccggataagttatgcgtgacttatctggctcggttacgcagagtggagatcgtgcgggcgccctgatcaagcgacctatctctatataaaccgtgccgccgccttcacgcaacacacgcgaaattaatctagggtttgcctcctcctctgtgttgtgtcgtcgctcgtagactactccatcccgctcgccagcgtgcaccggcgatcgggagagcaggtctccggaacctctgtcttcgacgtcctgcatcgggagaagacggcaataaggtttttgggaagcgtttcgcgcgactgctacctgttcatccgtgacggctcgccttcctctccgctcacgtgctgcgcgcctttgtcgacgctcgcaaccgcgagtagttcctgccgagcaaccggtctttccgccaactcggtacgtgttcgacata

SEQ ID NO: 35378 - DNA, 242 bp, Oryza sativa
  Clone ID: PAT_MRT4530_39303C.1
atataacccgtgagcatgggctggtaataagctgcaatactgcattattaatgtccgccaaagtatatgttcaattatctaaacacaaacataaaaatgccctatttgtctgccctaaacaaaaacataatatttactatgagtaaaatgaaatagttcctgatggagctcttaaacacaactgtacaatgtatcccacgtcgtcattgttgccttttgttatcccactaagtgatccatcg

SEQ ID NO: 35379 - DNA, 8093 bp, Oryza sativa
  Clone ID: PAT_MRT4530_39304C.1
atgtgtggtggagagaaaagggggaacacgcgcgagctcgctcgcctcgcctcgcctcgcctcgcctcgcctggtagggcagggcaggtggcgcgcgtgcacgatgtatgcgtcgaatggtccgcgacggctcgacgcttgcagccgcgagtagttcgtgccgagcaaccggtctttccgccacctcggcactgtgattttactatggctagttttaccgatgcactgaggccggataaattcaccggtgtgcacttcaagagatggcagatcagggtcactctgtggctgacagctatgaaatgcttctgggtgagtactggcaagcctatgggtgttcttaaagctgatcagcagaaagaattcgatgaggccactactctctttgtgggatgcattcttagcgtgcttggcgatcgtctgatcgaggtgtatatgcatatgaccgacgctaaggagttgtgggatgcactgaatactaaattcggtgctactgatgctagcaatgatctgtatatcatggagcagtttcatgactacaagatggttggcaaccgttctgtagtcgaacaggctcatgagatacaagccatggataaggaactcagacttcttaagtgtgtcttacccgacaaatttgtggtcgggtgcattattgcgaaactacctccatcttggagaggtttctatactgcactcaaacacaagagacaggaatactctgttgaggggttgatagcgtctcttgatgttgaggagaaagctcgggaaaaagatgctgcgtctaagggcgatggtggccagtccactgccaatgttgtgcacatggcccagaataagagcaaggggaaatacaaagctcagcagaccaccaacttcaagaagaagaagaacaacaacaatcctaatgaggatgagaggacttgctttgtatgtggtcaacctggccatctggccaggaagtgtccacaacgtaaggggatgaaggcacctgcagggcagacctctaagtctgctaatgtgaccattggcaacactggagatggaagcgggtatggtaatttacctactgttttttcagttaatcagtctactaattggtgggttgatactggggccaatgtcgcacggggttccaccgtcctaatggggaatgggttacatgcttctgttcgtggtgttggcacggtagatctgaagtttacttcgggaaagatcgtgcagctgaagaacgtgcagcatgtcccttctatcgacaggaatcttgttagtggctcccgtctgactagagacggatttaagttggtttttgagtctaataaagtagtcgtgtctaaacatggatattttattggttctaagtgccatagttgtgtgcaatcgaagcaacctcgcaagcctcacaaggctgccgaggagagaaacttagcaccactagaactcctacattcagatctttatgaaatgaatggggtgttgacgaagggtggaaaacgatatttcatgacgttgattgatgatgctactagattatgctatgtgtacttgttaaaaacgaaagacaaggctctagactattttaaaatttataaggcagaagatgaaaatcaacttgacagaaagataaaaaggctttggtctgatcgtggtggagagtttttctcaaacgagtttgacttattctgtgaggaatatggcatcatacatgagaggacgcctccctattctcctgagtctaatgggattgctaaaaggaagaaccacacactgactgacttggtgaatgccatgttggatactgcgggactacctaaggcatggtggggggagacattgttgacctcgaatcatgtgttaaacagagtttctaacagaaataaggacaaaacaccatatgagatatggattaggagaaaaccatcactttcttacttgcgcacatgggggtgcttggcgaaagtcaatataccaataacgaagaagcgcaaacttggacctaagactgtggactgtgtctttctaggatatgttcatcacagcattgcctatagatttttaatagttaaatttgaggtacctgacatacatattggtacaatcatggagtctcgtgatgctaccttctttgagagctttttcccaatgaaggatacacatagtagttctagccaaacctctgaaataattcccaattcaatcacaccactagaacaaactgaacatacacatgaacatgtcactgaggaggatgacagtgaagctcttcgaaggagtaaaagacaaaggacggctaagtcttttggtgatgatttcactgtgtacctcgtggacgacactcctaagtcaatttcagaagcatatgcatctcctgatgcagactactggaaggaagctgtccgtagtgaaatggattccattatcgctaacggaacttgggagatgacagagcgaccctatgggtgtaaacctgtggggtgcaagtgggtgttcaaaaagaagctgaggcctgatggtaccattgaaaagtacaaggctcggcttgttgctaagggctatactcagaaagaaggcgaagatttcttttacacttactcacctgtttccagattgaccacaattcgtgtgctactttccctagcagcctcacatggtcttctcgttcatcaaatggacattaagacagcttttcttaatggagagctggatgaggagatctatatggatcagcctgatgggtttgtagttgaaggcttcgcagtcaatgagacagataaatgtgtatactatcgccatggtgggggtgagggagttattctgtgcttgtatgttgatgatatactgatatttgggacaaaccttgaggtgataaatgaggttaaatcattcttgtctcaaaaatttgatatgaaggatttgggattagctgatgttatcctaaacattaagctaattagaggtgagaatgggattgcacttttgcagtcccattatgtggagaaaattttgaatcgctttggctacattgatagtaatccttctccaacaccttatgattctagcttgttgcttcgcaagaacaagagaattgctaggaatcaactggaatacttccaaattattggctcgctgatgtacctggctagtgcaactaggcctgatatctcctttgctgtgagcaagttgagccggtttacctctaatccgggagatgatcactggcgtgcgcttgagcgagtaatgcgctatctgaaaggtactatagaattggggcttcactattctaggtatcctgcggtactggaaggatatagtgattttaactggatctctgatgtggatgagatcaaagccactagtggatatgccttcacactaggtggtggtgctgtttcgtggaggtcttgcaaacagaccattttgacgaggtcaaccatggaagcagagttgacggcactagacactgctactgttgaggcagaatggctgcgtgatctattaatggatctgcctattgttgaaaaaccggtgccggctatccttatgagctatgacaatcaaacggtaattgtcaaagtgaatagttctaaggataatatgaaatcgtctagacatgtgaaaagacgattgaagtctgtcaggaaattgagaaactccggagttataacatttgattacatccaaacagctagaaagctggcagatcccttcacgaagggactatcacgaaatgtgatagacaatgtatcgaaggagatgggtttgagacccatgaaaattcggatttgttttgttttggaaacactccgaaaaatccgggtttgcctcctactctatactgcgccgtcgctcatagactactccatcccgctcgccggcgtgcaccggcgatcaggagagcaggtctccggaacctctgccttcgatgtcctgcaccgggagaaggcggcaataaggtttttgggaagcgcttcgcgcgactgctccctgttcgttcgcgacggctcgccttcctcttcgctcgcgtgctttgcgccttcgttgacgctcgcaactgcgagtagttcatgccgagcaaccggactttccgccacctcggtgagtactggcaaacctgaaggaattcttactgctgatcagcagaagcaattcgaggaagccactactctctttgtgggatgcattcttagcgttcttggcgatcgtccggtcgaggtgtatatgcaaatgaccgacgctaaggagttgtgggatgcactgaatactaaattcggtgctactgatgttagcaatgatctgtatatcatggagcagtttcatgactacaagatggctggcaaccgttctatagtcgaacaggctcatgagatacaaaccatggctaaggaactcaaactccttaagtgtgtcttacccgataaatttgtggccgggtgcattattgcgaaactacctccatcatggagaagtttcggtactgcactcaaatacaagagacaggaatactccgttgaggggttgatagcgtctcttgatgttgaggagaaagctcgggaaaaagacgccgcgtataagggcgatggtgggcagtccagtgccaatgttgtgcacaaggcccagaacaagagcaaggggaaatacaaagctcaacagaccaccaatttcaagaagcagaagaagaacaacaacaatcctaaccaggataagaggacttgctttgtgtgtgggcaacctggtcatctggctaggaagtgtccacagcgcaaggggatgaaggcacctgcagggcagacttctaagtctgctaatgtgaccattggcaacactggaaatggaagcgggtatggtaatttacctactgttttttcagttaatcagtctactaattggtgggttgatactggggccaatgtacatgtttgtgctgacatctcattgttttcttcttatcaggtcgcacggggttccaccgtcctaatggggaatgggtcacatgcttctgttcatggtgttggcacggtagatctgaagtttacttcgggaaagatcgtgcagctgaagaacgtgcagcatgtcccttctatcgacaggaatcttgtcagtggctcccgtttgactagagacggatttaagttggtttttgagtctaataaagttttcgtgtctaaacatggatattttattggtaaaggttatgagtgcggaggcctgttccgcttttccctttctgatttctgcaataagtctgtgaaccatatttgtggcagtgtggatgatgaggctaatgtttggcactcacgtttatgtcatattatttttggcttgatgtctcgactttccagcatgtgtctaattcctaagttttccattgtcaaaggttctaagtgccatagttgtgtgcaatcgaagcaacctcgcaagcctcacaaggctgccgaggagagaaacttggcaccactagaactcctacattcagatctttgtgaaatgaatggggtgttgatgaagggtggaaaacgatatttcatgacgttgattgatgatgctactagattttgctatgtgtacttgttgaaaacgaaagacgaggctttagactattttaaaatttataaggcagaagttgaaaatcaacttgacagaaagataaaaaggcttaggtctgatcgtggtggagagtttttctcgaacgagtttgacttattttgtgaggaacatggcatcatacatgagaggacgcctccctattctcccgagtctaatgggattgctgaaaggaagaaccgcacactgactgacttggtgaatgccatgttggacaccgcgggactacttaaggcatggtggggggaggcattgttgacctcaaatcatgtgttaaacagagttcttaacagaaataaagacaaaacaccatatgagatatggattgggagaaaaccatcactttcttatttgcgcacatgggggtgcttggcgaaagtcaatgtaccaataacgaagaagcgcaaacttggacctaagactgtggactgtgtctttctgggatatgctcatcatagcattgcctatagatttttactagttaaatccgaggtaccggacatgcatgttggtacaattatgaagtctcgtgatgctaccttctttgagagctttttcccaatgaaggatacacatagtggttcgagtcaaccctctgaaataattcccagttcaatcacaccaccagaacaaattgaacatacacatgaacatgtctctgaggaggatgtcagtgaagctcctcgaaggagtaagagacaaaggacggctaagtcctttggtgatgatttcactgtgtacctcgtggatgacactcctaagtcaatttcagaagcatatgcatctcctgatgcagactactggaaggaggctgtccgtagtgaaatggattccattatcgctaacgggacttgggaggtgacagagcgaccctatgggtgtaaacctgtggggtgcaagtgggtgttcaagaagaagcttaggcctgacggtactattgaaaagtacaaggctcggcttgttgctaagggctatactcagaaagaaggcgaagatttctttgacacttactcacctgttgctagattgaccacaattcgtgtgctactttccctagcagcctcacatggtcttctcgttcatcaaatgaacgttaagacagcttttcttaatggagagctggatgaggagatctatatggatcaacctaatgggtttgtagttgtaggtcaaggcaaagtgtgcaaactgttgaagtctttgtatggtctgaaacaagctcctaagcaatggtataagaaatttaacaaaacattgacatctgcaggctttgcagtcaatgaggcagataaatgtgtgtactatcgccatggtgggggtgagggagttattctgtgcttgtatgttgacgacatactgatattgggacaaaccttgagaggtgagaatgggattacactcttgcagtcccattatgtggagaaaatcttgaatcgctttggctacattgatagtaagccttctccaacaccttatgatcctagcttgttgcttcgcaagaacaaaataattgctaggaatcaactggaatactcccaaatcattggctcgctgatgtacctggctagtgcaactaggcctgatatctcctttgttgtgagcaagttgagccggtttacctctaatccgggagatgatcactggcatgcgcttgagcgagtaatgcactatctgaaaggtactatggaattagggcttcactatactgggtatcgtgcggtactggagggttatagtgattctaactggatctctgatgtggatgagatcaaagctactagtggatatgtcttcacactgggtggtggtgctgtttcgtggaggtcttgcaaacagaccattttgacgaggtcaaccatggaagcaaaactgacggcactggatactgctactgttgaggcagaatggttacgtgatctattaatggatctgcctattgttaaaaaaccggtgccggctatccttatgaactgtgacaatcaaacggtaattgtcaaagtgaatagttctaaggataatatgaaatcgtctagacatgtgaaaagacgattgaagtctgtcaggaaattgagaaactccggagttataacgttggattacatccaaacagctagaaacctggcagatcccttcacgaagggactatcacgaaatgtgatagacaatgcatcgaaggagatgggtttgagacccatcgaagatgctgtcctgcagagcagtcttgaaagaactcacctttgtaagcttgactattggtcgcagtctatggagattttgggtgaatcttctaggaagcttactaaagacctaggaatgcctgcgaaaagtttcgaccgagcagccggtctttccgccacctcggtacgtagctcggctgcgatagcgctgggaccgggagcacgtccgagctatgcttgccgtccggctgcgactactagaggaagaagacgactggatggagatcgatctgtccctcccatgcaagtcaacga

SEQ ID NO: 35380 - DNA, 383 bp, Oryza sativa
  Clone ID: PAT_MRT4530_39305C.1
agctgataccttcaccaaaattattttgcttcgaaagaagcccgttaaggcgttaaccccaagccccacccagaaaaccaagccccccacccagggatacggttacacccagcagcccaacaaaatccacacaagccccgaacaagttcaacaggcagaaaaccatatatgttccgtggaactgcaagctcaattcggatccaaaaaaaccaaaaaaaagcaggctaattataccgggggcccgggggagtaactcggaagtcaggacaccttgaggcactgttgtttgaacattttgctggcttgctgcccgttgcccaagtcctccacgggaaggccttggcccccaaacaaaatgttgataagcctcccgttgccgaacc

SEQ ID NO: 35381 - DNA, 7575 bp, Oryza sativa
  Clone ID: PAT_MRT4530_39306C.1
atggctggttttgccgatgcactgaggccggataaatttaccggtgtgcactttaagagatggcagatctgggtcattctgtggctgacagctatgaaatgcttctgggtgagtactggcaagtctatgggcgttcttaatgctgaccagcagaaaaaattcgatgaggccactactctctttatgggatgcattcttagcgtgcttggcgatcgtcttgtcgaggtgtatatgcatatgaccgacgctaaggaattgtgggatgcactgaatactaaatttggtgctactgatgctagcaatgatctgtatatcatggagcagtttcatgactacaagatggctaacaaccgttctgtagtcgaacaggctcatgagatacaaaccatagctaaggaactcgaactccttaagagaaagcattgggaaaaagatgccgcgtctaagggcgatggtgggcagtccactgccaatgttgtgcacaaggcccagaacaagagcaaggggaaatacaaagctcagcagaccaccaacttcaagaagaataagaacaacaacaatcctaatcaggataagaggacttgctttgtgtgtggtcaacctggccatctggccaggaagtgtccacaacgcaaggggatgaaggcacctgcagggcagacctctaattctgctaatgtgaccattggcaacactagagatggaagcgggtatggtcgcacggggttccaccgtcctaatggggaatgggtcacatgcttctgttcatggtgttggcacggtagatctgaagtttacttcgggaaagatcgtgcagctgaagaacgtgcagcatgtcccttctatcaacaggaatcttgttagtggctcccgtctgactagagacggatttaagttggtttttgagtctaataaagtagtcgtgtctaaacatggatattttattggtaaaggttatgagtgcggaggcctgttccgcttttccctttctgatttctgcaataacatgtgtttaattcctaagttttccattgtcaaaggttctaagtgccatagttgtgtgcaatcgaagcaacctcgcaagcctcacaaggctgccgaggagagaaacttggcaccactagaactcctacattcagatctttgtgaaatgaatggggtgttgacgaaggaagttgaaaatcaacttgacagaaagataaaaaggcttaggtctgatcgtggtggagagtttttctcgaacgagtttgacttattctgtgaggaacatggcatcatacatgagaggacgccgccctattctcccgagtctaatgggattgctgaaaggaagaaccgcacactgagtgacgtggtgaatgccatgttggacaccgcgggactgcctaaggcatggtggggggaggcattgttgacctcaaatcatgtgttaaacagagttcctaacagaaataaggacaaaacaccatatgagatatggattggtagaaaaccatcactttcttatttgcgcacatgggggtgcttggcgaaagtcaatgtaccaataacgaagaagcgcaaacttggacctaagactgtggactgtgtttttctgggatatgctcatcatagcattgcctatagatttttaatagttaaatccgaggtaccggacatgcatgttggtacaattatggagtctcgtgatgctaccttctttgagagctttttcccaatgaaggatacacatagtggttcgaaccaaccctctgaaataattcccagttcaatcacaccaccagaacaaactgaacatacacatgaacttgtctctgaggaggatgtcagtgaagctcctcgaaggagtaagagacaaaggacggctaagtcttttggtgatgatttcactgtgtacctcgtggatgacactcctaagtcaatttcagaagcatatgcatctcctgatgcagactactggaaggaggctgtccgtagtgaaatggattccattatcgctaacgggacttgggaggtgacagagcgaccctatggttgtaaacctgtggggtgcaagtgggtgttcaagaagaagcttaggcctgacgcctcacatggtcttctcgttcatcaaatggacgttaagacagcttttcttaatggagagctggatgaggagatctatatggatcaacctgatgggtttgtagttgaaggctttgcagtcaatgaggcagataaatgtgtgtactatcgccatggtgggggtgagggagttattttgtgcttgtatgttgacgacatactgatatttgggacaaaccttgaggtgataaatgagtcccattatgtggagaagatcttgaatcgctttggctacattgatagtaagccttctccaacaccttatgatcctagcttgttgcttcgcaagaacaagagaattgctaggaatcaactggaatactcccaaatcattggctcgttgatgtacctggctagtgcaactaggcctgatatctcctttgctgtgagcaagttgagccgatttacttctaatccgggagatgatcactggcgtgcgcttgagctagtaatgcgctatctgaaaggtactgtggaattggggcttcactatactgggtatcctgcggtactggagggttatagtgattctaactggatctctgatgtggatgagatcaaagccactagtggatatgttttcacactgggtggtggtgctgtttcatggagcaaagatgttgtcctgcagagcattcttgaaggaactcacctttgtgagcttgactgttggtcgcagtctatgaagattttgggtgaatcttctaggaagcttactaaagacctaggaggcaggcggcgcgcgtgcacgacgtacgcgtcgaatggtccgaaaaattggctcctcacccttgcgcagatgcagcctccttttgcagttttgttttgctgcaaattcggattcgtttttgttttggaaacgttccgaaaaatccggtgcgtgcaaacggcgtggagtccggataagttacgcgcgacttatccggttcggttacgcgcagtagagattgtgcgggcgccctgatcaagcgacctttctctatataaaccgacctgccgtcttcacgcaacacaagcgaaatcaatctagggtttgcctcctactctgtactgcgccgtcgctcgtagactactccatccctctcgccggcgtgcaccggcgatcgggagagcaggtctccggaacctctgccttcgacgtcctgcaccaggagaaggcagcaataaggtttttgggaagcgcttcgcgcgactgctccctgtttgttcacgacggctcgccttcctcttcgctcgcgtgtttcgtgccttcgtagacacctgcgaaaagtttcgaccaagcagccggtctttccgtcacctcggtacgtgttcaatatgttgcgcatatttgatctgttcatgttatactgtgtagtttacatgtatagatctaatgatgcgttcatgctagttttcatctgtaatgttatgatttatttatggaatagattaaatcattatacgtctataatctcaacaatccaaaaaccttattataggcactgtgattttactatggctggttttgccgatgcactgaggccggataaattcaccggtgtgcattttaagagatggcagatcagggtcactctgtggctgacagctatgaaatgcttctgggtgagtactggcaaacctgaaggagttcttactgctgaacagcagaagcaattcgaggaagccactactctctttgtgggatgcattcttagcattcttggcgatcgtctggtcgaggtgtatatgcatatgaccgacgctaaggagttgtgggatgcactgaatactaaattcggtgctactgatgctagcaatgatctgtatatcatggagcagtttcatgactacaaaatggctgacaaccgttctgtagtcgaacaggctcatgagatacaaaccatggctaaggaactcgaactccttaagtgtgtcttacccgacaaatttgtggccgggtgcattattgcaaaactacctccatcttggaggagtttcggtactgcactcaaacacaagagacaggaatactccgttgaggggttgattgcgtctcttgatgttgaggagaaagctcggaaaaaagatgccgcgtctaagggcgatggtgggcagtccagtgccaatgttgtgcacaaggcccagaacaagagcaaggggaaatacaaagctcagcagaccaccaacttcaagaagcagaagaagaacaacaacaatcctaatcaggatgagaggacttgctttgtgtgtggccaagttggtcatctggttaggaagtgtccacagcgcaaggggatgaaggcacctgcagggcagacttctaagtctgctaatgtgaccattggcaacactggagatggaagcgggtatggtaatttacctactgttttttcagttaatcaatctactaattggtgggttgatactggggccaatgtacatgtttgtgctgacatctcattgttttcttcttatcaggtcgcacggggttccaccgtcctaatggggaatgggtcacatgcttctgttcatggtgttggcacggtagatctgaagtttacttcgggaaagatcgtgcagctgaagaacgtgcagcatgtcccttctatcgacaggaatcttgttagtggctcccgtctgactagagacggatttaagttggtttttgagtctaataaagtagtcgtgtctaaacatggatattttattggtaaaggttatgagtgcgaaggcctgttccgcttttccctttctgatttctgcaataagtctgtgaaccatatttgtggcagtgtggatgatgaggctaatgtttggcattcacgtttatgtcatattaattttggcttgatgtctcggctttccagcatgtgtttaattcctaagttttccattgtcaaaggttctaagtgccatagttgtgtgcaatcgaagcaacctcgcaagcctcacaaggctgccgaggagagaaacttggcaccactagaactcctacattcagatctttgtgaaatgaatggggtgttgacgaagggtggaaaacgatatttcatgacattgattgatgatgctactagattttgctatgtgtacttgttgaaaacgaaagacgaggctctagactattttaaaatttataaggcagaagttgaaaatcaacttgacagaaagataaaaaggcttaggtctgatcgtggtggagagtttttctcgaacgagtttgacttattctgtgaggaacatggcatcatacatgagaggacgcctccctattctcccgagtctaatgggattgctgaaaggaagaaccgcacactgactgacttggtgaatgccatgttggacaccgcgggactgcctaaggcatggtggggggaggcattgttgacctcaaatcatgtgttaaacagagttcctaacagaaataaggacaaaacaccatatgagatatggattggtagaaaaccatcactttcttatttgcgcacatgggggtgcttggcgaaagtcaatgtaccaataacgaagaagcgcaaacttggacctaagactgtggactgtgtttttctgggatatgctcatcatagcattgcctatagatttttaatagttaaatccgaggtaccggacatgcatgttggtacaattatggagtctcgtgatgctaccttctttgagagctttttcccaatgaaggatacacatagtggttcgaaccaaccctctgaaataattcccagttcaatcacaccaccagaacaaactgaacatacacatgaacttgtctctgaggaggatgtcagtgaagctcctcgaaggagtaagagacaaaggacggctaagtcttttggtgatgatttcactgtgtacctcgtggatgacactcctaagtcaatttcagaagcatatgcatctcctgatgcagactactggaaggaggctgtccgtagtgaaatggattccattatcgctaacgggacttgggaggtgacagagcgaccctatgggtgtaaacctgtggggtgcaagtgggtgttcaagaagaagcttaggcctgacggtactattgaaaagtacaaggctcggcttgttgctaagggctatactcagaaagaaggcgaagatttctttgacacttactcacctgttgctagattgaccacaattcgtgtgctactttccctagcagcctcacatggtcttctcgttcatcaaatggacgttaagacagcttttcttaatggagagctggatgaggagatctatatagatcaacctgatgggtttgtagttgaaggtcaagaaggcaaagtgtgcaaattgttgaagtctttgtatggtctgaaacaagctcctaagcaatggcatgagaaatttgacaaaacattgatatctgcaggctttgcagtcaatgaggcagataaatgtgtgtactatcgccatggtgggggtgagggagttattttgtgcttgtatgttgacgacatactgatatttgggacaaaccttgaggtgataaatgaggttaaatcattcttgtctcaaaattttgatatgaaagatttgggagtagctgatgttatcttaaacattaagctaattagaggtgagaatgggattacactcttgcagtcccattatgtggagaagatcttgaatcgctttggctacattgatagtaagccttctccaacaccttatgatcctagcttgttgcttcgcaagaacaagagaattgctaggaatcaactggaatactcccaaatcattggctcgttgatgtacctggctagtgcaactaggcctgatatctcctttgctggttatagtgattctaactggatctctgatgtggatgagatcaaagccactagtggatatgttttcacactgggtggtggtgctgtttcatggaagtcttgcaaacagacaattttgacgaggtcaaccatggaagcagagctaacggcactggatactgctactgttgaggcagaatggctgcgtgatctattaatggatctgcctgttgttgaaaaaccggtgccggctatccttatgaactgtgacaatcaaacgacatgtgaaaagacgattgaagtctgtcaggaaattaagaaactccggagttataacgttggattacatccaaacagcgagaaacctggcagatcccttcacgaagggactatcacgaaatgtgatagacaatgcatcgaaggagatgggtttgagacccattggcggcaaaggggaagggtggcggcggcgactggtggtgccaaaggggagggtggcatggttgagggagtagatcaaggaaggatatatcggcagcggccaaggggtgcaatggcgcggcttggtgccagtggcgcttggtggcaacagccgcggggagggggtggcttagtccagatcctacggcctcaaagacggcaacaacggatggcacagggaagccagtag

SEQ ID NO: 35382 - DNA, 7062 bp, Oryza sativa
  Clone ID: PAT_MRT4530_39307C.1
atggctggttttgccgatgcactgaggccggataaattcaccggtgtgcattttaagagatggcagatcagggtcactctgtggctgacagctatgaaatgcttctgggtgagtactggcaaacctgaaggagttcttactgctgaacagcagaagcaattcgaggaagccactactctctttgtgggatgcattcttagcgttcttggcgatcgtctggtcgaggtgtatatgcatatgaccgacgctaaggagttgtgggatgcactgaatactaaattcggtgctactgatgctagcaatgatctgtatatcatggagcagtttcatgactacaaaatggctgacaaccgttctgtagtcgaacaggctcatgagatacaaaccatggctaaggaactcgaactccttaagtgtgtcttacccgacaaatttgtggccgggtgcattattgcaaaactacctccatcttggaggagtttcggtactgcactcaaacacaagagacaggaatactccgttgaggggttgattgcgtctcttgatgttgaggagaaagctcgggaaaaagatgccgcgtctaagggcgatggtgggcagtccagtgccaatgttgtgcacaaggcccagaacaagagcaaggggaaatacaaagctcagcagaccaccaacttcaagaagcagaagaagaacaacaacaatcctaatcaggatgagaggacttgctttgtgtgtggccaagttggtcatctggctaggaagtgtccacaacgcaaggggatgaaggcacctgcagggcagacttctaagtctgctaatgtgaccattggcaacactggagatggaagcgggtatggtaatttacctactgtcgcacggggttccaccgtcctaatggggaatgggtcacatgcttctgttcatggtgttggcacggtagatctgaagtttacttcgggaaagatcgtgcagctgaagaacgtgcagcatgtcccttctatcgacaggaatcttgttagtggctcccgtctgactagagacggatttaagttggtttttgagtctaataaagtagtcgtgtctaaacatggatattttattggtaaaggttatgagtgcggaggcctgttccgcttttccctttctgatttctgcaataacatgtgtttaattcctaagttttccattgtcaaaggttctaagtgccatagttgtgtgcaatcgaagcaacctcgcaagcctcacaaggctgccgaggagagaaacttggcaccactagaactcctacattcagatctttgtgaaatgaatggggtgttgacgaaggaggttgaaaatcaacttgacagaaagataaaaaggcttaggtctgatcgtggtggagagtttttctcgaacgagtttgacttattctgtgaggaacatggcatcatacatgagaggacgcctccctattctcccgagtctaatgggattgctgaaaggaagaaccgcacactgactgacttggtgaatgccatgttggacaccgcgggactgcctaaggcatgtgaagctcctcgaaggagtaagagacaaaggacggctaagtcttttggtgatgatttcactgtgtacctcgtggatgacactcctaagtcaatttcagaagcatatgcatctcctgatgcagactactggaaggaggctgtccgtagtgaaatggattccattatcgctaacgggacttgggaggtgacagagcgaccctatgggtgtaaacctgtggggtgcaagtgggtgttcaagaagaagcttaggcctgacgcctcacatggtcttctcgttcatcaaatggacgttaagacagcttttcttaatggagagctggatgaggagatctatatggatcaacctgatgggtttgtacttgaaggctttgcagtcaatgaggcagataaatgtgtgtactatcgccatggtgggggtgagggagttattttgtgcttgtatgttgacgacatactgatatttgggacaaacattgaggtgataaatgagtctcattatgtggagaagattttgaatcgctttggctacattgatagtaagccttctccaacaccttatgatcctagcttgtcgcttcgcaagaacaagagaattgctaggaatcaactggaatactcccaaatcattggctcgttgatgtacctggctagtgcaactaggcctgatatcttctttgctgtgagcaagttgagccgatttacctctaatccgggagatgatcactggcgtgcgcttgagcgagtaatgcgctatctgaaaggtactgtggaattggggcttcactatactgggtatcctgcggtactggagggttatagtgattctaactggatctctgatgtggatgagatcaaagccactagtggatatgttttcacactgggtggtggtgctgtttcatggagcaaagatgttgtcctgcagagcattcttgaaggaactcacctttgtgagcttgactgttggtcgcagtccatgaagattttgggtgaatcttctaggaagcttactaaagacctaggaggtttgcctcctactctgtactgcgccgtcgctcgtagacccggcgtgcaccagcgatcgggagagcaggtctccggaacctctgcctttgacgtcctgcaccgggagaaggcggcaataagatctaatgatgcgttcatgctagttttcatctgtaatgtcatgatttatttatggaataaattaaatccttatatgcccataatctcaacaatccaaaaaccttattataggcactgtgattttactatggctggttttgccgatgcactgaggccggataaattcaccggtgtgcattttaagagatggcagatcagggtcactctgtggctgacagctatgaaatgcttctgggtgagtactggcaaacctgaaggagttcttactgctgaacagcagaagcaattcgaggaagccactactctctttgtgggatgcattcttagcgttcttggcgatcgtctggtcgtggtgtatatgcatatgaccgacgctaaggagttgtgggatgcactgaatactaaattcggtgctactgatgctagcaatgatctgtatatcatggagcagtttcatgactacaaaatggctgacaaccgttctgtagtcgaacaggctcatgagatacaaaccatggctaaggaactcgaactccttaagtgtgtcttacccgacaaatttgtggccgggtgcattattgcaaaacttcctccatcttggaggagtttcggtactgcactcaaacacaagagacaggaatactccgttgaggggttgattgcgtctcttgatgttgaggagaaagctcgggaaaaagatgccgcgtctaagggcgatggtgggcagtccagtgccaatgttgtgcacaaggcccagaacaagagcaaggggaaatacaaagctcagcagaccaccaacttcaagaagcagaagaagaacaacaacaatcctaatcaggatgagaggacttgctttgtgtgtggccaagttggtcatctggctaggaagtgtccacaacgcaaggggatgaaggcacctgcagggcagacttctaagtctgctaatgtgaccattggcaacactggagatggaagcgggtatggtaatttacctactgttttttcagttaatcaatctactaattggtgggttgatactggggccaatgtcgcacggggttccaccgtcctaatggggaatgggtcacatgcttctgttcatggtgttggcacggtagatctgaagtttacttcgggaaagatcgtgcagctgaagaacgtgcagcatgtcccttctatcgacaggaatcttgttagtggctcccgtctgactagagacggatttaagttggtttttgagtctaataaagtagtcgtgtctaaacatggatattttattggtaaaggttatgagtgcggaggcctgttccgcttttccctttctgatttctgcaataagtctgtgaaccatatttgtggcagtgtggatgatgaggctaatgtttggcattcacgtttatgtcatattaattttggcttgatgtctcggctttccagcatgtgtttaattcctaagttttccattgtcaaaggttctaagtgccatagttgtgtgcaatcgaagcaacctcgcaagcctcacaaggctgccgaggagagaaacttggcaccactagaactcctacattcagatctttgtgaaatgaatggggtgttgacgaagggtggaaaacgatatttcatgacattgattgatgatgctactagattttgctatgtgtacttgttgaaaacgaaagacgaggctctagactattttaaaatttataaggcagaagttgaaaatcaacttgacagaaagataaaaaggcttaggtctgatcgtggtggagagtttttctcgaacgagtttgacttattctgtgaggaacatggcatcatacatgagaggacgcctccctattctcccgagtctaatgggattgctgaaaggaagaaccgcacactgactgacttggtgaatgccatgttggacaccgcgggactgcctaaggcatggtggggggaggcattgttgacctcaaatcatgtgttaaacagagttcctaacagaaataaggacaaaacaccatatgagatatggattggtagaaaaccatcactttcttatttgcgcacatgggggtgcttggcgaaagtcaatgtaccaataacgaagaagcgcaaacttggacctaagactgtggactgtgtttttctgggatatgctcatcatagcattgcctatagatttttaatagttaaatccgaggtaccggacatgcatgttggtacaattatggagtctcgtgatgctaccttctttgagagcttttttccaatgaaggatacacatagtggttcgaaccaaccctctgaaataattcccagttcaatcacaccaccagaacaaactgaacatacacatgaacttgtctctgaggaggatgtcagtgaagctcctcgaaggaagcgaccctatgggtgtaaacctgtggggtgcaagtgggtgttcaagaagaagcttaggcctgacggtactattgaaaagtacaaggctcggcttgttgctaagggctatactcagaaagaaggcgaagatttctttgacacttactcacctgttgctagattgaccacaattcgtgtgctactttccctagcagcctcacatggtcttctcgttcatcaaatggacgttaagacagcttttcttaatggagagctggatgaggagatctatatggatcaacctgatgggtttgtagttgaaggtcaagaaggcaaagtgtgcaaattgttgaagtctttgtatggtctgaaacaagctcctaagcaatggcatgagaaatttgacaaaacattgacatctgcaggctttgcagtcaatgaggcagataaatgtgtgtactatcgccatggtgggggtgagggagttattttgtgcttgtatgttgacgacatactgatatttgggacaaaccttgaggtgataaatgtggttaaatcattcttgtctcaaaattttgatatgaaagatttgggagtagctgatgttatcttaaacattaagctaattagaggtgagaatgggattactctcttgcagtcccattatgtggagaagatcttgaatcgctttggctacattgatagtaagccttctccaacaccttatgatcctagcttgttgcttcgcaagaacaagagaattgctaggaatcaactggaatactcccaaatcattggctcgttgatgtacctggctagtgcaactaggcctgatatctcctttgctgtgagcaagttgagccgatttacttctaatccgggagatgatcactggcgtgcgcttgagcgagtaatgcgctatctgaaaggtactatggaattgggacttcactatactgggtatcctgcggtactggagggttatagtgattctaactggatctctgatgtggatgagatcaaagccactagtggatatgttttcacactgggtggtggtgctgtttcatggaggtcttgcaaacagacaattttgacgaggtcaaccatggaagcagaactaacggcactggatactgctactgttgaggcagaatggctgcgtgatctattaatggatctgcctgttgttgaaaaaccggtgccggctatccttatgaactgtgacaatcaaacgacatgtgaaaagacgattgaagtctgtcaggaaattaagaaactccggagttataacgttggattacatccaaacagcgagaaacctggcagatcccttcacgaagggactatcacgaaatgtgatagacaatgcatcgaaggagatgggtttgagacccatagcattcttgaaggaactcacctttgtgagcttgactgttggtcgcagtctatgaagattttgggagaagaaaggttttttgcttgcacaggtgtatttatagacttcaatggatccacatcaagagttgtgacttcagcaagtttggttagaatatctgctgatgaaaacaagattgctgataacctgaagattaaagtgtaccttccaaataaacgaatcgccgtaggcgaattgcagcattgcaatttgagctacaatattgctgtggtcagtgtcaagggtttctgttgtcttcggacagcagaactcgacaaacagatgcaaatcgaacctcatagggaggtagtagctataggacgtatctttgaatcaggcaaattaatggctacaagtgggatattgtctgacgaggaaagcaagcttgactgcagagagcttatgatctccacttgtaaaatcactaaggccggtattggaggaccactgattgattttgatgggaatttcgttggcataaacttctatggaacaaaagaaacacattatctaccacgattaatgatacagagactattgaaggattttgacgggtaa

SEQ ID NO: 35383 - DNA, 6848 bp, Oryza sativa
  Clone ID: PAT_MRT4530_39308C.1
caactaaataaacaggtgaaattacatgttaaaactggtcaaaatatctcacttgcttactgcaatttcctgccttgcgaaattcggatttgttttgttctggaaacattccgaaaaatccggtgcgtgaaaacggcgtggagtccggataagtttacgcgcgacttacccggtccggtgtggagtccggataagtttacgcgcgacttacccggtccggttacgcggagtggagatcatgcggacgccctgatcaagcgacctatctctataaaaaccaagccgccgccttcacgcaacacaagcgaaatcaatttagggtttgcctcctactctgtattacgccgtcgctcgtagactactccatcctgcttgccggcgtgcaccggcgatcgggagagcaggtctccggaacctctaccttcgacgtcctgcaccgggagaaggtggcaataaggtttttgggaagcgcttcgcgcgactgctccctgttcatccacaacagctcgcctttctctccgctcgcgtgctgcgcgccttcgtcgacgcccgcaaccgcgagtagttcctgccgagcaaccagtctttccgctacctcgatctaatgatgcgttcatgctagttttcatctgtaatgtcatgatttatttatggaataaattaaatcattatatgcccataatctcaacaatccaaaaaccttattataggcactgtgattttactatggctggttttgccgatgcactgaggccggataaattcaccggtgtgcattttaagagatggcagatcagggtcactctgtggctgacagctatgaaatgcttctgggtgagtactggcaaacctgaaggagttcttactgctgaacagcagaagcaattcgaggaagccactactctctttgtgggatgcattcttagcgttcttggcgatcgtctggtcgaggtgtatatgcatatgaccgacgctaaggagttgtgggatgcactgaatactaaattcggtgctactgatgctagcaatgatctgtatatcatggagcagtttcatgactacaaaatggctgacaaccgttctgtagtcgaacaggctcatgagatacaaaccatggctaaggaactcgaactccttaagtgtgtcttacccgacaaatttgtggccgggtgcattattgcaaaactacctccatcttggaggagtttcggtactgcactcaaacacaagagacaggaatactccgttgaggggttgattgcgtctcttgatgttgaggagaaagctcgggaaaaagatgccgcgtctaagggcgatggtgggcagtccagtgccaatgttgtgcacaaggcccagaacaagagcaaggggaaatacaaagctcagcagaccaccaacttcaagaagcagaagaagaacaacaacaatcctaatcaggatgagaggacttgctttgtgtgtggccaagttggtcatctggctaggaagtgtccacaacgcaaggggatgaaggcacctgcagggcagacttctaagtctgctaatgtgaccattggcaacactggagatggaagcgggtatggtaatttacctactgttttttcagttaatcaatctactaattggtgggttgatactggggccaatgtacatgtttgtgctgacatctcattgttttcttcttatcaggtcgcacggggttccaccgtcctaatggggaatgggtcacatgcttctgttcatggtgttggcacggtagatctgaagtttacttcgggaaagatcgtgcagctgaagaacgtgcagcatgtcccttctatcgacaggaatcttgttagtggctcccgtctgactagagacggatttaagttggtttttgagtctaataaagtagtcgtgtctaaacatggatattttattggtaaaggttatgagtgcggaggcctgttccgcttttccctttctgatttctgcaataagtctgtgaaccatatttgtggcagtgtggatgatgaggctaatgtttggcattcacgtttatgtcatattaattttggcttgatgtctcggctttccagcatgtgtttaattcctaagttttccattgtcaaaggttctaagtgccatagttgtgtgcaatcgaagcaacctcgcaagcctcacaaggctgccgaggagagaaacttggcaccactagaactcctacattcagatctttgtgaaatgaatggggtgttgacgaagggtggaaaacgatatttcatgacattgattgatgatgctactagattttgctatgtgtacttgttgaaaacgaaagacgaggctctagactattttaaaatttataaggcagaagttgaaaatcaacttgacagaaagataaaaaggcttaggtctgatcgtggtggagagtttttctcgaacgagtttgacttattctgtgaggaacatggcatcatacatgagaggacgcctccctattctcccgagtctaatgggattgctgaaaggaagaaccgcacactgactgacttggtgaatgccatgttggacaccgcgggactgcctaaggcatggtggggggaggcattgttgacctcaaatcatgtgttaaacagagttcctaacagaaataaggacaaaacaccatatgagatatggattggtagaaaaccatcactttcttatttgcgcacatgggggtgcttggcgaaagtcaatgtaccaataacgaagaagcgcaaacttggacctaagactgtggactgtgtttttctgggatatgctcatcatagcattgcctatagatttttaatagttaaatccgaggtaccggacatgcatgttggtacaattatggagtctcgtgatgctaccttctttgagagctttttcccaatgaaggatacacatagtggttcgaaccaaccctctgaaataattcccagttcaatcacaccaccagaacaaactgaacatacacatgaacttgtctctgaggaggatgtcagtgaagctcctcgaaggagtaagagacaaaggacggctaagtcttttggtgatgatttcactgtgtacctcgtggatgacactcctaagtcaatttcagaagcatatgcatctcctgatgcagactactggaaggaggctgtccgtagtgaaatggattccattatcgctaacgggacttgggaggtgacagagcgaccctatgggtgtaaacctgtggggtgcaagtgggtgttcaagaagaagcttaggcctgacggtactattgaaaagtacaaggctcggcttgttgctaagggctatactcagaaagaaggcgaagatttctttgacacttactcacctgttgctagattgaccacaattcgtgtgctactttccctagcagcctcacatggtcttctcgttcatcaaatggacgttaagacagcttttcttaatggagagctggatgaggagatctatatggatcaacctgatgggtttgtagttgaaggtcaagaaggcaaagtgtgcaaattgttgaagtctttgtatggtctgaaacaagctcctaagcaatggcatgagaaatttgacaaaacattgacatctgcaggctttgcagtcaatgaggcagataaatgtgtgtactatcgccatggtgggggtgagggagttattttgtgcttgtatgttgacgacatactgatatttgggacaaaccttgaggtgataaatgaggttaaatcattcttgtctcaaaattttgatatgaaagatttgggagtagctgatgttatcttaaacattaagctaattagaggtgagaatgggattacactcttgcagtcccattatgtggagaagatcttgaatcgctttggctacattgatagtaagccttctccaacaccttatgatcctagcttgttgcttcgcaagaacaagagaattgctaggaatcaactggaatactcccaaatcattggctcgttgatgtacctggctagtgcaactaggcctgatatctcctttgctgtgagcaagttgagccgatttacttctaatccgggagatgatcactggcgtgcgcttgagcgagtaatgcgctatctgaaaggtactgtggaattggggcttcactatactgggtatcctgcggtactggagggttatagtgattctaactggatctctgatgtggatgagatcaaagccactagtggatatgttttcacactgggtggtggtgctgtttcatggaggtcttgcaaacagacaattttgacgaggtcaaccatggaagcagagctaacggcactggatactgctactgttgaggcagaatggctgcgtgatctattaatggatctgcctgttgttgaaaaaccggtgccggctatccttatgaactgtgacaatcaaacggtaattgtcaaagtgaatagttctaaggataatatgaaatcgtctagacatgtgaaaagacgattgaagtctgtcaggaaattaagaaactccggagttataacgttggattacatccaaacagcgagaaacctggcagatcccttcacgaagggactatcacgaaatgtgatagacaatgcatcgaaggagatgggtttgagacccatatctaatgatgcgttcatgctagttttcatctgtaatgtcatgacttatttatggaataaattaaatcattatatgcccataatctcaacagttctttcacatgacaaaacttgtggttatcaaagctctggacatctacagaagaacaaggaatctggcgatactgaaacagatccattgatgcctatccctgctgatatcgatttgccaatcttggaaaatatgccgaaaactaagaggggtggtgatgatctcgctagaagcttgcataagaacagaaaaacttgcaatggtggaagaactgactcattggcctcaggttgcttgcatggggaccctaatgaggatgtctggactgagctcaatgatgtggttaaatctaatttgtctaaaagtgtcgcgtcgcttagtttgcgcaatggtgtagctgtagaccgccaggggcgtcttacaaagttcctcacttctgcaagtttggtagagcttttggttagagctctcaatgatacaaacaaaaaccatggtgacttagagctcgaagtgtaccatgaaggcaatgaagtatgccagggttatttgactgattttgatttggatcacaatctggccatcgtcgaaatctggactgactttgatgttcatgttggacttctccaacatgcggtggaatttctgccccattgtaaggtaatagctatagggcgtgaaatcactggcaaactgatggccaggagggtgcagttaatggatgatttaagtgtatctgaagatagtgaagatcttgactgtaaaatcaaagaggcttgggaaggtgcaccacttttttcttttgatgggaactttgttggcatgaacctttttttggctatgggaagagcctttttcctgccatggggcactattcagaagcattgggcatccctgcaaaacaagacgggacttccagagtcaaacagtttgaaggtttataggtttggaacaagttccacagctgagaaatctaacagccatccagaagtaaacaacgatattctcgacccggagcagattcatatagactctatgggctatccaaagtttccaacacacatgtttgctgctttctgcaccactaacaactacgctataatgtatctatcaccagatgggatgattttggttaatactttcgaagagactttcggcgatctacgtggtgaaggtgtatggagtaaactcagtaaaaaatcttgttctaacatagaccgcagtgttgtcgcactagcttcattcagtggagagagaaggttttttgcatgcacaggcttttttgttgaatggaatggttctacagttattttgacatcagcaagcttggttagaagttctggcgatgagaacaagattgttgacaacttgaggattgaagtgttgcttccaaacaaacaacgcgtagaagggatgttacagcattgtaatcttcattacaatgttgctctagtcagtgtgggttaccgtgctcttcgcccagcacatggtcagcttgattggtggggcaagagtagtaaggtagtggctgtagggcgttgcttcaagtcaggtgcattgatggctgcaagtggaacggtaaccccctggacaggcacactcgattgcgacttcctcgaacgttcgtcatgtaaaatcacaaaggctgggattggaggccctgttgttactcttgatggggattgtattggtatgaacttctatgatacgagaataggaacccctttcctgtcgtgggaggtgattgttgatattgtagcatcctttgaggaaaaaaggtggccagtgcctatgccatattgatgccacccggactgtgtgtaggatgagtctgaagatgatgaagagttggggttttcatccacatttggctgcaagctgaagtacaattacataaatggagagaaaagcgtgttcttttagttgctgttagatgtagaagaaacctaacctgaacttgttgtcaatctcactatatcctaaagcctgaacttttatataggaaaaacaagtgaagccagaacttgttgtcaatctcactatatcctaaagcctgaacttttatgtaggaaaaaaaaaagttaagccagaacttgttgtcaatctcactatttacctgaacaacctttgtttgtaggcaacaatcagaaaaattccaagcaaaaagtatctctttgacaaggttcccc

SEQ ID NO: 35384 - DNA, 376 bp, Oryza sativa
  Clone ID: PAT_MRT4530_39309C.1
cacgaggggcaattgttattcgcttttcacacatggccagtttatgtagaaccgtacgttgagagagtaactgctagctatatactacagaaaaatgcagctatatatatatatatatagcgaagtagtggcagaatagttccttcactactttgttatgatttatagcaggcaggttcaatgtttccacggaggagatgtatctgggttgggtgtagctatatatatatatatatagcgaagtagtggcagaatagttccttcactactttgttatgatttatagcaggcaggttcaatgtttccacggaggagatgtatctgggttaaatgtaccgtaatgtgggatggaataaaatattttctgttttttatc

SEQ ID NO: 35385 - DNA, 596 bp, Oryza sativa
  Clone ID: PAT_MRT4530_3930C.1
ctaccgttttagtctcctcccgggctctcccgtggtccctagccacctccccgccgtcgtcccctccctcccgtgccgccggccgcctccagccgcctctccctcctcgccggagcgccgtccggtcgcgccgtcgcctcctctagcatcgcagccgcctcctcttcgccggcctaccctctgtctcccgcggagacctccggaagtgcctccccgccggcaaccgtggtgttgccgccacgattccgcctccggtcgcctctgccgcgtccccggtgcgccggccgacgtcgccaccacctctcccggcaccggagtgccgtcctctttcccggcaaggccacggcgtcgcccgaatttcgccggaacgccgtcgcccgcgtcggcctctccttcctcctcgtcgacgtctcctccggcagcccccttccgccgggcccgtgcatcagccggcgctgccgtccctccctcggcatggtggcgtagccctccacctcgtccacccctcggtttcgcccggaagccgccgcacatcgccgcgaacctctccctccacgccgtgcaccggtcggccacacctccaccatcttcggcat

SEQ ID NO: 35386 - DNA, 471 bp, Oryza sativa
  Clone ID: PAT_MRT4530_39310C.1
atggagttccggtaccgcgacggcgacgaccgcagccggtcctcccctcccccgccgccgccgcccacggcgagctctggatccgcccgtgtgctcccggccaacgaagacgatgggcatcgtggcgcagacggcgggggcacgggagactacaacgggggtgattcggccgtgtcgctggggcagtcgtcttcaccgtcggcggctggtcgcgacgagctgcggcaggcgaagaagcagaagataatggagcggatcctgcgggaggaggcggaggaatgggagctcgagtcggaggtccgccgggagatcatggagcacatcttcccgttgctgaggagatctgggaatgcacggccgccgacgccggcggcggcggcggcgctcctgcagattctagcttaccttctcctactgctccgactagccgcttggactaatagcgtaccactaaatgttccgttaaattaa

SEQ ID NO: 35387 - DNA, 5615 bp, Oryza sativa
  Clone ID: PAT_MRT4530_39311C.1
cttttgcagttttgttttgctgcgggaaattcggatttgttttgttttgcaaacattccgaaaaatccggtgcgtgaaaatggcgtggagtccggataagttacgcgcgacttatccggttcggttacgcggagtggagatcgtgcgggcgccctgatcaagcgacctatctctatataaaccgagccgccgccttcacacaacacacgcgaaatcaatctagggtttgcctcctactctgtactgcgccgtggctcgtagactactccatcccgctcgccggcgtgcaccggcgatcgggagagcaggtctccggaacctctgccttcgacgtcctgcaccgggagaaggcggcaataaggtttttgggaagcgcttcgcgcgactgctccctgttcgtccgcgacggctcgccttcctctccgctcgcgtgcttcgcgccttcgtcgacgctcgcaaccgcgagtagttcctgccgagcaaccggtctttccgccacctcgaagcaattcgaggaagccactactctctttgtgagatgcattcttagcgttcttggcgatcgtctggtcgaggtgtatatgcatatgatcgacgttaaggagttgtgggatgcactaaatactaaatttggtgctactgatgctagcaatgatctgtatatcatagagcagtttcatgactacaagatggctgacaaccgttctgtagtcgaacaggctcatgagatacaaaccatggctaagaaactcgaactccttaagtgtgtcttacctgacaaatttgtggccgggtgcattattgcgaaactacctccatcgtggagaagtttcggtacggcactcaaacacaagagacatgaatactccgttgaggggttgatagcgtctcttgatgttgaggagaaagctcgggaaaaagacgccgcgtctaagggcgatggtgggcagtccagtgccaatgttgtgcacaaggcccagaacaagagcaaggagaaatacaaaactcaacagaccaccaacttcaagaagcagaagaagaacaacaacaatcctaaccaggatgagaggacttgctttgtgtgtgggcaacctggttatctggctaggaagtttccacggcgcaaggggatgaaggcacctgcagggcagacttctaagtctgctaatgtgaccattggcaacactggagatggaagcgggtatggtaatttacctactgtcgcacggggttccaccgtcctaatggggaatgggtcacatgcttctgctcatggtgttggcacggtagatctgaagtttacttcgggaaagatcgtgcagctgaagaacgtgcagcatgtcccttctatcgacaggaatcttattagtggctcccgtctgactagagacggatttaagttggtttttgagtctaataaattagtcgtgtctaaacatggatattttattggtaaaggttatgagtgcggaggcatgttccgcttttccctttctgatttctgcaataagtctgtgaaccatatttgtggcagtgtggatgatgaggctaatgattggcactcacactactggaaagaggctgtccgtagtgaaatggattccattatcgctaacgggacttgggaggtgacagagcgaccctatgggtgtaaacctgtggggtgcaagtgggtgttcaagaagaagcttaggcctgacgcctcatatggtcttctcgttcatcaaatgtacgttaagacaacttttcttaatggagagctggatgaggagatctatatggatcaacctgatgggtttgtagttgaaggctttgcagtcaatgaggcaaataaatgtgtgtactatcgccatggtgggggtgagggagttattctgtacttggatgttgatgacatactgatatttgggacaaaccttgaggtgataaatgagtcccattatgtggagaagatcttgaatcgctttggctacattgataactactccatcccgctcgccggcgtgcaccggcgatcgggagagcaggtctccggaacctctgccttcgacgtcctgcaccgggagaaggcggcaataagggtcactctgtggctgacagctatgaaatgcttctgggtgagtactggcaaacctgaaggagttcttactgctgaacagcagaagcaattcgaggaagccactactctctttgtgggatgcattcttagcgttcttggcgatcgtctggtcgaggtgtatatgcatatgaccgacgctaaggagttgtgggatgcactgaatactaaattcggtactactgatgctagtaatgatttgtatatcatggagcagtttcatgactacaagatggctgacaaccgttctgtagtcgaacaggctcatgagatacaaaccatggctaaggaactcgaactccttaagtgtgtcttacccgacaaatttgtggctgggtgcattattgcaaaactacctccatcttggagaagttttggtactgcactcaaacacaagagacaggaatactccgttgaggggttgattgcgtctcttgatgttgaggagaaagctcgggaaaaagatgccgcgtctaagggcgatggtgggcagtccagtgccaatgttgtgcacaaggcccagaacaagagcaaggggaaatacaaagctcagcagaccaccaacttcaagaagcagaagaagaacaacaacaatcctaatcaggatgagaggacttgctttgtgtgtggccaagttggtcatctggctaggaagtgtccacagcgcaaggggatgaaggcacctgcagggcagacttctaagtctgctaatgtgaccattggcaacactggagatggaagcgggtatggtaatttacctactgtcgcacggggttccaccgtcctaatggggaatgggtcacatgcttctgttcatggtgttggcacggtagatctgaagtttacttcggaaaagatcgtgcagctgaagaacatgcagcatgtcccttctatcgacaggaatcttgttagtggctcccgtctgactagagacggatttaagttggtttttgagtctaataaagtagtcgtgtctaaacatggatattttattggtaaaggttatgagtgcggaggcctgttccgcttttccctttctgatttctgcaataagtctgtgaaccatatttgtggcagtgtggatgatgaggctaatgtttggcattcacaagttgaaaatcaacttgacagaaagataaaaaggcttaggtctgatcgtggtggagagtttttctcgaacgagtttgacttattctgtgaggaacatggcatcatacatgagaggacgcctccctattctcccaagtctaatgggattgctgaaaggaagaaccgcacactgactgacttggtgaatgccatgttggacaccgcgggactgcctaaggcatgtgaagctcctcgaaggagtaagagacaaaggacggctaagtcttttggtgatgatttcactgtgtacctcgtggatgacactcctaagtcaatttcagaagcatatgcatctcctgatgcagactactggaaggaggctgtccgtagtgaaatggattccattatcgctaacgggacttgggaggtgacagagcgaccctatgggtgtaaacctgtggggtgcaagtgggtgttcaagaagaagcttaggcctgacgcctcacatggtcttctcgttcatcaaatggacgttaagacagcttttcttaatggagagctggatgaggagatctatatgtatcaacctgatgggtttgtagttgaaggctttgcagtcaatgaggcagataaatgtgtgtactatcgccatggtgggggtgagggagttattttgtgcttgtatgttgacgacatactgatatttgggacaaaccttgaggtgataaatgagtcccattatgtggagaagatcttgaatcgttttggctacattgataataagccttctccaacaccttatgatcctagcttgttgcttcgcaagaacaagagaattgctaggaatcaactggaatactcccaaatcattggcttgttgatgtacctggctagtgcaactaggcctgatatctcctttgctgtgagcaagttaagccgatttacctctaatccgggagatgatcattggcgtgcgcttgagcgagtaatgcgctatctgaaaggtactgtggaattggggcttcactatactgggtatcctgcggtactggagggttatagtgattctaactggatctctgatgtggatgagatcaaagccactagtggatatgttttcacactgggtggtggtgctgtttcatggagctcccagcgacgacagcgcttggtcctggcgagccgtcgccatcgcgcctgtacctgcttcctgccgctccggctcccggcgccgacacgttcctcccgcctcgccgccatcaacaagccgacgccgacgccggccttcccgcgcctccccgccgtcatggcaccggtcctcgagcgccctcatggcgtcgccgtcctcaccgcgttcctcccgcctcgccgccaccgccaagccgacgtcggatttgtacttgggaggagctcgccggcctccccgcgcctctgccatgcttccccactgcggcggcggcggccgccaccgccgccgctgtcgcggcgccgcccccctcctctcccgtctcgcgtcggctaccttgcagataagcggatctaccatgggggctatagggtctcgagcctccacttccggtattcccctcctactagttcttcttggatttgccaggcggtgacgtggtcgccccgtcgctggatggcggagcaaactatgaacaaagcacttttaggcggcgactcgttgaggacagcctcgcggatgagcaagggcaggatggacaacggcggcgacgacagcgcgtcaaccggcaaactctctcctcgccgcctccatccccacctccctcccgttgccgcggtctctgtcttccgctcctccctcgccctggatgggagtttcgtcgaagcggcgccctcttcctccacctcgccaccaccgttcccctccagctcccccttcgctctgcccctatggtcctgccaccgacgcccctccccgctcgcgtgtgccgacctcgtcgaccggggtgacttcaacagggcacaccacgtcgcggcgtgccgtgctcgccgccgccgacccttggggagaggatacaaggaaggccatagcggcgacgaaggcatgacgaagacaaaagaggccatggcggcgcccgaccgcgattctgacatgtgcgacacatgcgggtcccacgccgagtcagctgttacgtcggacaataccggggtcaaaaccaccgaatggcctaaagtgaacggcgctgcagcggcggcgcacttcgctagagggcggagcgaagaggcacacggacgggcattcggcgagtgggcataccgctgcagggttcaggagctcaaggctcctcttggatcgttggtggtggctttgaaatcgagcaacgagagcacgtccgtgctgttcccagcgatcgtcgtgcaacgaatgcttccagttccatag

SEQ ID NO: 35388 - DNA, 8544 bp, Oryza sativa
  Clone ID: PAT_MRT4530_39312C.1
atctaatctcctctctctcaactaagcctgcggcacggggcaacctcgccggagaagacgacggaccgaggctacgagctacgtagccgagggccggctacccgagggcctgacgcccttgacaacctggtatcacgttccagacgatcctcgccgcgccgcgccgtctccccaccacccgccacatcctcgccaccaccagccgccgcgccaccatcctcggactcgtcctccggcgcgtcctgcccacccggcatgggtgaccccaatgacctcaagacctccgtggaggctctcaccaccgccatgaaggagatgcaggcctcgatcgccgccaacgccaaggccattgccgccctctcctccggccgcacctcatcctcgggcgccacgacagactccggcgaaccccgcaccgtccggccgccgcgatttcagaaaatggatttcccgcgctatgatgggaagtccgatccgctcaccttcctcaattggtgtgagtcgtacttccaccaacaacggatcatggacgaagagaaggtttggatggcgtcctacaaccttgaagatggtgcacagctatggtacatgcaagtccaggcggatgagggtaaaccgtcgtggcgtcgcttccgggaactcctcgtcctacggtacgggccgccactccgttcggctcccctcttcgagttagccgactgccgccgcactaccaccgtggaggactaccaggaccacttccaagcgctcctgccccgcgccggccgcctgacgaaggcacaacgggttcagctcttcaccggcggtctgcttcctccgctcagtctcaaggtccagatgcagaatccgcagtccctcgtcaccgccatgagtttggctcggcagttcgagctgatggagcagtgcactgccaccctggccaaagcccctggccacgggatactgccgacgctgggtccgcgccaggccccgccccagccgccggcgcctagggccgcatcgccccctgtcctcatcgacggtcgcccggtgaagcggctctctcaggcggagcaggacgagcgtcgccgcctcgggctatgctttaactactactccatcccgctcgccggcgtgcaccagcgatcaggagagcaggtctccggaacctctgcctttgacgtcctgcaccgggagaaggcggcaataaggcactgtgattttactatggctggttttgctgatgcactgaggccggataaattcaccggtgtgcattttaagagatggcagatcagggtcactctgtggctgacagctatgaaatgcttctgggtgagtactggcaaacctgaaggaattcttactgctgaacagcagaagcaattcgaggaagccactactctctttgtgggatgcattcttagcgttcttggcgatcgtctggtcgaggtgtatatgcatatgaccgacgctaaggagttgtgggatgcactgaatactaaattcggtgctactgatgctagcaatgatctgtatatcatggagcagtttcatgactacaaaatggctgacaaccgttctgtagtcgaacaggctcaagagatacaaaccatggctaaggaactcgaactccttaagtgtgtcttacccgacaaatttgtggccgggtgcattattgcaaaactacctccatcttggaggagtttcggtactgcactcaaacacaagagacaggaatactccgttgaggggttgattgcgtctcttgatgttgaggagaaagctcgggaaaaagatgccgcgtctaagggcgatggtgggcagtccagtgccaatgttgtgcacaaggcccagaacaagagcaaggggaaatacaaagctcagcagaccaccaacttcaagaagcagaagaagaacaacaacaatcctaatcaggatgagaggacttgctttgtgtgtggccaagttggtcatctggctaggaagtgtccacaacgcaaggggatgaaggcacctgcagggcagacttctaagtctgctaatgtgaccattggcaacactggagatggaagcgggtatggtaatttacctactgtcgcacggggttccaccgtcctaatggggaatgggtcacatgcttctgttcatggtgttggcacggtagatctgaagtttacttcgggaaagatcgtgcagctgaagaacgtgcagcatgtcccttctatcgacaggaatcttgttagtggctcccgtctgactagagacggatttaagttggtttttgagtctaataaagtagtcgtgtctaaacatggatattttattggtaaaggttatgagtgcggaggcctgttccgcttttccctttctgatttctgcaataacatgtgtttaattcctaagttttccattgtcaaaggttctaagtgccatagttgtgtgcaatcgaagcaacctcgcaagcctcacaaggctgccgaggagagaaacttggcaccactagaactcctacattcagatctttgtgaaatgaatggggtgttgacgaaggaagttgaaaatcaacttgacagaaagataaaaaggcttaggtctgatcgtggtggagagtttttctcgaacgagtttgacttattctgtgaggaacatggcatcatacatgagaggacacctccctattctcccgagtctaatgggattgctgaaaggaagaaccgcacactgactgacttggtgaatgccatgttggacaccgcgggactgcctaaggcatgtgaagctcctcgaaggagtaagagacaaaggacggctaagtcttttggtgatgatttcactgtgtacctcgtggatgacactcctaagtcaatttcagaagcatatgcatctcctgatgcagactactggaaggaggctgtccatagtgaaatggattccattatcgctaacgggacttgggaggtgacagagcgaccctatgggtgtaaacctgtggggtgcaagtgggtgttcaagaagaagcttaggcctgacgcctcacatggtcttctcgttcatcaaatggacgttaagacagcttttcttaatggagagctggatgaggagatctatatggatcaacctgatgggtttgtagttgaaggctttgcagtcaatgaggcagataaatgtgtgtactatcgccatggtgggggtgagggagttattttgtgcttgtatgttgacgacatactgatatttgggacaaaccttgaggtgataaatgagtcccattatgtggagaagatcttgaatcgctttggctacattgatagtaagccttctccaacaccttatgatcctagcttgttgcttcgcaagaacaagagaattgctaggaatcaactggaatactcccaaatcattggctcgttgatgtacctggctagtgcaactaggcctgatatctcctttgctgtgagcaagttgagccgatttacctctaatccgggagatgatcactggcgtgcgcttgagcgagtaatgcgctatctgaaaggtactgtggaattggggcttcactatactgggtatcctgcggtactggagggttatagtgattctaactggatctctgatgtggatgagatcaaagccactagtggatatgttttcacactgggtggtggtgctgtttcatggagcaaagatgttgtcctgcagagcattcttgaaagaactcacctttgtgagcttgactgttggtcgcagtctatgaagattttggactactccatcccgctcgccggcgtgcaccagcgatcgggagagcaggtctccggaacctctgcctttgacgtcctgcaccgggagaaggcggcaataagatctaatgatgcgttcatgctagttttcatctgtaatgtcatgatttatttatggaatagattaaatcattatatgtctataatctcaacaatccaaaaaccttattataggcactgtgattttactatggctggttttgccgatgcactgaggccggataaattcaccggtgtgcattttaagagatggcagatcagggtcactctgtggctgacagctatgaaatgcttctgggtgagtactggcaaacctgaaggagttcttactgctgaacagcagaagcaattcgaggaagccactactctctttgtgggatgcattcttagcgttcttggcgatcgtctggtcgaggtgtatatgcatatgaccgacgctaaggagttgtgggatgcactgaatactaaattcggtgctactgatgctagcaatgatctgtatatcatggagcagtttcatgactacaaaatggctgacaaccgttctgtagtcgaacaggctcatgagatacaaaccatggctaaggaactcgaactccttaagtgtgtcttacccgacaaatttgtggccgggtgcattattgcaaaactacctccatcttggaggagtttcggtactgcactcaaacacaagagacaggaatactccgttgaggggttgattgcgtctcttgatgttgaggagaaagctcgggaaaaagatgccgcgtctaagggcgatggtgggcagtccagtgccaatgttgtgcacaaggcccagaacaagagcaaggggaaatacaaagctcagcagaccaccaacttcaagaagcagaagaagaacaacaacaatcctaatcaggatgagaggacttgctttgtgtgtggccaagttggtcatctggctaggaagtgtccacaacgcaaggggatgaaggcacctgcagggcagacttctaagtctgctaatgtgaccattggcaacactggagatggaagcgggtatggtaatttacctactgttttttcagttaatcaatctactaattggtgggttgatactggggccaatgtacatgtttgtgctgacatctcattgttttcttcttatcaggtcgcacggggttccaccgtcctaatggggaatgggtcacatgcttctgttcatggtgttggcacggtagatctgaagtttacttcgggaaagatcgtgcagctgaagaacgtgcagcatgtcccttctatcgacaggaatcttgttagtggctcccgtctgactagagacggatttaagttggtttttgagtctaataaagtagtcgtgtctaaacatggatattttattggtaaaggttatgagtgcggaggcctgttccgcttttccctttctgatttctgcaataagtctgtgaaccatatttgtggcagtgtggatgatgaggctaatgtttggcattcacgtttatgtcatattaattttggcttgatgtctcggctttccagcatgtgtttaattcctaagttttccattgtcaaaggttctaagtgccatagttgtgtgcaatcgaagcaacctcgcaagcctcacaaggctgccgaggagagaaacttggcaccactagaactcttacattcagatctttgtgaaatgaatggggtgttgacgaagggtggaaaacgatatttcatgacattgattgatgatgctactagattttgctatgtgtacttgttgaaaacgaaagacgaggctctagactattttaaaatttataaggcagaagttgaaaatcaacttgacagaaagataaaaaggcttaggtctgatcgtggtggagagtttttctcgaacgagtttgacttattctgtgaggaacatggcatcatacatgagaggacgcctccctattctcccgagtctaatgggattgctgaaaggaagaaccgcacactgactgacttggtgaatgccatgttggacaccgcgggactgcctaaggcatggtggggggaggcattgttgacctcaaatcatgtgttaaacagagttcctaacagaaataaggacaaaacaccatatgagatatggattggtagaaaaccatcactttcttatttgcgcacatgggggtgcttggcgaaagtcaatgtaccaataacgaagaagcgcaaacttggacctaagactgtggactgtgtttttctgggatatgctcatcatagcattgcctatagatttttaatagttaaatccgaggtaccggacatgcatgttggtacaattatggagtctcgtgatgctaccttctttgagagctttttcccaatgaaggatacacatagtggttcgaaccaaccctctgaaataattcccagttcaatcacaccaccagaacaaactgaacatacacatgaacttgtctctgaggaggatgtcagtgaagctcctcgaaggagtaagagacaaaggacggctaagtcttttggtgatgatttcactgtgtacctcgtggatgacactcctaagtcaatttcagaagcatatgcatctcctgatgcagactactggaaggaggctgtccgtagtgaaatggattccattatcgctaacgggacttgggaggtgacagagcgaccctatgggtgtaaacctgtggggtgcaagtgggtgttcaagaagaagcttaggcctgacggtactattgaaaagtacaaggctcggcttgttgctaagggctatactcagaaagaaggcgaagatttctttgacacttactcacctgttgctagattgaccacaattcgtgtgctactttccctagcagcctcacatggtcttctcgttcatcaaatggacgttaagacaacttttcttaatggagagctggatgaggagatctatatggatcaacctgatgggtttgtagttgaaggtcaagaaggcaaagtgtgcaaattgttgaagtctttgtatggtctgaaacaagctcctaagcaatggcatgagaaatttgacaaaacattgacatctgcaggctttgcagtcaatgaggcagataaatgtgtgtactatcgccatggtgggggtgagggagttattttgtgcttgtatgttgacgacatactgatatttgggacaaaccttgaggtgataaatgaggttaaatcattcttgtctcaaaattttgatatgaaagatttgggagtagctgatgttatcttaaacattaagctaattagaggtgagaatgggattacactcttgcagtcccattatgtggagaagatcttgaatcgctttggctacattgatagtaagccttctccaacaccttatgatcctagcttgttgcttcgcaagaacaagagaattgctaggaatcaactggaatactcccaaatcattggctcgttgatgtacctggctagtgcaactaggcctgatatctcctttgctgtgagcaagttgagccgatttacctctaatccgggagatgatcactggcgtgcgcttgagcgagtaatgcgctatctgaaaggtactgtggaattggggcttcactatactgggtatcctgcggtactggagggttatagtgattctaactggatctctgatgtggatgagatcaaagccactagtggatatgttttcacactgggtggtggtgctgtttcatggaggtcttgcaaacagaccattttgacgaggtcaaccatggaagcagagctaacggcactggatactgctactgttgaggcagaatggctgcgtgatctattaatggatctgcctgttgttgaaaaaccggtgccggctatccttatgaactgtgacaatcaaacgacatgtgaaaagacgattgaagtctgtcaggaaattaagaaactccggagttataacgttggattacatccaaacagcgagaaacctggcagatcccttcacgaagggactatcacgaaatgtgatagacaatgcatcgaaggagatgggtttgagacccatatgagttatactatggtgagcattcttgaaagaactcacctttgtgagcttgactgttggtcgcagtctatgaagattttgggtgaatcttctaggaagcttactaaagacctaggacgacagcatcaaccacgaatcgagcagcaacaatccaatcaacaacgcagcaagcagcagtggtggtggcggccggcgggaggggacggattcggcggtggctcaagcaaatccgccgccggtggcaggttcggctgcggctcagcgcggaacagcgcaaggacgcctggtggtggtgaagactcgaagacggcggtgagatccatccccatccttctcgaagacgacgatggcggtggcacggattcggtggtggctcaagcaaatccgccgccggtggtagtctggcagtcgagggagcacattcaatggtggcggcgaggtcgtggtgagctcatcgcagcggtggacggcgggtccggctgcggctcggcgcggagcagcgcgaggatgcccagtggcggtgaagattcaaagacgcggtgagatccatccccattcttctcgaaaacgatgacggcggcgacacgaacaagactcgaagacctgttgtcgtcctcctcgagctcctgcgcacgactcggcctcgtcaagcttcctaaaccgatgccgttgccgtcgagctccagtcgccgtcctcgcagagatagagaaggg

SEQ ID NO: 35389 - DNA, 5811 bp, Oryza sativa
  Clone ID: PAT_MRT4530_39313C.1
gagcgcgggtgagcgggagagagggggaagtgggcgcgggtgcgagggcgacgtggacggcgtggcccgggaggcgcggacgcgaggcgcggcggcggttgcgggcgcggcggcgagcggctggagcgtgcaccggcgatcgggagagcaggtctccggaacctctgccttcgacgtcctgcaccaggagaaggcggcaataaggcactgtgattttactatggctggttttgccgatgcactgaggccggataaattcaccggtgtgcattttaagagatggcagattagggtcactctgtggctgacagctatgaaatgcttctgggtgagtactggcaaacctgaaggagttcttactgctgaacagcagaagcaattcgaggaagccactactctctttgtgggatgcattcttagcgttcttggcgatcgtctggtcgaggtgtatatgcatatgaccgatgctaaggagttgtgggatgcactgaatactaaattcggtgctactgatgctagcaatgatctgtatattatggagcagtttcatgactacaagatggctgacaaccgttctgtagtcgaacaggctcatgagatacaaaccatggctaaggaactcgaactccttaagtgtgtcttacccgacaaatttatggccgggtgcattattgcaaaactacctccatcttggaggagtttcggtactgcactcaaacacaagagacaggaatactccgttgaggggttgattgcgtctcttgatgttgaggagaaagctcgggaaaaagatgccgcgtctaagggcgatggtggacagtccagtgccaatgttgtgcacaaggcccagaacaagagcaaggggaaatacaaagctcagcagaccaccaacttcaagaagcagaagaagaacaacaacaatcctaatcaggatgagaggacttgctttgtgtgtggccaagttggtcatctggctaggaagtgtccacagcgcaaggggatgaaggcacctgcagggcagacttctaagtctgctaatgtgaccattggcaacactggagatggaagcgggtatggtaatttacctactgtcgcacggggttccaccgtcctaatggggaatgggtcacatgcttctgttcatgttgttggcacggtagatctgaagtttacttcgggaaagatcgtgcagctgaagaatgtgcagcatgtcccttctatcgacaggaatcttgttagtgactcccgtctgattagagacggatttaagttggtttttgagtctaataaagtagtcgtgtctaaacatggatattttattggtaaaggttatgagtgcggaggcctgtttcgcttttccctttctgatttctgcaataagtctgtgaaccatatttgtggcagtgtggatgatgaggctaatgtttggcattcacaagttgaaaatcaacttgacagaaagataaaaaggcttaggtctgatcgtggtggagagtttttctcgaacgagtttgacttattctttgaggaacatggcatcatacatgagaggacgcctccctattctcccgagtctaatgggattgctgaaaggaagaaccgcacactgactgacttggtgaatgccatgttggacaccgcgggactgcctaaggcatgtgaagctcctcgaaggagtaagagacaaaggacggctaagtcttttggtgatgatttcactgtgtacctcgtggatgacactcctaagtcaatttcagaagcatatgcatctcctgatgcagactactggaaggaggctgtccgtagtgaaatggattccattatcgctaacgggacttgggaggtgacggagcgaccctatgggtgtaaacctgtggggtgcaagtgggtgttcaagaagaagcttaggcctgacgcctcacatggtcttctcgttcatcaaatggacgttaagacagcttttcttaatggagagctggatgaggagatctatatggatcaacctgatgggtttgtagttgaaggctttgcagtcaatgaggcagataaatgtgtgtactatcgccatggtgggggtgagggagttattttgtgcttgtatgttgacgacatactgatatttgggacaaaccttgaggtgataaatgagtcccattatgtggagaagatcttgaatcgctttggctacattgatagtaagccttctccaacaccttatgatcctagcttgttgcttcgcaagaacaagagaattgctaggaatcaactggaatactcccaaatcattggctcgttgatgtacctggctagtgcaactaggcctgatatctcctttgctagcattcttgaaagaactcacctttgtgagcttgactgttggtcgcagtctatgaagattttggactactccatcccgctcgccggcgtgcacctgcgatcgggagagcaggtctccggaacctctgccttcgacgtcctgcaccgggagaaggcggcaataaggcactgtgattttactatggctggttttgccgatgcactgaggccggataaattcaccggtgtgcattttaagagatggcagatcagggtcactctgtggctgacagctatgaaatgcttctgggtgagtactggcaaacctgaaggagttcttactgctgaacagcagaagcaattcgaggaagccactactctctttgtgggatgcattcttagcgttcttggcgatcgtctggtcgaggtgtatatgcatatgaccgacgctaaggagttgtgggatgcactgaatactaaattcggtgctactgatgctagcaatgatctgtatatcatagagcagtttcatgactacaagatggctgacaaccgttctgtaatcgaacaggctcatgagatacaaaccatggctaaggaactcgaactccgtaagtgtgtcttacccgacaaatttgtggctgggtgcattattgcgaaactaccttcatcttggagaagtttcggtactgcactcaaacacaagagacaggaatactccgttgaggggttgatagcgtctcttgatgttgaggagaaagctcgggaaaaagatgccgcgtctaagggcgatggtggacagtccagtgccaatgttgtgcacaaggcccagaacaagagcaaggggaaatacaaagctcagcagaccaccaacttcaagaagcagaagaagaacaacaacaatcctaatcaggatgagaggacttgctttgtgtgtggccaagttggtcatctggctaggaagtgtccacaacgcaaggggatgaaggcacctgcagggcagacttctaagtctgctaatgtgaccattggcaacactggagatggaagcgggtatggtaatttacctactgtcgcacggggttccaccgtcctaatggggaatgggtcacaagcttctgttcatggtgttggcacggtagatctgaagtttacttcgggaaagatcgtgcagctgaagaacgtgcagcatgtcccttctatcgacaggaatcttgttagtggctcccgtctgactagagacggatttaagttggtttttgagtctaataaagtagtcgtgtctaaacatggatattttattggtaaaggttatgagtgcggaggcctgttccgcttttccctttctgatttctgcaataagtctgtgaaccatatttgtggcagtgtggatgatgaggctaatgtttggcattcacactactggaaggaggctgtccgtagtgaaatggattccattatcgctaacgggacttgggaggtgacagagcgaccctatgggtgtaaacctgtggggtgcaagtgggtgttcaagaagaagcttaggcctgatggctttgcggtcaatgaggcagataaatgtgtgtactatcgccatggtgggggtgagggagttattttgtgcttgtatgttgacgacatactgatatttggaacaaaccttgaggtgataaatgagtcccattatgtggagaagatcttgaatcgctttggctacattgatagtaagccttctccaacaccttatgatcctagcttgttgcttcgcaagaacaagagaattgctaggaatcaactggaatactcccaaatcattggctcgttgatgtacctggctagtgcaactaggcctgatatctcctttgctgtgagcaagttgagccgatttacctctaatccgggagatgatcactggcgtgcgcttgagcgagtaatgcgctatctgaaaggtactgtggaattggggcttcactatactgggtatcctgcggtactggagggttatagtgattctaactggatctctgatgtggatgagatcaaagccactagtggatatgttttcacactgggtggtggtgctgtttcatggaggtcttgcaaacagaccattttgacgaggtcaaccatggaagcagagctaacggcactggatactgctactgttgaggcagaatggctgcgtgatctattaatggatctgcctgttgttgaaaaaccggtgccggctatccttatgaactgtgacaatcaaacggaaattaagaaactccggagttataacgttggattacatccaaacagcgagaaacctggcagatcccttcacgaagggactatcacgaaatgtgataaacaatgcatcgaaggagatgggtttgagacccatgtctccggaacctctgcctttgacgtcctgcaccgggagaaggcggcaataaggtactcgtcgaacacgccggccctggcctgcccggccttgcgcagcggcggaggcggcgatcacggcggcgagacccagcagcgcggcgcgcctgccgccgccctgctcagcttgggcggtgccgcgacgtgcacgcgcttcggcagcgccggcgagccggccgactgcggcaccgccgcggcgggcttgaggccgacaaggctgttgttcactccggccatggctcgattgagctgcgtgcaagcggctgtcaccacctgccgcctacctctgacaaatccgtgggatacacaacaaacaaagctatgggaattgtccaaaacaccctcaaccgtcattgggaaggcatcagcaacgtacacgtggagggccaggatgagggatgcagatctttgtgaagacactcactggcaataccataaggttgagtcctctgacacgattgacaatgtcaaggccaagattcaggacaaggagggtattccacctgaccagcagcgcctcatctttgcgggcaagcaacttgaggacggacgcaccctcgcagattacaacattcagaaagagtccaccctccaccttgtccttcgcctcaggggaggaatgcagatctttgtgaagaccttgacaagaaagacccatcactttggagcgtctttatctttgctggcaagcagcttgaggatggacaaggagggcatccccccggaccagcagcgcctcatcttcgccggcaagcagctcaaggacggacgcaccctggctgactacaatatccagaaggagtctacccttcacctagtgctcaggctcaggggtggaatgcaaatctttgtcaagacattgaccggcaaaaccattaccttggaggttgagtcgtcggacacaattgacaacgtgaaagcaaagattcaggacaaggagggcattcccccggatcagcagcgactgatctttgctggcaagcagctcgaggatggccgcaccttagcaggttacaacatccagaaggagtccaccttgcacctggcgctccgtctccgtggtggcct

SEQ ID NO: 35390 - DNA, 3153 bp, Oryza sativa
  Clone ID: PAT_MRT4530_39314C.1
atgggggtgatgtcgcggcgggtgctgcctgcctggagcagcctctgctacttctgcccctcgctgccggcgcgctcgcgtcagcccgtcaagaggtacaagaagatcatcgcggagatctaccagcttccaccggatggtgaaccgaatgataggaggattgggaagctctgtgattatgtctcgagaaatccgacgcggatacccaagatcacagagtaccttgaggagaggtgctataaagatctgagacatgagaatttcaccttggccaaagttgtaccatgtatatacaggaagcttctgtgttcatgcaaggatcatacaccattgctggccacaagcacattgagcattattcgtactcttctcgatcagagaatgaatgatgatttgcgggtcctgggttgtctaatgcttgttgactttctcaacggccaggttgatagcacgcatatgtttaatctggaaggcctcataccaaaactttgccaaattagtcaagaactaagggaaggcgacaaagggcaccgcatgcgaaatgcgccacttcaggctcttgctcccatgatcaaacacatgtgagacgactctcacattgccaccggccatgctaaagttcagtttgagatcggctgctgttctgaggttaattgcaatgtctcaagaaaaggggatgtcaggcatcaaaatgatcaagattttataatcaatggaagtctgactgggttgtcattttcagggcaaaattgtgccaaaggggcttcagatataatgcctgcaactgtaaatcccgcacgatgggcaacggtttgctttcacagtatgggcagtatagcctaggaggcaacatcagtgtggggggttaatgattctcttttccgcctttttgatagccacaactattggtctcctgaaaatgggattgcattttctattctacaagaaatgcaggcactgatggacaaatcagggcaaaatggccatttgctgttatctttcaccataaaacacatagatcataagagtgttgccaagaagcctgccaagcaaacaagcattttaaaagttgcttcgcttcttgcaaaacatgcaaagttgaaggcgtcggtgacaatagcaagtgcaacaagcgacttaataaagcacttgcgcaaatgcatgcattgtgctgttgaatcaccaaatgctcaaaatgatgttgacaagtggaacagtgcactttatgtggccttggaggagtgcctggtgcaattgacagaaaaggttggtgatgttgggcctgttcttgacatggtgggagtaatgcttgagaatctctcttgtactgccaccattgccagaacaacaatttcatcagttttccgcacagtgcaaatagcagcttccatccacaagtcattgtacaaccagaaggcaagttttctagcatttcctgaagctttgtttcatcagcttctcttagcaatgatgcacccagacaaaaagacaagggttggttcacatcgtgtcctatccaccattattgcaccttcacttctatgcccatggtcaggcataagttttcctatccctgtgaagggcaatgattcacagagcattactttgttggctctttctgccttttcttctgaggccgtaatggatgaagtccggatcaaaagcaggacccatgaacagttacaaaacaatgtaaaaccagaaactgtagttggctctgagaacggatacacacatacagaaccaaattcaaggaagagccctggtcttggaattccattgaaagatgaactgacacattttcttccactgaagcagaatcttaagttcatgaagctgaacagtagccaacttgttctcctcctttcatcaatttggagtcaagcacctctagaagataactcaccagcaaattttgaagcaatgtgccatacctacaatattgctttattgtgttcaatgacaaagagctctagtcacgcagcattagttcgatgtttccagttggccttctctctcaggaggatgtcccttaaccaagaaacaaaagttgctgatattcctcagacaattcctcttgtgaaagcagcagttccagagaaaatggtcgaccctcatctttgcctgattgatgattgcagactcgttattagttcaccacagtcatctaacagtgggatagtttatggttctgaggaagatgaaagtgatgcacgcaattttctttcttgtgtaaataaaaatgatacacagttaaaagaaattgtgatatcccacttcaaggagaagtttgaaaatctatcagagaagtttaatggtatagaagagcagcttcttcaggagttttccctggatgattcattccctctcagtgctccactattcatggaaacaccacactcttgttcgatgtacgctgaaaaggatgaccattgttttgatgaggaagtcattccttgtgagatggatgatgacgatgacatcgtttttgaacacagtggatcgcaatctgacaggaaaacctctggatctatggcttcatcagatgttctaaacgtcaatcaactaatagaatcggttcatgagacagcaaggcaggttgctaatgctccagtttctgccaaccttgtaccctacgatcaaatgaagagccaatgcgaagccctagtcatggagaagcaacagaagatgtctgttctcctgagcttcaaacactcgaggaccgattcccgtggctcgactgcagaaaatggactggaaacaaacgagtcatctgctcgctgagcttgagacgcagtcgacgaggaaggagcgaatgcgacgcagcgactcggcatcaagcgaatctgaccggtcgttcaggctgccaccggcaagcccatatgacaagttcatgagagctgctgggcgataggctggtgcaatgcaatgcgatggcgccaaggatctgatactagttttcaagcctgtatacagaaatgtttttacagatacaagtcttctaaagctgtttcttttcattgtcgccttgtattttttattcttctgagtgtaaatttctcgagaaggtgtacaaatttctgttactgttgtagagacccagaataaataaaagtataggcattggtgcaatctgatggatgaagttgtatt

SEQ ID NO: 35391 - DNA, 556 bp, Oryza sativa
  unsure (1)..(556): unsure at all n locations
  Clone ID: PAT_MRT4530_39315C.1
ggcacgaggctccaccacaggatcagagggttggtgcgctgggtcgtcgccgaggtcgccgccggccgctccccgtccgtcgcgctccaccgctaccagaactactgctcctccgcctccgccgccgccgcgtccccatgcgcctgcagctacgacgtccccgtgggcacagatgtactctcgctcctccaccggggctcccacgcctcccggctcaatgtgctcctcagggttcttctcgtcgtgcagcaactcctgcagcagaacaagcactgctccaagagggacatctactacatgtacccnctccatattccaagaaacaagcggttgttgaccgtgcaatcaatgatatatgcgtactcttcaagtgcagccggcacaatctcaatgtggttcctgtggcaaaaggcttggtgatgggctggattagatttttagagggagaaaaggaagtctattgcataatgaatgtcaatgctgccttctctatcccagttagcatcgaagcaataaaagatgttgttagtgttgcggactacatacttattgtcga

SEQ ID NO: 35392 - DNA, 2211 bp, Oryza sativa
  Clone ID: PAT_MRT4530_39316C.1
atggagcagcagcacctgtccgtagcacagaacgtgacccgcgccgccacggcgtgggcggccagcccggtgggtctcctggtccgcgtggaggcgctggtgacggccagctgcgcgctcctcgccacgctcgtcttcctcggctctggccgccgcaccagccgcagcgccgccttccgtttcgtggtctggctggcgctgatgctgagctacccggcggtgtcctacacgatcgggctgatgcagtcgggctccttccgcaacgacatggtggtggtgtgggcatgcttcctgctcggctgcgccgacggcatcgccgcctgcagcctcgacggcgccgaccagcaggcccgcaccatgatcagccaggccacgcaggtgttctacgtcatgctcctcctcatctcctacctcggttctctgcagctgcagctgaaggtgctcctgtcgctgctctggttgctcaacgtcgccaagctcgtgttgcgcctacggggcctcctcgccgccggccgtgaccgcgtcctcaccgccgacaactggctcatctccaagtacatggctcacgagaaggtcagcagcatctgggatttcgacccggccaccatgaggggctacaggtacgtggtcaccggcgacgacaagaagaacgtgcagtaccagtatggcgccgccgagtacaaggtgaacgacgagctcgtcaccgtcgagaaagcgtgggagcagcacgacgggagcctactgagcgacgacgacaagctcaaggatctgtgcctctccttctcgctgttcaagctcctccggcaacgcctcaacctcaacgggaagccgttccacgagcccaaggacatcaggacgctcgtgttcgtccggagggggctcgccggcggcgactcctgcgaagaccacgacaggatgtaccgtgtcatcgaggtggagctgggtttcctcttcgacttctactacgcgaggtacccctcgccgaagcagactctcgtcccggagacggccacgttcatggcggccgccgcgctgagcctctccaccctcttctccccggcgttgctgcatcaccaccaccaccactctccgcccccgggcggcggcgccgtcgactacaccacgaccagcgtcgacatctggctggctaggctggtgatctccctcttcctggtcctcgagctctcccagtacctgtccctcgtcttgtcggactggcacagggtgaagatgctgtgccgctacgtgcgccaccggccatggtggcaaggccacccgatcctggagaagttcctatggctgacgtgccgcgccacgctgacacgaagctactggagcaactcggttgggcagtactcgctgctccactcctgcctcgagaaccagagctcctgcctcctcacgcgcgtgccgctccacaggtgggtcaaggatcagctggccacgacgagggcagtgacgcggcggagcctgccggtggcggtgaagcgccagatccaccggctgctccggtcggagtggctgtccaacgtcaagtacggcgaccggacgctgcagaggaacgacatgctgcaggtgttcgactggtccacctccaggtacaagttcggcaccatgggcagcatcctcatctggcacatcgccaccgccatctgcgacgacgagctctccaagctgtttggcgccgccggtggcaaggcacggccacgcgccgcccacaacgccgtcgccgccgacagccgcgaggtggccaccgtgctctccaactattgcgcctacctgctgctccaggcgccggagctggtgacggatgaggtccacgacgagcggctgctgatggaggccgtgcaggaggcgatccagaactacctccgaaacataggttgccgccgctccaaagacgccatgttcgccagcttgcgagagttcatgccggccgacgaggccaactttaccggagaagccgtcctagccgacggcgcacagctggggtaccagctgctctcggccatggctgacgaggcggcgctgtggaacttactggccgagatgtgggtggagctgctgctggcggttgcgccgtcggagaacgtgacgggccacgtcaagaagctggccaccggcggcgagctcatcacgcacctctgggctttgttgacgcacggtgggattatcaaaaggcgagagaagccttactatgactcccgttag

SEQ ID NO: 35393 - DNA, 525 bp, Oryza sativa
  Clone ID: PAT_MRT4530_39317C.1
cggacgcgtgggtgaaagatgaaaatcttaagttcatgaagctgaacagtagccaacttgttctcctcctttcatcaatgtggagtcaagcacctctagaagataactcaccagcaaattttgaagcaatgtgccatacctacaatattgctttattgtgttcaatgacaaagagctctagtcacgcagcattagttcgatgtttccagttggccttctctctcaggaggatgtcccttaaccaagaaaatggtttgcagccatcacgtaggaggtgtttgtatacaatggcatcagcaatgctgattttttcagcaaaagttgctgatattcctcagacaattcctcttgtgaaagcagcagttccagagaaaatggtcgaccctcatctttgcctgattgatgattgcagactcgttattagttcaccacagtcatctaacagtgggatagtttatggtctgaggaagatgaaatgatgcacgcaattttcttttctgtgaaataaaaatgattcacagttaa

SEQ ID NO: 35394 - DNA, 200 bp, Oryza sativa
  Clone ID: PAT_MRT4530_39318C.1
attaaaacattttttatttatttttttttattgtgggtattatcacattagcggggaaagctgtctccaaacactgaatttgtctactgcaaagatagataattaaagaaccagtgacaaggctggttagaaaaacaattaatggagcaaaggccgatgcccctcattgccaaggaagtgaatggatgccacggccaaac

SEQ ID NO: 35395 - DNA, 446 bp, Oryza sativa
  Clone ID: PAT_MRT4530_39319C.1
ctcaagcagcattacacgtgctgacacatccgcagtctatgatgtccaaacaagctgttgctggtagagcgcaccacagctgctgcttctgtgcggctcatgggcacatagcagacttaggcagcaaaccaagcctgctgctgcatgctgctacataccagctacttgtgctgcctgtgaggcagcgagcgctctgacagtgctgtcagggcgtcctgcttacttcttgcccttgcccttgccgcccttggcctgctcctccaccaggtaggtggtggtgcacttgccgcagtacacgcggtcaaagtgggtggccatgaagatgccagggccgcactgggggcactgcttccgcaggcgggacaccttgccggagtcgtccaccttggagaacttgggcacccggagcttgacctttttgtgcttgtgcttctgctttttgggct

SEQ ID NO: 35396 - DNA, 254 bp, Oryza sativa
  Clone ID: PAT_MRT4530_3931C.1
atggccaagatggtgtcgtggaacaggcgatcctcacggcagggatgtagcagcgatgacgaggctagtggcgccttggcggcggcggcggaggagattctgtggaggaaatgtcggccgctccagttccctggccgcatcacctatggctcttatggcaaccagctgcaaggcttgccggccacctctccccctctccgcttgcccgcccgctcgaccgggctcgtcgcttgcctcttccccatctgttgccg

SEQ ID NO: 35397 - DNA, 558 bp, Oryza sativa
  Clone ID: PAT_MRT4530_39320C.1
atgggtgtgccctatgaaatacgtagggttttggagacccccaacatatctcttatatacaaacttgccgggaatggctggtctgggcggcgatttgcgctgtcgtggcccttgccgttgcttggcacgtcatccggcccggagcccaggggtggatttggagcgcggtcgttgcgtgcgttctccgccgttggatggccatcgtgcgtagggaggagggtggcggcgatgccggcggcgagatccgcgccgctgcggccgcccgccatcggccgtcgccgcagccgcctgccgctgccgcccgccaccggccgtcgccgcagccgcctgccactgccgcccatcgacgtcgtcgccgcccaccgaagccgtcgccgcagccgctccctaggtcgcggcagtcgaggccgctttcgccgcccgccgccgccgcccgccgcgcggcgtgccgctcgagcccgcggccgctcccgcccgccgccgcccgtcgcagcccgccgcgcccgcccacccgtcgccgccgcccgtcgccgccccgcccggcaccgctgtggatga

SEQ ID NO: 35398 - DNA, 353 bp, Oryza sativa
  Clone ID: PAT_MRT4530_39321C.1
aaaaaatctccatggatgcatcgttgaagatgaagagagatgagaagagaggcgattcaatgctgaatattggggaagccctaggttgggtgaaagactcacataaagaagattatgtaatggcggatatgtatgatcaacagtccttaacgagacatcagcaggttcaaaataaattgtgaatcagagtttacatgcaatttgcactggcagaacatgaaaagtttacatcaattcagctatctcagtacatgtatctacaaactgcagctaaactgtctattgataaatatccatgtatccagtgagcaataaatatgcatcttgggggcgaaaaaaaaaaaaaaaaaaaa

SEQ ID NO: 35399 - DNA, 402 bp, Oryza sativa
  Clone ID: PAT_MRT4530_39322C.1
atgggggcgacggtgagggatgacgaagactgcggcggcagcgaaatgggagaagccggccccactgctgcctcatctcctatctcactagcgccacccacctccttcccccgctcgctggcgtcacgagcccaccacccccttttcgcctgcccccaccgcctccaacgccgagacccacctctccttccgcggctggttcggtggcccccttcatcttctcctggggtgaggccagggagggcgacggttgaggcggtggcggcggaggaggcagtggtgggctcgggggcgtcttttgggcaggcgcagcgccgtcaccaccggcagtggcggctgcggccgcgggcggcatcggtggatggatggcgcgaggccgacagcgcggaggacgatggatga

SEQ ID NO: 35400 - DNA, 489 bp, Oryza sativa
  Clone ID: PAT_MRT4530_39323C.1
ggctaaatcagacatgaacacgttcattttttttttgaagtagcaataagattaaatcatttacatttaccttgaagaaatataattcttttcagcaatgcgttcatgcagtcagtattaaagaacgttctactatcacttgcctaatgatggtgaaatagtagagcaaactactcaaaagaaaagaaaaaaagaaacagtggagcaaagatacatcttacaaggctatgaagactaggcagcaattgttccaatgtaaactcgtgattttctgataaatacatccatttctgcagaactattacccggaatcccttactgctgaaagactgcaaattgatgatccaaaataccatatcatagctcagattcgtgtgagctgttcatagtccataatccatccacgatttctgcaacaggaaagggacactgtcctgattgctccagttcatagtcccatttactggtccacctatagcttcacatatt

SEQ ID NO: 35401 - DNA, 1140 bp, Oryza sativa
  Clone ID: PAT_MRT4530_39324C.1
atgggaggtgttgaacctaggctaataataactgacgaatgtgctagtatgaaggcagcaattagtgttgatttccctacgagcacccacaggttatgcatgtggcatattatgaggaaattaaaggataaggtaggctatcccctaagagaggacaaagagttccttgatcggtttaacaaatgtgtatggtgtactgaaactgatgaggaatttgaggcacaatggacttccattatttctgactatggtctagaagaccatgagtggttgacaacgaggtttgatacagctctagaagaacaacgtcacaaagagctagaaaatgacaatgttacagttcattctaaccaaaaactaaaaacagaatgggggtttgagaagcatggaagggaggtgttcacccatgagatatttgacacttttcagaaagaggttgtagctgttatggagaaatgcatagttgagaacatcgaaatcgagggggatgtgaaaatcactacggtaagtgatagttcactaagggaaagaaaagtcttatacaacacatcaaccaaggatatttcatgcacttgtatgttatttgaatctcttggaattccttgccgccatgtgattcttgtccttagaagtgctaggctaaatcaacttccagaacatttagtcctcagaaggtggacaaagatgtgcaaaaaggaacctgtgtttgatagtgagggtaccttgttggaagaaagtgagagcacctcaactgaccctatgatgaaaaaattagtgtttgatgtattcaacacaatggaagaaacaatccatctagctaagcagtccattgatagcatgcaactcttgaaaaatggtgtacttgacattgcaaaacaagtaagacagatggtgccagccactcaaaggactagagttagcgagatcgaggaatttcttggttgtagcattcctacgcaaattgacattcacccacctaacgatgtgcgtgccaaggggaagtgcaatagattgttgggacatttggataagggcaaggcaagaaaaaaggctagtaatgatgataaggaaggggaagtgcagcaaaacaacaagaagaaaaggaaggcaaatggctctaaaaagccactagatccatga

SEQ ID NO: 35402 - DNA, 1512 bp, Oryza sativa
  unsure (1)..(1512): unsure at all n locations
  Clone ID: PAT_MRT4530_39325C.1
atggcaaagcttctgcctgacgatgtgcttacaatcatcctccgttgtcttgcgccacatgaccttgccatgtctcgctgtgtctgcaaactctggtgcaccatcatcgacactcatcgcatgctgcgtgtggacctcctcccacactcagtaggcggcatattcatcaactttcatgatctaggcttgtcagaattcttcgcccgcccctcgacaggccccacaatatctggcaacatcaactatttgcctctcacatccatagttaggggccactgcaatgggctcctcttgctttacagccatatcagtcgtcccggcatgaagcagttttatgtggttaacccggctacaagacagtgggtgcaattgcctccacctccaaggcctgatattgggatcatgcacttagacaatttgtaccttgcctttgaccccaccttgtcgtcacactttgaggtatttcaaatcccctatgttgatgtcttccgccatcgctctgagttgaatcctgcaatagagggaatagaatggccaccgtcaacatgcgttctgcatgttttctcaacaaggacaaggcaatgggaggagagatcatttgttcgagaaggggaggctgcaggatctttggctatcatacgacgagattttccaaattttctgcacaatgctgtctactgtcggggagtactttatgtacgctgtcaaaccaactttgtaatgagaatatctttgtcagatggcaagtatcgaataattaaaccaccagtagagattgaacgatataactatcatgaatatcctgatgcgtacggacatgacaacagtgaggcaatagaggaacaaaactttgattgggactctgacaatgataattttatcaacactacagacgaaagaaatttgcgctacggtagaattacttttctaggatttcacccttacaaggaagttgttttctcaagtcactcattgagccgaggactggcataccacttaaataccatgaagtttagaggctttggcaagattcaagacttgggcaatcttggcccaaaatattatggaggatgtatgggtatccaaccattcattgaagagtcttttctgtgcacaccttggatgggagagttcccaaaggacattaattaagatctcatcttgaagattactacccaatgaatatggcatattgccttactgtcattcaggacaagtatctcaagccatgaagtatcttttgatagcttgtatcgctgagcttctcgagttcttgtaatttatctgctgtcggaatattatgcaagttaagagtccattaatcgtccctggacctacatcaacactcagtccggcgtcattagatggtactaattacagagcacggtgcatggtgttncgntttgcgngagcttctgctgtgtgccntgctatatgctttctgtnatgcnntgcccgntgttcccnnncccgttntgtttnttttntgtgtgtttcccccccccccccccn

SEQ ID NO: 35403 - DNA, 438 bp, Oryza sativa
  Clone ID: PAT_MRT4530_39326C.1
atgaagcagttttatgtggttaacccggctacaagacagtgggtgcaattgcctccacctccaaggcctgatattgggatcatgcacttagacaatttgtaccttgcctttgacccaccttgtcgtcacactttgagaatatctttgtcagatggcaagtatcgaataattaaaccaccagtagagattgaacggtacgaggagtcaaatatttatatgggactatcacagaagagggtgtactgtacattctttgatgatccagacataatttatattcttgatgaatcgtacggaaaaatggagtgggtgcagaagaacgctattagctgtctggtcatacatgcatttcagcaaactgatgggccctggaccttacaagatataactatcatgaatatcctgatgcgtacggacatgacaacagtgaggcaatag

SEQ ID NO: 35404 - DNA, 643 bp, Oryza sativa
  Clone ID: PAT_MRT4530_39327C.1
caggatctttggctatcatacgacgagattgtggaattttctgcacaatgctgtctactgtcggggagtactttatgtacgctgtcaaaccaactttgtaatgagaatatctttgtcagatggcaagtatcgaataattaaaccaccagtagagattgaacggtacgaggagtcaaatgtttatatgggactatcacagaagagggtgtactgtacattctttgatgatccagacataatttatattcttgatgaatcgtacggaaaaatggagtgggtgcagaagaacgctattagctgtctggtcatacatgcatttcagcaaactgatgggccctggaccttacaagatataactatcatgaatatcctgatgcgtacggacatgacaacagtgaggcaatagaggaacaaaactttgattgggactctgacaatgataattttatcaacactacagacgaaagaaatttgcgctacggtagaattacttttctaggatttcacccttacaaggaagttgttttctcaagtcactcattgagccgaggactggcataccacttaaataccatgaagtttagaggctttggcaagattcaagacttgggcaatcttggcccaaatattatggaggatgtat

SEQ ID NO: 35405 - DNA, 465 bp, Oryza sativa
  Clone ID: PAT_MRT4530_39328C.1
atggccgcactggtcctcagtgtcgtcagcttcttcgtgccaaagaggtgggttcaagttcgccggagacggaacgggaagcgcggcggtgcggagaccgaactagctgcaggcgccaccactccggccggcggtcggcagcggacagcgtcaaatgcgctctcgcgcacgccgacgtttgtgtgcgagtgcccgctcgagagcggcggcgagatagtgcggcggcgacgaggacacgcatgggaccacgctcgatccagctcaagggcctcctccgccgccgccgagccgacgccgacgccgctcgacgcggccctcagtccccgcagcgacgtgtctcgccgggaggtaccaaccaccgctcaggaagccgagcaccggcgacgcagccgatgtctgctcccgcattgcccgatgagctctggactgaccacgacttacttgagcgctgcagcaagctgctga

SEQ ID NO: 35406 - DNA, 1013 bp, Oryza sativa
  Clone ID: PAT_MRT4530_39329C.1
gcgtccagttccatctaatcagcttctcgtcgagatgggccgcaagttcttctgttggtggcaactaggaaatgcaacgggaccactgatcaggtggacaaaattgtgaaaattctgaatgagggacagattgtgccaacagtgcacaccactgaacatactacataccaataatgtttagctccttttgtcaagagtcagctgcgcccggagatccaagttgctgctcagaattgttgggtgaagaagggcggggctttcaccggtgaggtcagcgctgagatgcttgtcaaccttagtattccctgggttattcttggacactctgaaaggaggagcttgttgggtgaatcaaatgagtttgttggagacaaagtggcatatgcgctctctcagggcttgaaggtcattgcatgtgttggtgagactctcgagcagcgggaaactggatcgaattgatgaatgatgctgcaataacaaaagacttggacttttgtggttgttgcctatgaacctgtgtgggccattggaactggtaaagttgctacaccagatcaagcacaagaagtgcatgatggcctgaggaagtggctcgctgctaatgtcagtgcagaggttgctgaatcaacaaggatcatctatggaggttccgtaactggtgcgaactgcaaggagctggcagcaaagcctgatgttgatggttttctcgtcggtggtgcttcattgaagcctgaattcatcgacatcatcaactccgccaccgtgaagtccgcctaagatcttcaccccattcacctttggcgtgggaagatgtctgaagaggatcatacctttttctgtgcttatgtaatgctagtagttttgtgctggagcagctactctttttcctccccttcacttccctgaagctacctgcagcttgagcaatgctaataatgcacaccactgaacatactacataccaataatgtttaaaaaaaaaaaaaaataaaaaaaaaaaaaaaaaagcggcc

SEQ ID NO: 35407 - DNA, 571 bp, Oryza sativa
  Clone ID: PAT_MRT4530_3932C.1
atggagccgagatcgccgcgccggtttccttcccctccggccaccctctctcgcccccggctctatttaagcactccccgtgcctccctcctccgtttccgacccttgccgctttctctccccgtcagaatcgagctcgcgccgtcgtcctctctctccgccgtcgccgccgagcttcggttcgccgccgccgtcgccccggacctcctcccgcttcggcatcgcctccttcggcttcgccgcgtcctcatcgacctcgtccaccccttcgtttcgcccgccgaccgctggaacgccgccgtccccgtctacccgagccgtgccgccgccttcctccgctccggtcgccgttcccgtcgccgccgtcgacccggggtgagccgtggaccgccgtttcgcttcccccttccctcccctctctcgggcgccgctccaccgcgccggtggtcaccggcggcgaccatcggggcgcgggtgcgccgcctcccgtcggctgagccggcgtggccgccttcgggcgtgccccacgacagccatgtggagaccggccgtcagccgcccgcgccctcgg

SEQ ID NO: 35408 - DNA, 448 bp, Oryza sativa
  Clone ID: PAT_MRT4530_39330C.1
cccccggctcctcctcctccccacccgcccccggccgcattctgccccccctccgcccccgcccggcccgggccactctgcggccgccccccccgcccccgtggcccggcgccctcgtcgtccgccgcctccgctcccgccgcccgtcgccgtcgccgcccgtcgcccccactgccgccccccggttcgtgcgccgcgcagtgctcctgccgcgcttctcccaggagcactagctgcgcggcgtttcccggtccgccaccaagccctcgccagtgcttccggccgcctcttttcctgcagttgctctcgccgtgcgcggcgtctcgcggtccgccagccaggcctcctctgctgttccgggcttggccggcttccccatttccacgaggtgctctccccgggctgggaggctgggctaggtgcgcccaatcaacgttacatcaaaagt

SEQ ID NO: 35409 - DNA, 1775 bp, Oryza sativa
  Clone ID: PAT_MRT4530_39331C.1
gggccgtaagttcttcgttggtggctactggaaatgcatcgggaccactgatctggtggacaaaattgtgaaaattctgaatgagggacagattgcttctacagatgttgttgagggacccaccagtccaccttatgtgttcatccccgctcgcccggccgccacaaaaaccaaaatccaatctccagctctcttcccccccgcgtccagttccatctaatcagcttctcgtcgagatgggccgcaagttcttcgttggtggcaactggaaatgcaatgggaccactgatcaggtggacaaaattgtgaaaattctgaatgagggacagattgcttctacagatgtcgttgaggtggttgtcagcccaccttatgtgttccttcctgtggtcaagagtcagctgcgcccggagatccaagttgctgctcagaattgttgggtgaagaagggcggggctttcaccggtgaggtcagcgctgagatgcttgtcaaccttagtattccctgggttattcttggacactctgaaaggaggagtttgttgggtgaatcaaatgagtttgttggagacaaagtggcatatgcgctctctcagggcttgaaggtcattgcatgtgttggtgagactctcgagcagcgggaatctggatcgaccatggatgttgttgctgcacaaacaaaagcaatttctgaaaggatcaaggattggactaatgtggttgttgcctatgaacctgtgtgggccattggaactggtaaagttgctacaccagatcaagcacaagaagtgcatgatggcctgaggaagtggctcgctgctaatgtcagtgcagaggttgctgaatcaacaaggatcatctatggaggttccgtaactggtgcgaactgcaaggagctggcagcaaagcctgatgttgatggttttctcgtcggtggtgcttcattgaagcctgaattcatcgacatcatcaactccgccaccgtgaagtccgcctaagatcttcaccccattcaccttcggcgtgggaagatgtctgaagaggatcatacctttttctgtgcttatgtaatgctagtagttttgtgctggagcagctactctttttcctccccttcacttccctgaagctacctgcagcttgagcaatgctaataatgcacaccactgaacatactaccataccaataatgtttagctccttttgtcgtgagttattatcatgtgagtttcagatcagatttcactggtcccttcacctaaaatagatggcatatcagtctgatgaatcaggcatcaattctggtttcgctgtctcttggtccgctaggtctagtctcgccgctgggttttgcccctgttgggccccacggttgatgccctgtggctgcctctccgccttggcccctcctgtttgggaatgttaaaaggataccggcttctcgactgtatatgaatttcagatatagatcgtattcgacgtcctagtcatcttatcgcacaaggggtctggtgtatgggacttcgttgtgagcgaaactcttttcgaatttattaatcctaatcatcctcaacctcctgttcaataaccacccagaccgctacctcaaattataagtttgctgtatataattcttttttctctgattacttatcgatccctgttagctactataggttgatactcatgttggctaatttttagtatattattcttgtactaagatgaagtctgtgtgtgagtaatgattgtgtcttatcatatagaagttgagt

SEQ ID NO: 35410 - DNA, 304 bp, Oryza sativa
  Clone ID: PAT_MRT4530_39332C.1
gtatccagtggtggagctagaattttaaagttgaatattcctgtcgaagcgctgagccgctggccgccactacccctcgcggccgccggccacccaaccggcctgaccgtctgagcttggcggagtggcgggcgccggccgccgccctccgcggtagcacggtccagctcgtgccgcctcgccacgccgccgcctagggtttggaaatggggagcggcgcgagggagccgagccagggagggatgggtcacggagggagagtgagagggggccgtgtggaagagtggtggctaagtgggtcaac

SEQ ID NO: 35411 - DNA, 140 bp, Oryza sativa
  Clone ID: PAT_MRT4530_39333C.1
tactaatctagaaaaggagcaaaacatgactaataggcatcatttcacatgacacacaaattaagcaaagatagaggccactcagtttatgacaatggtagcatgagtaacatgcaggcacagggattactaaacatgaa

SEQ ID NO: 35412 - DNA, 404 bp, Oryza sativa
  Clone ID: PAT_MRT4530_39334C.1
ttttaacgatgttctattgatagagctaaaaaaaattacaagattacaaccctggaagatcgtaaccaggaaaaaggaaaaaaataccaccacccacacacaaacagcgccaatacacaggtccgggagaaggctagcaccggaccagccgccgctaagtgtgacctaccaccgctagggcaacaaaggaacatagacgagatcgccaaaaaaacacccttacaaccaacacaaagcccaactctatcctagagcgtgcttgcatcaatcgttcgagaggtttcggcaaggggatgcttaaacaacgtctccaaggagagaagcgacaggaaaactgccgctgccgtccgtcagggtttcaaaagagccaagactgggcttttgcccggcaaccacccttatta

SEQ ID NO: 35413 - DNA, 3642 bp, Oryza sativa
  Clone ID: PAT_MRT4530_39335C.1
atgggtaacagccttcctgtagaatcgaagttcacttttgaagaagagaatgacagaattaagtatgttgtgtcgtctatgcaaggatgggctattctaaatcttgatgataccacgtccacgtctttctttggtgtttatgatggccatggaggagctgaagtagcattgtattgcgcaaaacaatttcacattgagctatgcaatcatgaagactatcacaacgatctgattaatgcactggacaatgtgtttttaagcatggatgagaacctgcaacagtccgatgcttggagagagttagttattcctcatgataatggatgtgactttgctttcaagaagaacaaagatttagatcgtgaaaaacaaatgctggatgacataactgatgacatggagtttcttgttattgcaagtcaaggtctctggtcttgcgtggacagtgcggacgtggtttcttacatacatgaccgtttatcggtggagggtgcagagctgcgtgtcatctgtgaggaggttgttgagttcggcttggcatcgggcgagaacactaccgtcatcctggttcagttcaagcccggcgccttccagtaccagctggtggatcccgctggatttggcactgccgtctctaacattgccagcaccagtgctgcgccggctggtgccagcgacacaagcgacgagggcgtcgatgacgctgccactgccaggcccaccgttatgggctacgacgcggactccagcaccggcagcgccgatgccacggtcgacagcgacgaggtcgatcccaacgccacggctgacagctacaatcccagggggcacgctgagatcgttgccagccacaccgacgacgaggtctacaccagcggcagtgccagggttgagagcggcgagctcgccgtccccactcccagcgccaacaacaccgtcgcggatgaggtcaaggtcgacgccgctgtcgtcgccggcggcagtaccaccgccatggctgctgacgaagccaccgtggtgtcgttgttgtcgaccatcgtggataactactactccattaacaccagcgaggagccagcgaggaggttgatcccactgccactgtcgcagccgacgacaagagcacgggagtataggggatgtgccaccgtcgatccgtcgtgccggaaggtggatggaaaaaggaaggaggcgcggccgtcgcgccggctcgaagcgaccataccggaaaacccgcgactccccaactccgacgagaacgacatggacgccggcggcgaggaggcgaagcaggagcgccacctggtgctggctcacgagctcttcctcctctcccgccccgacctcgacgacctcgccaatgtcgccctccgctccgatgccctcgacgccgtcaagtccgatggcatggcgccgctgttcgagtcgctggccaccgcgggcgtgctgctcaagccggacgacgcagctgctcgccgagatgcgcgcgcggatcgacgaggaggtccgcaagctcgacgagaaagcagtggcgtggaagccaaacagatgcgaggcggagtcgtcaagattggcagcgacgggacgcggcatacgagaagtcgagaagagaaaagattgatctggattcgactctcctcatgggcttacaacgttaactggactgttgtttggactgtgggtgcactatattgggccaaggggggtgcatatagggccgagatatggggggcgagaggaggaggaggagggcgtgtgctccatggggaccaccagccacagaacggggcactcctggagcgttggatcagctgcgagggacaatccgacggccgagatgcgtccagtgcagacatcacgagcactggaatcggcggatcacagcaagaccagcagcagcagcagcagcagcaggctgagggatccgtggggaccaccagccacaggatggggccactcctcgagcgttggatcagccgcgagggacgatccgacggaggagatgcgtctggtccagctattctaagtcttgatgataccacgtccacgtcattttttggtgtttatgatggccatggaggagctgaagtagcatcgtactgcgcaaaacgatttcacattgagctttgcaatcatgaagactatcacaatgatctcaccaacgcactggacaatgcgtatactgggccagcatatgaagggagcacagcatgtgtggttgtcatcagaggtgaccaaatgattgttggacatgctggtgactttgctttcaagcagaacaaagatttaaatcgtgaagaacaaatgttgatatgtgatcctgacatccacactcatgacataactggtgacatggaatttcttgttatagcaagtcaaggcctctggtcttgcatggaaagtgcggatgtggttgcttacatacatgtccgtttattggagggtgtagagctgcgtgtcatctgtgaggagcttgttcagtccggcttggcatcgggcgagaacacgaccgtcatcctggttcagttcaagcccggcgccttccagttccagtatgagctagtcgatcccgctgcctttgacactgccgcctctaacgttgccagcaccagtgccggcccggctggtggcagcgacagcgacacgagcgccacgagcgacgagggcgtcgacgacactgccactgccgggaccaccaccacgggctatgaggccggctccagcaccggccccggcagcggcggcggcagcgccaatgccgcgttcgacagcggcggcgacctcgccgctaacttggacatcgccactaacttcggcagcgacgacctcgccgctaacttggacatcgccacggacatcgacaccgaggacgtcttcaccttcatcaacagcgacgacacgttcggcatcaacagcgacgaggtggagctcgatcccaacttcaggcccaagcctcaggtccgcagggcccacgacggcccctctcccactcccagcgaaatcgaggccgacctcaatgccagccccacgaggtacaatatgagggatatcttcgaggccttcgacaaagtcgaggccgagttgggcggcttcccgttacagggccacgatgtctccagcaccagcaccaaccccaacaccgcgactgacactggcagtggcagccgcaccggcgacgatgacgtcgacggcgccattgccagagccatggccgtggctagcagcgtcatgacgggcgcgggctacgaggtcgactccaccaccaccaatcccagcgctgcggctgacactggcagctacaccggcgacgagatcaaggtcgacgacagcaccagcggcagtgccaggggtgacagcggcgagctcgtcaacaacgacaccaccgttgctgacaacaatgccagtggcgttgctgacagcaccaccgtcggcgacgaggtcgatcccactgccactgtcgcggccgacgacagcaacaccggcgacaaggtcgatccccctgccatcaccaaagccacggccgacagcaacaccagcggcgaggtcgacgtcgacgccactgccactgccactgccagcgccagcgccgccgtggctgatgacgagggcacggctcctgatgacagcgagggcagcccgtag

SEQ ID NO: 35414 - DNA, 408 bp, Oryza sativa
  Clone ID: PAT_MRT4530_39336C.1
cggcacgaggtgatgatatatcttgctgttttcaggcattttagttgctgagctgattcctaggaggcgcagtcacttaaagagatgtatggaatctgatcataaaaccataagtcctgacatgatcaagcatgtctcccaattttggtttaatgtggccgaggcaattagagaccagcattctgttgaaaggttggcggaagagatgctgcgcggggcttgcatcacaacatacaagcgatgaggaggcatactggattctgtggactttgtttaatcagagcttcatgcataaaactgttatgagggcaatgtttgttgacaaatttttgctttggcaaactttccctctatgttgtctgagatggattcttcactatgctgtctttgaattcccagcaaattcag

SEQ ID NO: 35415 - DNA, 652 bp, Oryza sativa
  Clone ID: PAT_MRT4530_39337C.1
tgcattcataattcatacaaaaattattaaaacaagatcgatcgatcgatcgatcaagagttgcatcccaaaataaataatccaccgcaaaagctacaggcgccagcctccaggtagcttcgctatagcccatcaaacaagcaagaaagggggagagaagggaaggagaggtcgtcgtcgccgtcgacgacgattcaccggccatgtgctgctgctgcggcggcggcggcgacggcgacggcgacggctgcaagtgccggccgctggggtggctgctgggtctgcctttcgcgctgctcgccgtcctcgtctccatcgtcggcgccatcatctggatcatcgggctgccgatctcgtgcatctgcccgtgctgcctgtgcgtgacgctggtgctggaggcggcggtggagctcatcaaggcgccgctccatgtcatgacctggttcacctccaagataccatgctagctatagcttcttgatttgctctaccatttgatcagatataaacagaatgatcagtaactgatcagtaagtataccgattatttattatttatttatgcatatgtactctggcttggagatatgattaatttgtcattccaatcgagattcattcggcgaaaaaaaaaaaaaaaaaaggctggttc

SEQ ID NO: 35416 - DNA, 1761 bp, Oryza sativa
  Clone ID: PAT_MRT4530_39338C.1
atggagttggctgctggcgaagatgctaatggactagatgcctccaattctgtgttcctcttcgtgggtgaagtgatatctcgtgttagccgtcgtggatctactggcattttagttgctgagctgattcctaggatccgtagtcacttaaagagatgtatggaatctgatcataaaaccataagtcctgacaagatcaagcatgtttcccaattttggtttaatgtggttgaggctattagagaccagcattctgttgaaaggttagagagtccaattgatttaatccggaagatggccagtgctattgcattgacattttctaaagttgttgatccaaacaatcctctataccttgatgataactgttgtgagaatgttgagtgggactttggggttttatctccgaaggaaatcacagccccttcaaaggatgtagaacttataagcaaactgaaaccatctttgcctgagaacaagaaacatgctggtgagagaagggcaaaggctattaaacatgatacttcagagaacagggcaaaaatcattgagatcaaatcactagattcttgtgaaacgtctggttctgctgtgaatgggcatttcgaagaggaagaatgtgatgaggaaataatgaacattgatgcctccagtgattcatccctggagccatatgatctgtcagacgatgactcagatttgcagaagaaattcacccaattaaaagatcttgctgctgcactacgaaaacctgatgatccagacggtgttgaaaacgctctgagttctgccgaaaagcttgtgagagcatcacctgatgaactacgccacaactcaggtgatcttgttagagcacttgtgcatgttcgatgttctgacgtggcaatggaaggagaggaagattctgctgaagaaaagagacagaaggcattagttgccttgctggtaacctgcacatttgaatcattagatgttctcaccaagttgctgtactcatcaagcgtggatgtaagtcagcgcattttgattattgatgttatgactgaggctgcacaggagcttgcggaaactaaaattgtaaggagagagctgcggcatggaaacttgatatccgacacctctccctcttggctagttcctagtgatcagggacctgctggtgcaggtccttggagggaagtctcagaatcaggaacacttctgaattggtcacaccggtatgaaagagaagttccatctagatctggtcaagttaaatcaggaaaatctcgtaaatggggtcttggaaaagctaaagatttgcagacagagtggtcaaaaaacagatttcctttatatgctgctgcttttatgctccctgttatgcaaggatatgataaaagatcacatggtgttgacttgctcaatcgggactttgttgtcctaggtaaattgatatacatgcttggtgtctgtatgaagtgcatggcaatgcatccagaagcatcagctgttgccccagctcttcttgatatgatcagatctagggctgtttcgcaacatcccgaagcatacgtcaggaggtctgtgttgtttgcagcttcttgcatactgatagcgctgcatccgtcgtatgttgcatcatctcttatagaaggaaatcaggatgtttctactggggcgaggtatccgtggggaccaccagccacaggatggggccactcctcgagcgttggatcagccgcgagggacgatccgacggaggagattcgtccggtccag

SEQ ID NO: 35417 - DNA, 221 bp, Oryza sativa
  Clone ID: PAT_MRT4530_39339C.1
agtcccctgcgccaatccgaacccaccatgccctagatcgccggccaccatctggtcccgtgccactcgcaaccagccatgaacccaacaccgccacatccgcgctgcttcagcctctgtctgccacgtggttcaagtctcgaaattcatctaaaatcgagatatatccaacaaaaaggctgtttatgctgaaggttcgaaagtcttcgcaggcctgcaag

SEQ ID NO: 35418 - DNA, 1575 bp, Oryza sativa
  Clone ID: PAT_MRT4530_3933C.1
atggatggccgccatcttctcctcctccatgtcctcgcgcttcttcttcttgcggtggtggtcgccgccggcggaggcgccgtcgtcggcagggacagcgcagtgcttcagctgcgcgagctgcaatggggctcgtccggccaggtccggtattcccaatcaaagcgctttgagaagaagatgacaggggaacacaagaaagcagcagcagcagcaagaacgaggactaggagcaccaccgtcctagagctgaagcaccactccctcaccgccatccccgaccaccccgccgcccaagaaacctacctccgccgcctcctcgccgccgacgaggcgcgtgccaactcgttgcagctccgcaacaaggcagcgttcacgcagtccggcaagaaggcgacggcggccgccgccgccgccgctggcgccgaggtccccctgacctccggcatccgcttccagacgctcaactacgtcaccaccatcgctctcggcggcggcggatcctcccgcgccggcgccggcaacctcaccgtcatcgtcgacaccggcagcgacctcacctgggtgcagtgcaagccgtgctccgtctgctacgcgcagcgcgacccgctgttcgacccgtccggctccgcctcctacgccgccgtcccctgcaatgcctccgcctgcgaagcctccctcaaggcggccaccggcgtgccgggatcctgcgccaccgtcggcggcggcggcggcggcgggaagagcgagaggtgctactactcgctggcctacggcgacgggtcgttcagccgcggcgtgctcgccacggacacggtcgcgctcggcggcgccagcgtcgacggcttcgtgttcggctgcgggctcagcaaccgcggcctgttcggcggcacggcggggctcatgggcctcggccggacggagctctcgctggtctcccagacggcgccccggttcggcggcgtcttctcctactgcctccccgccgccacctccggcgacgccgcgggctccctctccctcggcggcgacacctcctcctaccgcaacgccacgccggtgtcctacacccgcatgatcgccgacccggcgcagccgccgttctacttcatgaacgtgaccggcgcgtccgtcggcggcgccgcggtggccgcggcggggctcggtgccgccaacgtcctcctcgactccggcacggtgatcacgcgcctcgcgccgtcggtgtaccgcgccgtgcgcgccgagttcgcgcggcagttcggggcggagcgctacccggcggcgccgcccttctcgctgctcgacgcgtgctacaacctgaccgggcacgacgaggtgaaggtgccattgctgacgctgcgcctcgagggcggcgccgacatgaccgtcgacgctgccgggatgctgttcatggcgaggaaggatgggtcgcaggtgtgcttggccatggcgagcctctcattcgaagaccagacgcccattattggcaactaccagcagaagaacaagagggtagtgtatgacactgtgggctcaaggctaggctttgctgatgaggattgtagctatgcataa

SEQ ID NO: 35419 - DNA, 4437 bp, Oryza sativa
  Clone ID: PAT_MRT4530_39340C.1
atggcgagcaacccaagcagctccgcggcgggcggcggcggcgaccatggtggcgcgcgcctcgaagacctagcactggacaaggtggcggaggcggccgacgcggtcgccgccgcgtcgagcgccggcgaggtcgtccgcgcgatccacgccgtcgcggccatcgtcttccccgtcgactccgctaccgtagccggtaccgtggacgaacccttcaggagccagattattaatggtgtaagcctcagcagtgatgaacggggatcttggaggcatgctttttgccatggtccagcgtttcctactctatctaagattttgcttggccatgttgccttgaagtggttacatcagattcgtgcctgtgcaaggaaggaaatctgtgattccttttttgtcaaaggatctccaactgaagtcattcaagctcttgttcctgctttgtctcataaacttcttgttgcaactgaacaagcggctatggagttggctgctgacgaagatgctaatgggctagatccctctaattctgtgttcctcttcgtgggtgaagtgatatctcgtgctagccgtcgtggatctactggcattttaggtgctgagctgattcctaggatccgtagtcacttaaagagatgtatggaatctgatcataaaaccataagtcctgacaagatcaagcatgtttcccaattttggtttaatgtggttgaggctattagagaccagcattctgttgaaaggttggcggaagagatgttgcgccaacttgcatcacaacatacaagcgatgaggaggcatactggattctgtggactttgtttaatcagagcttcatgcacaaaactgtttttgagtttatccacattggttcatctgtgtctggcatgctacatttatctgtgaaggaaaaagtacttctgagggcaatgtttgttgacaaatttttgcgttggaaaacattccctctatgttgtctgagatggattcttcactatgctgtctttgaattgccaccaaattcaggcatagaaacacagaagcaaaggacatcgagcttccttgcaattgggttgtgtttggagaagatgtcaaaaagagaattagaaacaactaaagatgtattgaacaatattcttgaaggtgtaagctgtaggttagagagtccaattgatttaatccggaagatggccagtgctattgcattgacattttctaaagttgttgatccaaacaatcctctataccttgatgataactgttgtgagaatgttgagtgggactttggggttttatctccgaaggaaatcacagccccttcaaaggatgtagaacttataagcaaactgaaaccatctttgcctgagaacaagaaacatgctggtgagagaagggcaaaggctattaaacatgatacttcagagaacagggcaaaaatcattgagatcaaatcactagattcttgtgaaacgtctggttctgctgtgaatgggcatttcggagaggaagaatgtgatgaggaaataatgaacattgatgcctccagtgattcatccctggagccatatgatctgtcagacgatgactcagatttgcagaagaaattcacccaattaaaagatcttgctgctgcactacgaaaacctgatgatccagacggtgttgaaaacgctctgagttctgccgaaaagcttgtgagagcatcacctgatgaactacgccacaactcaggtgatcttgttagagcacttgtgcatgttcgatgttctgacgtggcaatggaaggagaggaagattctgctgaagaaaagagacagaaggcattagttgccttgctggtaacctgcacatttgaaccattagatgttctcaccaagttgctgtactcatcaagcgtggatgtaagtcagcgcattttgattattgatgttatgactgaggccgcacaggagcttgcggaaactaaaattgtaaggagagagctgcggcatggaaacttgatatccgacacctctccctcttggctagttcctagtgatcagggacctgctggtgcaggtccttggagggaagtctcagaatcaggaacacttctgaattggtcacaccggtatgaaagagaagttccatctagatctggtcaagttaaatcaggaaaatctcgtaaatggggtcttggaaaagctaaagatttgcagacagagtggtcaaaaaacagatttcctttatatgctgctgcttttatgctccctgttatgcaaggatatgataaaagatcacatggtgttgacttgctcaatcgggactttgttgtcctaggtaaattgatatacatgcttggtgtctgtatgaagtgcatggcaatgcatccagaagcatcagctgttgccccagctcttcttgatatgatcagatctaggtatgccaagcctaaaacaagcatttccgtgttaaagactttcttagttataaccaagtgggctgtttcgcaacatcccgaagcatacgtcaggaggtctgtgttgtttgcagcttcttgcatactgatagcgctgcatccgtcgtatgttgcatcatctcttatagaaggaaatcaggatgtttctactggtttggaatggatacgcacatgggctcttcatgttgcagaaacagatcctgatacagaatgcacatcattgatgatgatgagtaaaagagaattggacgagtcatgcaggggcgaggtatccgtggggaccaccagccacaggatggggccactcctcgagcgttggatcagccgcgagggacgatccgacggaggagattcgtccggtccagcacaaccacttttccgcatctctctctctctcgcgtctcaagagcagcggcaaagcaaagcaagttccgctatgggtaacagccttcctgtagaatcgaagttcacttttgaagaagagaatgacagaattaagtatgttgtgtcgtctatgcaaggatggggtgagaaaatggaagatgctcatgcagctattctaaatcttgatgatgccacgtccacgtctttctttggtgtttatgatggccatggaggagctgaagtagcattgtattgcgcaaaacaatttcacattgagctatgcaatcatgaagactatcacaacgatctgattaatgcactggacaatgtgtttttaagcatggatgagaacctgcaacagtccgatgcttggagagagttagttattcctcatgataatggatgtatgtattttctcaaggctggtgtctgtgctaagcctttcccacaggcgacatatactgggccagcgtatgaagggagcacagcatgtgtggttgtcatcagaggtaaccaaatgattgttggacatgttggtgattctcgttgcgtactctcaagacagggtggcctggctattgatttatccttcgatcacaaaccatgcacaagaactgagtctgaaagagagagagttcaaaatgcaggagggagatctcttggacttaggtgtgaacaagtaatggggaattatgtagtcaaggaacaatgggtcctcggtgattttgggggaggtgactttgctttcaagaagaacaaagatttagatcgtgaaaaacaaatgctggtatgtgatccggacatcctcgctgatgacataactgatgacatggagtttcttgttattgcaagtcaaggtctctggtcttgcgtggacagtgcggacgtggtttcttacatacatgaccgtttatcggtggagggtgcagagctgcgtgtcatctgtgaggaggttgttgagttcggcttggcatcgggcgagaacactaccgtcatcctggttcagttcaagcccggcgccttccagtaccagctggtggatcccgctggatttggcactgccgtctctaacattgccagcaccagtgctgcgccggctggtgccagcgacacaagcgacgagggcgtcatggccgactcctgcgccacggctgacaccagcggcagtgccagggctgagagcggcgagctcgtccccactcccagcgccaacaacaccgtcacggatgaggtcgatcccactggcactgtcgcagccgacgacaaggtcgatcccaactccagcgccaatgccgacgctgacgacggcgctcccaaaccttctctcggcgcagtcatcgagtccgacgaggtcgccctcgatgccactgcaacgggccatcaggtggccgtgcgtcagcaggaggaattcgacccaaagaagtgttggatctgcggaaaaggctacaagaagattcttcttgaaccttcttcggccagggcgagaaacccacttctggctcacgctaagacgtgtgagtcggaagacaagaaggcgaagaagaagataaccaagtatatgatgaaagccaacgtcaccaaccagtatcattga

SEQ ID NO: 35420 - DNA, 616 bp, Oryza sativa
  Clone ID: PAT_MRT4530_39341C.1
gggatgtgccaccgtcgatccgtcgtgccggaaggtggatggaaaaaggaaggaggcgcggccgtcgcgccggctcgaagcgaccataccggaaaacccgcgactccccaactccgacgagaacgacatggacgccggcggcgaggaggcgaagcaggagcgccacctggtgctggctcacgagctcttcctcctctcccgccccgacctcgacgacctcgccaatgtcgccctccgctccgatgccctcgacgccgtcaagtccgatggcatggcgccgctgttcgagtcgctggccaccgcgggcgtgctgctcaagccggacgacgcagctgctcgccgagatgcgcgcgcggatcgacgaggaggattccaaattgacccctactggcctcctaattctacaatgggcgacggcgacagcgacagtgagctgccgagggcgacggccgacggcggcgcgtcacgatgccgagatgggcaagtgttgtctgggagactgggattggctgattgcagagcagtggcgtggaagccaaacagatgcgaggcggagtcgtcaagattggcagcgacgggacgcggcatacgagaagtcgagaagagaaaagattga

SEQ ID NO: 35421 - DNA, 586 bp, Oryza sativa
  Clone ID: PAT_MRT4530_39342C.1
atgtcgacctccgccagccctccgagagcatcaaccgtcgagtacgttgagcatctttctcatcagatagcagtccctagcataaccgatgaacatcaaattttccttggcccagtcagcaatccagatcccacagagttcatcaatggtgaaaccaatcgaatcccctttagattcgccaacccagatctgagcctttggaagaacaccttcaaatcttggccatcagccgagaagagctggcccgcttggtacatgagaatgtcggctagcaaactaacccattgagaagaaattggcatatctcaagctttagccctaactgtggcagatatggccaaggaagaacctatgatggtagctgcaacctatttctggtccactgctatgaatgcttttcttttctctcaaggacccatgaccccaactctcttggatattaaaatgataacaggcctagatatcacttcatcggctaacttggccagtttgaataccaaatccacccatgagttcaaaactagaagcatatgtggttggacaggttatgctgcaaagaacatggttactggatcgatttctacta

SEQ ID NO: 35422 - DNA, 635 bp, Oryza sativa
  Clone ID: PAT_MRT4530_39343C.1
gagggtgcagagctgcgtgtcatctgtgaggaggttgttgagttcggcttggcatcgggcgagaacactaccgtcatcctggttcagttcaagcccggcgccttccagtaccagctggtggatcccgctggatttggcactgccgtctctaacattgccagcaccagtgctgcgccggctggtgccagcgacacaagcgacgagggcgtcgatgacgctgccactgccaggcccaccgttatgggctacgacgcggactccagcaccggcagcgccgatgccacggtcgacagcgacgaggtcgatcccaacgccacggctgacagctacaatcccagggggcacgctgagatcgttgccagccacaccgacgacgaggtctacaccagcggcagtgccagggttgagagcggcgagctcgccgtccccactcccagcgccaacaacaccgtcgcggatgaggtcaaggtcgacgccgctgtcgtcgccggcggcagtaccaccgccatggctgctgacgaagccaccgtggtgtcgttgttgtcgaccatcgtggataactactactccattaacaccagcgaggagccagcgaggaggttgatcccactgccactgtcgcagccgacgacaag

SEQ ID NO: 35423 - DNA, 946 bp, Oryza sativa
  Clone ID: PAT_MRT4530_39344C.1
cggcacgaggccacttttccgcatctctctctctctctcgtctcaagagcagcggcggaaggtgagagcaaagcaagctccgctatgggtaacagccttcctgtagaatcgaaggtcactgttgaagaagagaatgatagaattaagtatgtcgtgtcatctatgcagggattgggtgataaaatggaagatgctcatgcagctattctaagtcttgatgataccacgtccacgtcattctttggtgtttatgatggccatggaggagctgaagtagcatcgtactgcgcaaaacaatttcacattgagctttgcaatcatgaagactatcacaatgatctcactaacgcactgaacaatgtgttttttagcatggatgagaacctgcaacaatccgatgcttggagagagttagttattcctcgtgataatggatggatgtattttctcaaggctggtatctgtgctaacttttggcctttcgtgcagtgtgcatattgtatctatgaaaaaggaaatggaagaatgtatgtgatatcgagactgttgttctttcttgagatgtactttggagttggaagagatatgtttaaccctaacctcgactaattgctcctattaaaaaaggttcaattagttacatatcaattggctggtttactgagttggaggccaacaggttcttaagttctcattgcaccttggttcttatcatactatgctatccaaattgaggcgacatatactgggccagcgtatgaagggagcacagcatgtgtggttcagtggttgtcatcagaggtaaccaaatgattgttggacatgttggtgattctcgttgcgtactctcaagacagggtggcctggctattgatttatccttcgatcacaaaccatgcacaagaactgagtctgaaagagagagagttcaaaatgcaggagggag

SEQ ID NO: 35424 - DNA, 4946 bp, Oryza sativa
  Clone ID: PAT_MRT4530_39345C.1
ggccgcttttttttttttttttttggcattcgacattcttaattccttcaattatttttttggtatctcaaacacatcttctctaacaaaagttcatttgcaaattttgatattctcaaacataccccaaaattttatcttagccaacggcagtcaagccgggtaaaactgttatttctcctccaaacaaaaccccctaattactcttgctccaaaacctccccttctcaagcgctctctcttaggttcgtcgtgtgtttcccttcaccctcccatggcgagcaacccaagcagctccgcggcgagggctgcgggctcccagggcggcggccatggtggcgcgcgcctcgaagacctagcactggacaaggtggcggaggcggccgacgcggtcgccgccgcgtcgagcgccggcgaggtcgtccgcgcgatccacgccgtcgccgccctcgtcttccccgtcgactccgctgccgtagccggtaccgtggacgaacccttcaggagccagataattaatggcgtaagcctcagcaatgatgaacggggatcttggaggcatgctttttaccatggtccagcatttcctactatatctaagattttgcttggccatgttgccttgaagtggttacgtcagatccgtgcctctgcaaggaaggaaatatatgattcgttttttgtcaaaggacctccaactgaagtcattcaagctcttgttcctgctttgtctcacaaaggaggctctaaggaagatcataacattatgtgttcaaatattgaaaggctgttaattctatgtttggtcgagaataagggggtcagccagattattgcagagtttactcttcttgttgcaactgaacaagcggctatggagttggctgctggcgaagatgctaatggactagatgcctccaattctgtgttcctcttcgtgggtgaagtgatatctcgtgttagccgtcgtggatctactggcattttagttgctgagctgattcctaggatccgtagtcacttaaagagatgtatggaatctgatcataaaaccataagtcctgacaagatcaagcatgtttcccaattttggtttaatgtggttgaggctattagagaccagcattctgttgaaaggttggcggaagagatgttgcgccaacttgcatcacaacatacaagcgatgaggaggcatactggattctgtggactttgtttaatcagagcttcatgcacaaaactgtttttgagtttatccacattggttcatctgtgtctggcatgctacatttatctgtgaaggaaaaagtacttctgagggcaatgtttgttgacaaatttttgcgttggaaaacattccctctatgttgtctgagatggattcttcactatgctgtctttgaattgccaccaaattcaggcatagaaacacagaagcaaaggacatcgagcttccttgcaattgggttgtgtttggagaagatgtcaaaaagagaattagaaacaactaaagatgtattgaacaatattcttgaaggtgtaagctgtaggttagagagtccaattgatttaatccggaagatggccagtgctattgcattgacattttctaaagttgttgatccaaacaatcctctataccttgatgataactgttgtgagaatgttgagtgggactttggggttttatctccgaaggaaatcacagccccttcaaaggatgtagaacttataagcaaactgaaaccatctttgcctgagaacaagaaacatgctggtgagagaagggcaaaggctattaaacatgatacttcagagaacagggcaaaaatcattgagatcaaatcactagattcttgtgaaacgtctggttctgctgtgaatgggcatttcggagaggaagaatgtgatgaggaaataatgaacattgatgcctccagtgattcatccctggagccatatgatctgtcagacgatgactcagatttgcagaagaaattcacccaattaaaagatcttgctgctgcactacgaaaacctgatgatccagacggtgttgaaaacgctctgagttctgccgaaaagcttgtgagagcatcacctgatgaactacgccacaactcaggtgatcttgttagagcacttgtgcatgttcgatgttctgacgtggcaatggaaggagaggaagattctgctgaagaaaagagacagaaggcattagttgccttgctggtaacctgcacatttgaaccattagatgttctcaccaagttgctgtactcatcaagcgtggatgtaagtcagcgcattttgattattgatgttatgactgaggccgcacaggagcttgcggaaactaaaattgtaaggagagagctgcggcatggaaacttgatatccgacacctctccctcttggctagttcctagtgatcagggacctgctggtgcaggtccttggagggaagtctcagaatcaggaacacttctgaattggtcacaccggtatgaaagagaagttccatctagatctggtcaagttaaatcaggaaaatctcgtaaatggggtcttggaaaagctaaagatttgcagacagagtggtcaaaaaacagatttcctttatatgctgctgcttttatgctccctgttatgcaaggatatgataaaagatcacatggtgttgacttgctcaatcgggactttgttgtcctaggtaaattgatatacatgcttggtgtctgtatgaagtgcatggcaatgcatccagaagcatcagctgttgccccagctcttcttgatatgatcgagatctaggtatgccaagcctaaaacaagcatttccgtgttaaagactttcttagttataaccaagtgggctgtttcgcaacatcccgaagcatacgtcaggaggtctgtgttgtttgcagcttcttgcatactgatagcgctgcatccgtcgtatgttgcatcatctcttatagaaggaaatcaggatgtttctactggtttggaatggatacgcacatgggctcttcatgttgcagaaacagatcctgatacagaatgcacatcattgatgatgatgagtaaaagagaattggacgagtcatgcaggggcgaggtatccgtggggaccaccagccacaggatggggccactcctcgagcgttggatcagccgcgagggacgatccgacggaggagattcgtccggtccagcacaaccacttttccgcatctctctctctctcgcgtctcaagagcagcggcaaagcaaagcaagttccgctatgggtaacagccttcctgtagaatcgaagttcacttttgaagaagagaatgacagaattaagtatgttgtgtcgtctatgcaaggatggggtgagaaaatggaagatgctcatgcagctattctaaatcttgatgatgccacgtccacgtctttctttggtgtttatgatggccatggaggagctgaagtagcattgtattgcgcaaaacaatttcacattgagctatgcaatcatgaagactatcacaacgatctgattaatgcactggacaatgtgtttttaagcatggatgagaacctgcaacagtccgatgcttggagagagttagttattcctcatgataatggatgtatgtattttctcaaggctggtgtctgtgctaagcctttcccacaggcgacatatactgggccagcgtatgaagggagcacagcatgtgtggttgtcatcagaggtaaccaaatgattgttggacatgttggtgattctcgttgcgtactctcaagacagggtggcctggctattgatttatccttcgatcacaaaccatgcacaagaactgagtctgaaagagagagagttcaaaatgcaggagggagatctcttggacttaggtgtgaacaagtaatggggaattatgtagtcaaggaacaatgggtcctcggtgattttgggggaggtgactttgctttcaagaagaacaaagatttagatcgtgaaaaacaaatgctggtatgtgatccggacatcctcgctgatgacataactgatgacatggagtttcttgttattgcaagtcaaggtctctggtcttgcgtggacagtgcggacgtggtttcttacatacatgaccgtttatcggtggagggtgcagagctgcgtgtcatctgtgaggaggttgttgagttcggcttggcatcgggcgagaacactaccgtcatcctggttcagttcaagcccggcgccttccagtaccagctggtggatcccgctggatttggcactgccgtctctaacattgccagcaccagtgctgcgccggctggtgccagcgacacaagcgacgagggcgtcatggccgactccagcgccacggctgacaccagcggcagtgccagggctgagagcggcgagctcgtccccactcccagcgccaacaacaccgtcacggatgaggtcgatcccactggcactgtcgcagccgacgacaaggtcgatcccaactccagcgccaatgccgacgctgacgacggcgctcccaaaccttctctcggcgcagtcatcgagtccgacgaggtcgccctcgatgccactgcaacgggccatcaggtggccgtgcgtcagcaggaggaattcgacccaaagaagtgttggatctgcggaaaaggctacaagaagattcttcttgaaccttcttcggccagggcgagaaacccacttctggctcacgctaagacgtgtgagtcggaagacaagaaggcgaagaagaagataaccaagtatatgatgaaagccaacgtcaccaaccagtatcattgatactgtacgttaactacttgcacctgtacgttaactactttgcttttggtgaagttttcctcattcttctagctctatgtgatacgttttggttttaaatcgattcatgcattg

SEQ ID NO: 35425 - DNA, 246 bp, Oryza sativa
  Clone ID: PAT_MRT4530_39346C.1
agtggatccccgggctgcaggctctctcaccccttctcggcggctgcggcggctggcggcggcgaggtgtctccgacgaaaacctagcacgcatctcttcccctctttcccatgcttgttctgccttttgggtgttcaggatagaccacagagctacgcgggttcagcaagcaaggggcagcgggtcatgcattttagccaagtcatgtcgcagcagggcagttgcatggcacagctcgcatcgcg

SEQ ID NO: 35426 - DNA, 570 bp, Oryza sativa
  Clone ID: PAT_MRT4530_39347C.1
atgcagccagacaagccaacggccgggccagcgcccggcgtccccgtcggctccgctccctggtcgtctggcctctgcgactgcttcgacgactacggcctatgtacgtacgttctcgccgccgcggcgcgcgcctccggccacaccataccatggcaagcatgcataggccgggacgaaagatcccagcccctgaaaggccctgttagaaggttgcatgacatggtggtgtccgtgcatcacgttcgggagggtggcggagatcgtggacagggggtcgacgtcgtgcggccacagcggcgcgctctacgtgtttctggccgtgatcaccgggttccagtggatgtacctgcacctaccgcggcaagatgcgcgcccagtacggcctctccggcgagccctgcggcgactgctgcatccactgctggtgcgagccatgcgcgctcatccaggagtacagggagctcgccgcgcgcggctacgaccccaagcttgggtggcacctcaacatggagcgccgcgccgccgccgccgccgcgcccgccgtgcaacacatgggacgctagctag

SEQ ID NO: 35427 - DNA, 279 bp, Oryza sativa
  unsure (1)..(279): unsure at all n locations
  Clone ID: PAT_MRT4530_39348C.1
caatcctaactctatggtaagccacattgcaggaaagagttccatcttccgtgctctcccaaatgatgttctagcaaatgcatatcgcatctcaagagaagaggctcanaggctcaagcataatagaggaatgagttcgggcatcactccaaccaaacagagctaccagacgttatatgcgcagaatctctagtcggtgcgataagatactaataaataatgcagcaatgtttgctgctatgactgccagcttcgactaatgatgataagccttcttat

SEQ ID NO: 35428 - DNA, 324 bp, Oryza sativa
  Clone ID: PAT_MRT4530_39349C.1
atcattacagataatggcacccaatttactggtggagtgtttaaagacttctgcgaagattttggtatcaagatttgttacacatctatagcacatcctatgagcaatggacaggttgaacacgccaatgcaaatgggctgatcagctgccataagttctttggtctcttcgcactacacccagtcggcctatgggccaatcaccaggagcgctacgaagacgaccgagtaaatgatctcaaccgactggaagaagcccgagaagcagcattaattcagtcggctcggtatttacaaggattgcggcgctatcacaatcgcaat

SEQ ID NO: 35429 - DNA, 2998 bp, Oryza sativa
  Clone ID: PAT_MRT4530_3934C.1
cagatactcttttagaacttaagcgaaattattcgcacaaaaactgcggagattcgcaccagatcgaaaacaggccatacgagaagagatcgataagcttcttaaagctggcttcatcagagaggtactctatccagaatgactagccaacccagtcatggtgcagaaggccaacgggaagtggaggatgtgcgtcgacttcaccgacctcaacaaggcgtgtcccaaggatcacttccctcttcctcaaatagaccaactggtggactcaacagctggttgtgagttgttaagttttcttgatgcttactccggctaccaccaaatcagtatggcgaaagaggacgaggagaagacatcattcatcacgccgttcggtgtattctgctacgttaagatgccatttggactgataaccacaggaaacactttccaacgcacggtccaaggggcacttaacgatcagcttgggaacaatgtcgaggcctacatcgatgacattgttgtcaagatcaagacaagcgactcattgattgacgatctgcgggaaacgttcgacaacctccgacgatattgcctcatactcaatccagagaagtgcacgttcggagtaccatcgggcaagctgctcgggttccttgtctctggaagaggaatagaagcaaatcccgagaagatcaaggcaatcaagaacatgaagtcacccacaagactcaaggaagtacagaaactaactggatatatggcggcactaagtaggtttgtcgctaggatgggagaacgaggacaacctttcttcgccctgctaaagaaacacgacaaatttgtatggacacaggaagccgaagaggcatttatcgcagttaagcgctacctgtcaaatccccctgtacttgttgctccccaacctaatgaagaattattcctctatattgccgccacgccatactccgttagtactgtcattgttgtcgagagagagaaggtgcaaagaccagtctattacatcagcgaagctctccacgacgtgaaaacaagatacccatagatccaaaaactactctatgcagtaatcatgatgtcaagaaagctacgccactacttccaagcacacaaggtcacagttgtttcctccttccctcttggtgaagtcgtgagaaacaaagacgttgttggccgcattgcgaaatgggtagtcgagctaagctagtttgatgtccattttgtgccacgaacagccatcaagtcccaggttctggccgactttgtagccaattggactatgcctgaaaacaggtcagacagtcaaatcgacaacgaaacatggataatggcgttcgacggcgcactcaacagccaaggagtaggggcagggttcatcttgacatcaccttcgggagatcagttcaagcatgcaattcacctcaacttcagggcgaccaacaacactgcagaatacgaaggactactcgctgggataagagcagcaactgtacttggagtcaagcgactgatcgtaaaaggggattccgaactagtcgcaaaccaggtgcacaaagactacaagtgctctagccccgagttatccaagtacctcgcagaagttaggaagctagaaaaaagatttgatggaatcgaggtccgacacgtataccgcaatgacaacatcgaaccggacgatctagcaaggcgtgcgtccagacgggagccactcgaacctggcaactttttggacgtcctgacaaagccatcagtgaaagaggcaaacaatgaagatagcctagtcgcccccgacatcagctcgggggctatagaggcagagcgcgccgttgccgacatcgagaccatagacgactggcagatcccgctcattaaattcataagtagcgacgagttgcccgaggacgatgcagaagccgagaaaataacccgtcaagccaaaatctactgtatgatcgacaacgacctatacaagaaggcgccaaacggggtacttgtcaaatgcgtctcgttcgacgacggcaaacatctcctcctcgacatacacgaagggatctgtgggtcgcatgtcgccggtcgcacattggtcggaaaagcttttcgacaagggtttttttggccgattgccctcaaagatgcttgcgacatgtaaacacactaagctaccagtgcaagcgcttcagactatccctcttacttggccgttctcgtgctgggggctcgacatactcagaccattcccacgaggacaaggcggctacaggttcctattcatggcgatcgacaaattcactaagtggattgaagcgacacccacgggggaaatcaaggccaacaacgccatcaaattcatcaaagggatattctgcagatatggattgcctcaccgcatcataacggacaacggctcccagttcatctgtgccgacttccaggattactgcatcaggctaggagtcaagatctgcttcgcctcggtttctcaccctcagtttaatggacaggttgagagggcaaacgacatagtactacaaggaatgaagaccctactataggccgtgcgtaccacaccgacaacgtccaacaaggagacacctttcttcctcgtgtacgctcatgggccatgctccccactgagctacgacatcagagtacacgagtatagaagtacttcgatgagaatcaggaggagcagcgaaacgacgatgtcaacctactcgaggaacatcgagaaagagtcgccgtcagagcagccagctaccaacaggccctccgccgataccacgagaagcgcatcagagcacgcacactttcgatcggtgactacgtcctccgacgggttcaaagccaagcagggcgaaacaagctctcacccaaatgggaaggaccgtacacgatcacgcatgtcttgcggccaggcacattcaagattgcagacggcgatggtcgagagttggcaaattcttggaacattgatcaattacgtaaattctatgta

SEQ ID NO: 35430 - DNA, 216 bp, Oryza sativa
  Clone ID: PAT_MRT4530_39350C.1
atggaggttgcagtgcgagagattgctacgtactggttcgaggaccagcgagcgagtagaattatctctcaaacaccaatggaggttgcggtgcgagagattgctatgtattggttcgagaaccagcgagcgagtagaattatgtctcgaaaaccaatggacgtttgcggtgcgagagattgctacgtactggttcgaggaccagcgaacgtgtag

SEQ ID NO: 35431 - DNA, 384 bp, Oryza sativa
  Clone ID: PAT_MRT4530_39351C.1
gctactgtatattactgacaaaactgccgttgcacctgcactttcagtatggatggtgattgctccaattgtctggaagggagggcaggtcggctcatcgccagagggcacatgacacaaggagaacaaatcagaattcagaaatggagcttcgtcagatgatgcagcgataaatacttggtcagcgacaaacacgtacgtagctgcaggctgcatgatcagggagatgtacaggatgagaagaacagttttgctttcgttgcagctgcacaccacttttcctccgcatcccacatttcctcggtttgttttttttcgtttctttaccactccactttccgtgtttcttttttctcttttccatctcatccgtgcttcatccat

SEQ ID NO: 35432 - DNA, 1326 bp, Oryza sativa
  Clone ID: PAT_MRT4530_39352C.1
atggcggcgtttctggtatggattctcctcttgttaccgtacgttgccatttcgtccacggcgagccatggcgttcgtcttgagctcacgcacgccgacgaccgcggcggctatgtgggggctgagcgcgtccgccgcgccgccgaccggagccaccgccgcgtgaacggcttcctcggcgccatcgaggggccgtcgtcaacggcgaggctggggagcgacggtgccggtgctggtggcgcagaggcctccgtgcacgccagcacggcgacgtacctcgtcgacatcgccatcgggacgccgccgctcccgctcaccgcggtgctcgacacgggcagcgacctcatctggacgcagtgcgacgcgccgtgccggaggtgctttccgcagccggcgccgctgtacgcgccggccaggtccgcgacgtacgccaacgtgtcgtgccgctcgccgatgtgccaggcgctccagagcccgtggtcccgctgctcgccgcccgacacgggctgcgcgtactacttctcctacggcgacggcacctccaccgacggcgtcctcgccaccgagacgttcacgctcggctcggacaccgccgtgcgcggcgtcgccttcgggtgcgggacggagaacctcggcagcacggacaactcctccggcctggtcggcatggggagaggcccactgtcgctggtgtctcagctcggcgtcaccaggttctcctactgcttcacgcccttcaacgccaccgcggcgagcccgctcttcctcggctcgtcggcgcgcctctcgtccgccgccaagaccacgccgttcgtgccgagcccgagcggcggcgcgcggaggcggagctcctactactacctctccctggaagggatcaccgtcggcgacaccctcctcccgatcgacccagccgtgttccggctcacgccgatgggcgacggcggggtcatcatcgactccggcacgacgttcaccgcgctggaggagcgcgcgttcgtggcgctggcgcgcgcgctcgcgtcgcgcgtgcggctgcccctggcgagcggcgcgcacctcggcctcagcctctgcttcgccgcggcgtccccggaggccgtggaggtgccgcggctggtgctccacttcgacggcgccgacatggagctgcggcgggagagctacgtggtggaggaccggagcgccggcgtggcgtgcctcgggatggtgagcgcgcgggggatgtcggtgctcggcagcatgcagcagcagaacacgcacatcctgtacgacctcgagcgaggcatcctatccttcgaacctgccaaatgcggcgagctttag

SEQ ID NO: 35433 - DNA, 579 bp, Oryza sativa
  Clone ID: PAT_MRT4530_39353C.1
aatgtcatcctgaatttaaaattgcttacgtgtattcaatattcatatattatgtaatttaatttgcaaaaatatttctgtctatggatatacttctcctgtcccaaaataaatggatctctcgcattccaaggaaactttagtagggagggtaaaacactaaaatgcccctcgatgagaaattagtattagtgggtgggtaggtaaggagtattgaagggatacgatttcttgatttgtggaccaagggtaggtaagagcctactccattccaaaatataaacatgtctaggattcaaaaagtgtaccacaacataagcatttttaggacactgattccagtgcatggatatcaaagcattttcaatcatcaggagcttgggaagggaatctaagcaattcaaaatttgaccaatgaggtgattgaaaagaaatcttttccctcaaccttaatctttgccaaacaacttattttgggacaaattttgaactctagaaatcaatttattttgggatgagtacctttgaatatttcagttctcaatgagactatcacctaatatttaggtggtatacata

SEQ ID NO: 35434 - DNA, 306 bp, Oryza sativa
  Clone ID: PAT_MRT4530_39354C.1
tcaagtgcgtactgtcctcttgctgaaatggcatttcagcctttcagctatgtaatccgggatggaaaattttgtttgattctgcttgccacgggcgtcgtcaatgtcggacagcagctgcgcgaacgcggcgcgcgacgagccgccgtctttccaggccatggccgtggcttccctgtgcgcctcgacgcggtctctcagcttccttccttgctcggactccatgaccagcctcaccttcgcctccacctcgccggcggtgacacgcccttccagccatccctccatctccacgccgacgcccat

SEQ ID NO: 35435 - DNA, 1667 bp, Oryza sativa
  Clone ID: PAT_MRT4530_39355C.1
ccaagaagagctgcagcaactcaacaggtatgtacatctgacatttattgctcacggtgtcgggcgtgtagcacgccccgctcggctggatcgacccgcactccgcccccgacccgcacgcgtagtccatcgcctcctgcattatcgggtccggcaccgtcggcttcgccacgcaccacagcgcctcccccgcccccggcgccgccggcggcgccagcggcggcgggtacactatcggcggcaagaaccctccccctcctcccccgccgccgctgttcccgcctcctccgctgctcccgcctccaccattgctcccgcctccaccgctactgccgccaccgccaccaccctcgccgccactgccgccgccgccaggcccaccacctacaccaccaccgccaccgccctcgcctccactgccgccacctacaccgccgccgccctcgccgccgctgccgccacctaaaccgccgccgccgggtccgcctcctcctcctcctcctcctcccctttcgcccctgcccacatggccgaccacgtggcagccacctcagccccgggcccgcttgaccgggtcaagtcgcgcccagtcagcatcctccctccgtcttccctcccccgccgccatccgtccacccggcgcgccgcgcccgaaccacgcgcacctgaaaccctagcacccgcccccgcgtgcgccctccccaccgtgaacccgaccaccgccatgtgggtcccgcgcggtggaccgcgtccacccgcgtcggcctctctctccccgcgccccctctcctgggccgcccctcccgcgcccgcgccggcccattaggtccggcccagccgcataaacccctcgggctgcacctaagccgcccccatggccgccgccaagaacggccgcattgccctcctcctcgccgcgctcgccctgtccgctcagctcgcgccggccgccgcgacgtggtgcggctccaactgcccgacgacgaagccgcctccgccaccgtgccagccgccaccgccgacgccgacgcccgcgaccccaacgacgccgccgactccgtggactccgccgcctgcaacgccgacgccgccgacgccgactccgtggactccgacgcctgcgacgccgccgccaacgccggcgacgcccgcgactccgacgacgccgccgacgccggcgccggcgccgccaccgccggcgacacctgctgcccgctgctgtccggcgtcgccgacctcgacgccgcgctctgcctctgcaccgccatcaaggccaaggcgctcggcctcagcctcgtcctcccccgagatcgccatggccgccgccgccgccaagaacggccgcattgccgtcgccgcgctcctcctggcggcgctggccctgtccgcgcagctcgcgccggccgcggcgtgctcctactgcccgacgccgaagccgcctccgccgccgccgccggcgccgtccggcgtcccgtgcccgccgccgccgtacacccccaccccggcgacgccgacggggaagtgcccgccggcgtcgccgacctcgacgccgcgctctgcctctgcaccgccatcaaggccaaggcgctcggcgtcagcctcgtcctccccgttgccatctccgtgctcgtcaacgagtgcggcaagcacgtcccctccagcttcca

SEQ ID NO: 35436 - DNA, 150 bp, Oryza sativa
  Clone ID: PAT_MRT4530_39356C.1
atggactaccgtaaggatcgttgggacatggactaccgtaaggcgggggctgtggttaaaaaaatctcctcgtttgtcccacgccgtcgttgggacatggactactgtaaggctcgttgggacatggactaccgagtaaatgcttcttag

SEQ ID NO: 35437 - DNA, 1414 bp, Oryza sativa
  Clone ID: PAT_MRT4530_39357C.1
aagcacaacatagcacgttttatactatatatgaaagttgacagaatgacaggctttatcagccacacatatacatatgatacatacacatcaaactttgtatttcatagcatacatatcacacactctttatttcataataaatctcccaaaccactacaaaccaaataccacaactccacatgcatatatgcatgacacagcaaaatatatgttacacaaatattattatacatcaattaaatgcacaatccaaggctccatgcatgcctccacatctccatgacacaagtcagagctcatgtatatatgctacatatgtcactatatatatttatatgtatatagcatagccaggtgataaactatacttattaattatgcaggtaatatgtaatttgatagcttaattaattaatccatgcatgcatgcagagatcagatgcagtaggtgattattaattaattagtgatcatacataattgaggtgatttatgatgggcactggaagctggaggggacgtgcttgccgcactcgttgacgagcacggagatggcaacggggaggacgaggctgacgccgagcgccttggccttgatggcggtgcagaggcagagcgcggcgtcgaggtcggcgacgccggacagcagcgggcagcaggtgtcgctggccttggcgccgaccaccgcgtgcaccagcccgttcagcgcgtccacgcacgccagcagcttcagcgtgttcaccgggcacttccccgtcggcgtcgccggggtgggggtgtacggcggcggcgggcacgggacgccggacggcgccggcggcggcggcggaggcggcttcggcgtcgggcagtagggggctggtaggagggggaagggagggacaggccaggtgggatggagagaagaaggactgggccggggtggatcagtggatgggcactggaagtcggagggcacgtacttgccgcagtcattgacgagcacggagatggcgacggggaggacgaggctgaggccgagcgccttggccttgatggcggtgcagaggcagagcgcggcgtcgaggtcggcgacgccggacagcagcgggcagcaggtgtcgccggcggtggcgccgaccaccgcgtgcaccagcccgttcagcgcgtccacgcacgccagcagcttcagcgtgtccaccgggcacttccccgtcggcgtcgacggcgccggcgccggcgtcggcggcgtcgtcggagtcgcgggcgtcgccggcgttggcggcggcgtcgcaggcgtcggagtccacggagtcggcgtcggcggcgtcggcgttgcaggcggcggagtccacggagtcggcggcgtcgttggggtcgcgggcgtcggcgtcggcggtggcggctggcacggtggcggaggcggcttcgt

SEQ ID NO: 35438 - DNA, 657 bp, Oryza sativa
  Clone ID: PAT_MRT4530_39358C.1
atgtcgccggtgaaggtgtttggccgggccatctcgacgaacgtgtcgcgggtgctggtctgcctggaggaggtcggcgccgactacgagctagtgaccgtcgacttcctcgccggcgagcagaacagcccagagcacgtcgagcgaaacccatttgggaagatccctgctctgcaggacggggacctcgtcttgttcgagtcgcgcgcaatcgcaaagtacattcttcgcaagtacaagtcgagcaaagtcgatctcctccgggagagcgacatcagggaggccgcgttggtggacgtatggacggaggtcgaggcgcaccagtactaccctgcactgtcgcccatcgtgttcgagtgcatcatcttccccatcatgcgcggggtcccgaccaaccagcaggtggttcacgagagcctggagaagctgaagaaggtgctcgagacgtacgaggcgcggctgtcggggagcaggtacctcgccggggatttcctcagcttcgcggacctgaaccacttccccttcacgttctacttcatggcgaccccgtgcgcgtcgctgtttgatgcgtaccctcatgtgaaggcttggtgggagggcctgatgtcgaggccatctatcaagaagattagcgcaaatatgcctaccaagttttag

SEQ ID NO: 35439 - DNA, 180 bp, Oryza sativa
  unsure (1)..(180): unsure at all n locations
  Clone ID: PAT_MRT4530_39359C.1
acagaaaaaattaatncacatacaacttattttgagtgagtgtaaagcctccaccggtgcgattccactctacaagagcaaagccgtcacccgtccctatcgctactcgacgtgagtatagtagttacaaaaagtgaatgtgccccgtacgcacgcgcgtgctttcgtctcacacgagaa

SEQ ID NO: 35440 - DNA, 282 bp, Oryza sativa
  Clone ID: PAT_MRT4530_3935C.1
atggcttttcggcttggatgtggtccttttcaaaggaggaggcctgcgaagggcatttgcattggacttgcgagaggagccagcacccaacccgacgaccgcaggggctgcacccaatgcgacgaccgcaggggcagcacccagcacggcggcggatacggcagtatgcccaacattgggtccaaatccatggcagcatcccttcgcgtggaccgccggtcgtgggttagtgagtcaacaatgcagctatggaagacgaataactcgatggagaagaactag

SEQ ID NO: 35441 - DNA, 1398 bp, Oryza sativa
  Clone ID: PAT_MRT4530_39360C.1
ccttcttctcctctcgcttccttttcggcttcttggagcgagcgagcgagcgagagagagagagagagacccacctcaccttctcctcctgtcctcttcctcaccctggtcccgctcaagctgagcctttcccagtgcaagattcaatctgctgctgctgttcttgagatttgcccggctcggatttcttgcgtgcagtttctttgttgatctggttggttcagattgatttgctgcaagtgcaaacctgttcttgggggggtttgatttgatgtggtgtgttcttggctccgattcggccgcggctcccggtgaagaaatccccaagtttgatgaggctctcgcactgtgagagctactgcggccctcccctgtgctacatcccctgcctccccaaatccaaagatgcagccggcgacgccgcccacaaatccaaggatgcagccgccgccgacgctgtcccggtggccgccgcggaggacaagccgccgccggttcagaagattgaggcggcggtagggagaaggacggtgacgacagcaaggaggtcgacggcgacgaggaggaggaggaggatgatgatgatgtgaagacggcggtggcggtggcggcgccccccccggctccgctgaagagtaacctgaagaaggccgactgcgccgacagcaagtgcgccgagaaaggcaatgtgaagtggctggatttgctggggaaggatctcaccgaggtcaaggaattcgagccaagtgaatcaggagattccatggatgaagatgacatcgcggaatgcgtttgcgctatccaatgatccagaagggtttcctccccaacgttgctgtaaattgtaaaatgggagtttcgcacgtaatcatcgatctttctttcctctcactggagggtcaggttgttttgttgacccccttcatgagttccactgaagctccccagcatccggtgctcagttccatcagtacatgccgccgccatagctgcctagctgtagatgtttctgccttgtgttgatcagattatgtgttgtttggggttggtattggttgctgaggagtgatacatttttcacaatgcctggtggtgtagccaagattattgcttctgtaaagtttacaatataaagttattgagagtggaaacagatcctgccatcctgtgcccactttgacaaaaaagcatatgtaaagcttattgatttgaagctgtcaactgaaaaagtaagagaacttggttggtgttagtatcatggacgctgagttctgacaaattgtatgtattatcattttgttcattacttctcatgatggtgtccaagcaaataactcttcagtgacctgaataacctccccatttgagataaaaaaaaaaaaaaaaaaaaaaaaaaaa

SEQ ID NO: 35442 - DNA, 186 bp, Oryza sativa
  Clone ID: PAT_MRT4530_39361C.1
atgggccggaatgtgatgggccgcaaggtattgggccggtacggtcacctgaaacgtgttgggccgtgggccgtggccgtacctcccgccggagataagctgccgccggcgacggccaccgtggatgtgatgatacgccattgccagagccttcagatttctacatttttgtcacaatctccatag

SEQ ID NO: 35443 - DNA, 259 bp, Oryza sativa
  Clone ID: PAT_MRT4530_39362C.1
gatatatacttaaactaaacgtggccttggtcaatctacgaacaaaggagacagtgagcaatgttttaaagacgatcaaaaaagtaaggacggagaccccacactctcttcttggcaacagagcatctttgtcattcttaccgcctccacattctttaatgggaagcactctaacctcggaagttccagcactggaagacagccatgaccaactggccacacagcgacgcataatcgcggcagaccaaaccttgtccat

SEQ ID NO: 35444 - DNA, 105 bp, Oryza sativa
  Clone ID: PAT_MRT4530_39363C.1
atggtggtggtagtgactgaggatgctgaggagatgacgtcgttgatatttggttgtggaagaggtgagggcaacacccggggatcatggaacggtaaaagctag

SEQ ID NO: 35445 - DNA, 610 bp, Oryza sativa
  Clone ID: PAT_MRT4530_39364C.1
tctcgagttttttttttttttttttcaaaaaacagagcacgtagggttagggctctcacagtaaaatcatttaacatgagaaaacgatagacagtcatttgcggctggtaactaccttacaacattaaactaagcatcgaaaccaagcagagtagagtgaaaaagcaacaccttacgctagcaatcctgataaatcccagcatcagaaatctgccacccgacattcttgtcctattcccatgatatctgaggggcgctttcacatccacaatgtcttgtagccaagaaaataataatccacatccagcacatccactgtcatatgtagccaagaaattaatgttcatccaagttcaatttttctgtccatggaattcgattgtgatacttggtaaacattccttgaataaatatcacctcaattcgttattagcagggtcgctcagtatgtggtgcaaaaccattattggcacagcatccctgcaaccaagcaacaccttcacaaatctattctggtggggctcctccatcagcaggtggtgcaaaaacatttaccaatgcaaagcatctctcatatcatgcaaagattccagctatacagttgtaccag

SEQ ID NO: 35446 - DNA, 290 bp, Oryza sativa
  Clone ID: PAT_MRT4530_39365C.1
cgaggcaaaaccaaaggacaaatccttggagcaatttacctttgtaccaaactgaaagtctcaataccacaggtaaatgtatcaaccactgaccattgttaggcgaagataacggccactcaccgttcaagggcacaggaatgatccttttttcactcagacgatgcctacatgtttttttttggatcatggaagaaacctgaaacgccatattaccccttacgattgataccctaagtaccttccaccgaacttttaggcgcctgctcttatgtgtttttcagaagggt

SEQ ID NO: 35447 - DNA, 430 bp, Oryza sativa
  unsure (1)..(430): unsure at all n locations
  Clone ID: PAT_MRT4530_39366C.1
ccatgcacgcgtgcttgagcttaaatcctctaaaacntccnccctttttttttttttttttcactaaaaatataattcccttaatcagttgtattctttcaaaaatctatttcccactcctcaacttataaattcctaaaaatcacttaattctacatttctcattctttaaaaatacttaatttttacttactttacctcaaaataaaacctattttaaaataccacctattctcaaatcccctaataatcattatatttcttatttatctaaacatattttaaactttaacactactaaatttcaccattttataatatccaaatcctttaaaatcaaaattcatttaaatcatcaattcgttaacacatcctaaacttctttcatctcaaattcaaaaatttctaatttacaaaatttttttaaatt

SEQ ID NO: 35448 - DNA, 154 bp, Oryza sativa
  Clone ID: PAT_MRT4530_39367C.1
ggccgcttgtttttttttttttagcgggagagggaagagctgcatcacataaaaacatacgggggctgagtgctgggttacacgattgagttgttcagggttcagattggaaaaacatcttggggtcttgagatagagggaatggacagatgcg

SEQ ID NO: 35449 - DNA, 1819 bp, Oryza sativa
  Clone ID: PAT_MRT4530_39368C.1
acagttgtaccaacagatacctttttttttttttcttaactgcataagctctccaagctcgcgactaacttgcaacttagtgttaaggagatgagttattgactgtgtatggtagccagccaatctgaagcacgcaattacagaatataccagatcctaggatgaatttgctatgcggactgcggtagtgtagaacatgtgagcaaacgcatcagaaaatgcagacaacaaatcaattcttaagaaagaaaaggcctaacgaaacagaactagacaagctcatctatctcttcatgatataccccagtagaattcccagaagagcaacgaccaccacgaacacaaaagggaaaccaccattctgctagtgaatttccctcctcacaaggtccatctcctcgagaagcttattgttctgctgaatagcagagtttctttcttctgtcaatcttgaaatcaaagcagatgtctcagaatcagatgttacatcttctgcatccttgtgtgctcttgtagtatcttgataattcaagttgcccccttctgataatgaagcccgaggagacgagccttcatcagatccctcaaggacgggggatggtggtcgtggtggttggacatagacaaccttcaacttcctctcatccaccacattacctgatcctttgttaaacttaaaggcgatgtagtcatctgttctgttcgtcagctgcatggagcatgagatctgcttcttcgtctcgaagtctgataattgttcgtctatacgatctactgaactagttgatgaagaaggcacctgtgagcaaccccagacggtgccaggagtagcatcagaatagcatttcgtgcttgaagtgcttgcaaatttgagtccagcaaaccaagccacgcgcatcagttggatgcctagaaccagaacccaccatgacaccaaaccacgaagactttgcaccatccatccaggcgcagtgatctcatcggctaactgaagacccctcatcagctgtagaactcggtaaccctcataaaccacaggggccaccaaccaaactggcgatttccagtgccaagtaagcatctcagtcaaaacttgtacagaaaggagcaagagatatggtccaagcagcactgcaaacggaatgaatggtatatgtggctgcagagtacccttatgagatgcgaaaaacagggccaaaggaacaagaaagcctactatgctggcagccagattccagaacctgtaagaagttgggatctgctttatcagttcggatgaattggcctccggacgcccacaagcatcagccataaggaaaaacagcattgctcccatgttaaaaatgaagtcaagtcccactagggatagaaggccggcaatgttgggaccaagaaacactgaagacaatggtagccataaagttggaactatactcgtaaccaacagaattgaaggccctaaaagccaaattggcagtttaaaagttgtcagctgcatggaaggttcttttatcacctccacaaaatcctggtcactctggaggatcggaatttctggtgcttcttctgtatcaataggttcaacaacttcagttcccttaataatgttggcaccatcttctgcagaggcatatggaagggaggcctcccaagacaaattttgagtgcatcgcaagacaatattttcaaaatggccagagtgtagaggtttccaataaagagatttaggcaatctgatttgtccattctcatgaatctgtctcctgttcctaatatgtgctttgcttaattttatctgtgaacaaattaaagaggccat

SEQ ID NO: 35450 - DNA, 923 bp, Oryza sativa
  unsure (1)..(923): unsure at all n locations
  Clone ID: PAT_MRT4530_39369C.1
acgaaccagacttagacnagctcatctatctcttcatgatatacccagttagaattcccagaagagcaacgaccaccacgaacacaaagggaaaccaccattctgcttgctaatttccctccctcaaaaggtccatctcctcgagaagcttattgttctgctgaatagcagagtttctttcttctgtcaatcttgaaatcaaagcagatgtctcagaatcagatgttacatcttctgcatccttgtgtgctcttgtagcagatagcaatggtggctcatcagattcccgagttgtctgcgtatcttgataattcaagttgcccccttctgataatgaagcccgaggagacgagccttcttcagatccctcacgcacgggggatggtggtcgtggtggttggacatagacaaccttcaacttcctctcatccaccacattacctgatcctttgttaaacatctctccagtgacatccttggttgttgtgccttcagtcaccacaacgctctgcactagaaacttgtctttgcactgcatgtctgctggtgcctcccgttgggcttgcattgttacgatgacatcgctggtggaccgtggcggcacaatgccactgttcggcctgacgcagtacttctttgggctagttgtcttgaccttaaaggcgatgtagtcatctgttctgttcgtcagctgcatggagcatgagatctgcttcttcgtctcgaaggagacccggagctcgagcggctcgatcccgagcaactccttggagtcggagcccatctgccgccagccaacccactcgaaccgaagaggggaatgctcgctcgaactcgagatgcgcttgatccggagcggggagctagtagtagctagggtttgggtttgggggagtgagtgagtgatgagtaggtttccggtn

SEQ ID NO: 35451 - DNA, 168 bp, Oryza sativa
  Clone ID: PAT_MRT4530_3936C.1
ccacgcgtccgcccaccatgcgccgacgcgtgcatggctcaaagcacctaggtaggacacttatcgctccgagcgcgctgtcacattgcacgctatggtcatctcatgctccccgtgagatcggcgaaccaatggcatcacttactgcaccatgaatcgatcagactg

SEQ ID NO: 35452 - DNA, 245 bp, Oryza sativa
  Clone ID: PAT_MRT4530_39370C.1
caaaaaatggacgccgccccgccaccacgccaaccactatgctgcctcacgccaatcgcgatcccctcaccatcccgtggctcccacctcccccctctcccctcgctgtgatctcctcatccgtgatttcgcaatttcccctcactccaatctctttgctgggatcgctcccctctctcccatcgcgcctcagccgttctgccacctgccgcctcctgccgatttgtccaacgcctctttctcag

SEQ ID NO: 35453 - DNA, 515 bp, Oryza sativa
  Clone ID: PAT_MRT4530_39371C.1
caccgaggaaatgtaaagacatatatttctgtattataaaaaaaaactttgtatgtacaagagtgattacacacagtctgataattgttcgtctatacgatctactgaactagttgatgaagaaggcacctgtgagcaaccccagacggtgccaggagtagcatcagaatagcatttcgtgctgcagatggcagaggcatgagcaaaacatgtaaacctgaacatttttttcttgtccgaatttacttattatcatcacttgctccgtaccttgaagtgcttgcaaatttgagtccagcaaaccaagccacgcgcatcagttggatgcctagaaccagaacccaccatgacaccaaaccacgaagactttgcaccatccatccaggcgcagtgatctcatcggctaactgaagacccctcatcagctgtagaactcggtaaccctcataaaccacaggggccaccaaccaaactggcgatttccagtgccaagtaagcatcttagtcaaaacttg

SEQ ID NO: 35454 - DNA, 1309 bp, Oryza sativa
  Clone ID: PAT_MRT4530_39372C.1
atgtcgcggtccctgagcatgaggtcgtcgatgagcatgaggtcgcgccgcgacctgcctcctccccagcagacaatcgaaaagcttgagaatatggtggctgaaggaaattattatgaagcccaacaaatgtacaagtcaaccggtgcaaggtatattgctgctcagaagtatttggaagccttggacatccttcagtcaggagctttagttcaactgaagcatgggcaggtaacttgtggtggtgaacttgctataatgtttgtggacacccttgtcaaggcagcgcttccttataatgaagaaacctttgatcgtatcagaaagatgtacgacgccttccccaggatatctgttccacacttccttggagatgattatgatgacgacgggcagaaattatccgaagctatttctgcagcaaaagtgcgttctgagagttgttcatcattcctgagagctgctatcaggtggtctgctgaggttggggcatcaagaagtggatctcctgagctgcatgttatgttggcggaatacatatattctgaatctccagaaacggttcgtgttgactgccgttggatgcaggacatgactaaagtgtcaagtcattttgtgaggggaaatgatcctaaaaagtttgcctctatgctggcgaactttatgggaaagtgctaccctggtgaagatgatactgcaatagcacgtggtgtcctaatgtatctatcacaagggaatcttagggatgcaaatttgctcatggacgagctgaaggatcaactaaaatctgctgacttggaaatccccaaaacagatttaattcagttcatcaagtatctcttaccgacgctcgaaagagatgcttaccctcttttcaggacactgcggcagaagtacaagacaagtacagatcgcgaccctgtatttgaggagttattagatgaaatagccgcaaaattttatggaatacggagccagagcgctttggaaggactttttggtgatatgttcagggtataatgatgagaaaaggatttcgtcataaatattccagcacaaagctcccgacgcgcatttcgttcgctaatacaaattgctgctggaaaatgaacacccggcccggcccgaaaagagcataaaaaaaagttctgttgctgccttcctcagccttgattatcctgaggccatacatttagctccaaactgcatatgatgatatatgctccagttacccctgatttcttgtaaaaccattcaactgttttgctcgtatcatggtcgtgttctaatgatattactattctttaac

SEQ ID NO: 35455 - DNA, 128 bp, Oryza sativa
  Clone ID: PAT_MRT4530_39373C.1
tttttgtttaaaataaagtgagagcagcatgaatcaaaattccaagaagaatagagctgtactgtggcattgaacacacatcacacgtttgtgaactcacgagatacgatgcatctaatctctgcact

SEQ ID NO: 35456 - DNA, 1255 bp, Oryza sativa
  unsure (1)..(1255): unsure at all n locations
  Clone ID: PAT_MRT4530_39374C.1
ggtcataagaaatcctcgagttttcggccacgaattacatgcaccctgaacacgaaagcaccgtggcgtggacgcatggtgatcctgttcgcgatcgagcgacgaacgagagacattctcacctcctcgccgttgttatttttgttataacttatagaaatcaaacaatctcttcaagaaattgataaagcaaaaaagacatttactataggttggtaatgagaacatgcatggtgggaaacgtaattaaggccaattggtctaaggtttgttctcctgttcagtatggtggcctcgggatttcaaacttggaacaatttgctagagctttttggctagggtggctgtggttcaaatggaggacgccagaaaagtcttggataggaactgaaacaccttgtaatgaattgaataaggatctgtttgtggcatcgacgaaagtccaaattggtgatgaaaaaaaggggagcttctaagaatcaaactggattggtggtcaaagcctaagaagtcaagcgccgaacctctatataggcattctaagaggaaaaaccacactgtccaagatgccctgcaacaaggaaggatggatcaacaacatccgccacagcctcactattcctctccttgatgaattatttaatgtttgggaagttctagcacatgacaccccacaactaacatatggggcataagactcgattgtttggtgatggacaacgatgaggaatatagtgcaaaatccgcgtatcaattccaattcaacagaatggtatagtcgccatcaacaaagttgtcttgggaggcatgggctccagcaaaatgcaagattttcacctggctggtgcatcaaaaccaggtgtggatagctaacctgtttgcagatcaagggatgggcaaataactatttctaccaattatgttttcggaatcttaaactgccgatcaccttttgttcgaatgtccagttntgaagcaaatctggtttggagttctcacttggctgcgacaaaggcgtatcatcctgaattgggcacaaataacaagcgacccggaaacaacaaaacaaaaagggctcatatatctcttcttgctcgtcgcttagaaaatctgaaaggaacgaaactcaagaatcttcagaggaaaagagacgacggtgcaccaaataatcagtcgtatctaagaggaattaggttggtgcggtatagctcgaggaacacgctcgatatatacggattcaacgattgacgtctgt

SEQ ID NO: 35457 - DNA, 1207 bp, Oryza sativa
  Clone ID: PAT_MRT4530_39375C.1
aaatatcacgacaaaggggcaagcattttattgaacttgttacaagactgacagttatataatataataatgtgaccactcggaattcaccaacagcagcaggatatatatggcgcgaacacgaacgtacgtgtccggttattgacgacgacgacgacgacattggaaaatgtgtacgcagcacgaatcataaagcaaagcgacccccttctcctcctcctcctcctttcgccggccgccgccgccgccgccgggggccggaagagcacggtggctgacctcatcatcagaagggagcctcggcggagggcgggcggttgaggctcttgacctgcttccacgactcgcggccggagacgtcggcccaccaccggctgacgttgcggcgggactgcagcatccggagcgtgcgcgggtcggcggcgaggcggtcggcgttggggaggtgcgaaaggtcggcgagggtgaacttgtcgccggcgaggtactccgcctcctccagccgctgctcgtagatgtccagcaccttgctcagctccttgctgctcttctcgaacagctgcttcatctcctccaccttctgccggtgcgccgccgccatctggccatcccttcctcctccggcgccggcgccgccctgcctctggctgctgtactgccggtcacggccgccgtcgtcgttcttctcctcctcgcagcggccaccgtcggcggcggcggcgcccttgttaggctgcgtcgtcgccgccggcaggtaggcgaggctgtagaccacgtcggcgctgggcacgtcgaagctctgcgcctccgtctgcagccactgctcgatcgacgacctctccaacgcccccatcccgatcaggtccgggttcccctggttcttgtacttgtccgcaatgtgccttatgatcttcctcgactcgacgagcgtcacattgccgtcctcgaaggtgagagcctcgccgtgaggctggagtttgagatactggggcatgcgtttggacccgcgaaaggagtcgacgcggatgagctggaactcgacgtccttctcgaacaggcaagccagcacgcgggccacctcggccgacgacggcgacccgaacaccttcacggctcccggcatctttccggtcggcggcggcggcaacggcggcgaggaatcgaagtgttgcttaactgattaatctgcaggtgagatttgacagtt

SEQ ID NO: 35458 - DNA, 2144 bp, Oryza sativa
  Clone ID: PAT_MRT4530_39376C.1
gctggcgacaaattaactgagcaccctttatttgccagagtgggagcaaccacatttgcaagtcagatgaatagtacagggttaacacggcttaaccgcggatcagaacaaatagggaacaacactacaaacaggtcttcaaaggtatagtcatatgctctctatagccccacaatgtcaaatatcgacaagcattcgtggatctacgacaggcgtgccaatgcccctcttttcttcacctcctacttccaactacaatataggtagatcatacatctgcatcctacaataatcaccaccgatctccttggtgaaacaatcatatctgctcttcaaccaacaaagtcatggagcaaatggccaccgatctccttggtgaaatgccggtcctgaccaccaaatgagctcatcacgtaggcatcactaacgtcctccagtccgaaacgatgggcaagattgagcggaagcgcggccggaaggggctcagcaatgtaagctcggttattgttctggtgaaggccaagggtgagtgagacaccgccagcattcgcggcaccaccggtgccaatgaggtcaggttggtggtggtgcgccatcgcgatgctgtgatgcgcggcgagcccgttgtatgcgaagctcacctgaccggagatgtcatggggcatctgggagaggccgtcctcgatgtgccgggaggcggagatgctgtgattcctggtcatgctgctactttgcccttgcagcgagtttgatggatcacagggcttcccgctgctgtccgacgaatgttgggtgtgctgcatggagagctgattcttgtcaagagacggattcttctgcagctgcctcatctcgaggttgtgaatttcttcaaccattggcttccagagcctaacccttgcattgataaaccagttcgatacctggttcctagttaatcctgtctgtttagcaagcatctgcttatcgctgtcagttggatacgggtgcaggaagtgttcgaatagccatgcacgaagaaccgaaacagcacgctctggtagccctctttgcgggcgccatatgttgtgaggttggctaaacgaattcacattgtttccccttagtaggccagcgccgccgcccataagcccaaagtttgttgtgtcttccttgccgagaccatcttttgtagcacccttgcccgtattgcgcagctggttcagtataatgcccttcaaatacttgaaatgcttcgacattgtcctaagagccatggaagcaaaaggagcagcattgctcagacccgcaacagtctcaaaggacgatactacagcttggagttgctggtagtattgcctgtatcgcttgcaaaccttttgattatagataaactgcggatcacctcctgctagttttagaagggagcttaaaagagccttgaagtcttccataagcgagatgagcctagtcttcctccactgctgctcggcgccggagaccgtgaccgcgtccgcgacggcgcgatcgctgccgtccatctcgtggtcgacgcttcccgcggcgtccatggcgtctacgtcgagcaaaccctcgtcggagcccctgtcaagctgcgcggggcggccgccgacgtcgcagatctcctcgagcagcttctgcgcggggcccaagaacctggaccgcccgagcacggcggcgtagcccgtgaagggcccgtacggcccggcggccccgccgccgccgccgccgccgccaaactgcctcctcggcgtgggcggagggttcgaggacgccgacgacagcgacagcgcgaagttctggctcgggatctgggcccctccgctcgtcgcggcccccggcggcatcccatgcgccaccaactgcgcgtgcgccagcgtcgggctgtgcggcgagtacgatgacgaggacgacgcgtaggagtagaacgccgggggcagcggccacgacccgggcggcggcggcggcggcgactccgccgggtggtcgggcgggaaccgcagcttctcccgccggctgtgctgcggcacgtggtacagctgccccgccgcctgcccaagcagcaggtggtgctgctgctgctgatgctgatgctcgccgcctccgcccccgtaccctcctcctccccccgcggcggacgacat

SEQ ID NO: 35459 - DNA, 249 bp, Oryza sativa
  Clone ID: PAT_MRT4530_39377C.1
atgggcgcgagcgcttccgtccccctccccgtcgccgccgcgctcgtacggccctttgctcccccggcggcggcgggagtcactgaggtggagaaagaactgaggggagctgctaccaggctaccagtgtgctgctgcccggccggccctcccctctccacgctgcttctctctgtaagggcaacagcaagtttaaaaagcgtgcgcgtagaaaatgaaggagatggtcgaacttacctcctttcataa

SEQ ID NO: 35460 - DNA, 3303 bp, Oryza sativa
  Clone ID: PAT_MRT4530_39378C.1
gcaaagcagagcagagagagagaaggcctgcgccggcgaactcggagaggaaaaggatgctgcgcggcggcggcaccaccggtggctcgcgacccgcggcgaacaccaccgccgctcgaggccgccgtcttcgccggctccgtcgtcgcggcgagcggcacggacggcaaccacctcaccggagtcgaagggcgcgacggcgttgcaggatccggtggtttcctccatggaagagacctctttcacttttgaattcaaacgagggtctaaaagagctaagaaaacgatgctgcctgaagaatcacataaagggaaaaatgattccacgaagggtttctctaacaaaagaaatctggttcctgcaaagacaccatctgcaaaggaaagaccggagcaagtggagttcacacattgttcacctggtattgttgccaggctcatgggacttgacaccgtgcctcgccccaagaaagctcttgaccggtgccaaagtgacattcagtgcaatatgcagcgggtcctatctggaggtgatcaagtctatgatgcttcatctgaggatcaaccatgtagcagcagtgctgatgatcttcctgaactcaaggatgttttcgaggtcactgagatggagaataaggagacgtgcattgggttgcaatcagggaacgaggagccatgtcccaggagtgataaggatgatttggaatttgtgaggcagaaattcttggatgcgaagcgcctttccaccgatgaatcccataggaattctaaggagtttgctgaagcacttgagatattgtactccaaaaaagatgccttccttgaaatccttcaggagaacagtggtgcattgccaggattctcagggcacatctttggtcacaatggattacaatactccaaattgtttgagcaagagaactgttctcgcatgggtgttgaacgtgacgagttttttaatgtaccaaaggagttggaaaatcctattcctagtagtcgtctcaacgaaacttatggtgtaccactggattctttgccaccaaaagggagcaagagtaaaggttcaagccgtcgttcccaaattgttgttctgaaaccaaatcttcagaggaaaagttttacacctgtcctatcaagtgaaacatcgcattttggtgaaatgagcactaacaactgttcaaggccccaacaccattgtatgcatagggggcgagtcacgcactctgcaccacttaacaatgatcaagttttacaaccaaaacgagacacacctggactgaggggtgcaatagaaacccctaaaataggttccagaaggaaatcgtctgagagagagtgtcagcttgcaattggcagtggaagggcaacagatactcctagttcttttgaagataacctaccaatttacccacccaatcattctgttggatcatcagtctgcagaaaggccaaaaagcacctctcggaacgatggcagatggcctatcaatctgatgaagaaatctcaatgcctaaagataccataacattaggggagatgcttgagatgaccgatagagatgcgacaaaagtaatcacccacaagatttcatcagaaaccaattacaatcatgataatgtgcagaaggcaccagcctgtcctgttggtatcagtagtaaagatggttggaagacagggatttattgtaaagataattcaagatctggcacatcgaggaatttttctaggtcgaagtctctaccgacctcagctaccaacaatgcaaaattaccgtgcaggaaacaatctgcaccaatttgtaacctgcccattctgaaagatctattgaatgcaccaactgatgaatctggaagtgaacatgtcaggaatagatcatcttttagaaaaacaaagcagagaagtgggaaggctatcatccatgcaggaaaggaaaacatgctacctgtgaaagagattcatgtaacttcagagaaagcaagacatagtatctgcatttccgatttgtctcgagcaagcaacacacatagtgaacatcctgatggtgttatgagtaatgaggatcaccaaacatctggttctactgctctagatgatgatttacaaagttctaaagaaaggatggggtggacagagctgaaactaacaccaccattaccagtgacaaaagaagacacatcgattcataatcaggacaacatagtgttgaaggaccaggaggggagaaaccaacaagtggagattgacatcgctgaagctgaatctcaagcaatagattcttctcatatcataagcttagaaaatcacaaatgctcaaattcaactgcttcattgcaacaaatttgtggacatgatactgcatattctggaatttttaaaggcgtcagtgacggtattcaagaacttagaatgcaacttaagatgctgaagatgggtgaccaagatgatacctgtggagatgatatctatatgttgtcgagtgatgagtgcagtgatacagacaacttgacctatcagctgatggaagagcaattacctgtatttaaggatgagtacgacagggacttcagttatacaaatgatatacttggttcagcatctgattttctagtctacccagaagattggcaagtgagcccagatgtgtttgtgtggcttgaagacaagtacagcaagctgcttctatggtcgaaatcggacaggagacttttgtttgacctcataaactccatcttagctgatatgactgctccaggcaacagtctgtgttcaaatatcatggtgaagtgttggtctgaaatggatccaaggaagttagctgaaaatgtttggcaaacagtgctcaataggaggaattatgaacccttttctttggattgtgttgaagctttgccattggaccatcattctgaagttgaagcaataggagcagagattgtcaagatgttacatgatgatattctagaggagtctgtagctgaattcatatcacagtagagctgcatctctgtcagatgtacatagcctgctgcaaatcactggtttgcaagaaggttttaccatgtactattatgtgggggctccatttaattacatttgatatggagcgtttgtaagctgtgaaacctattgtacctgggagccctggactaattgtgctactaccaactaacactactctagtgggacatactgatgtcaaattttccaagttggcatcactacaaatccaaaaaaaaaaaaaaaaaaaaaaaaaaaaaaaaaaaaaaaaaaaaaaaaaaaaaaaaaaaaaaaaaaaaaaaaaa

SEQ ID NO: 35461 - DNA, 105 bp, Oryza sativa
  Clone ID: PAT_MRT4530_39379C.1
atggcggttgcggggcagttcggacatttccccttcgctaaccaaatcaacgccaccactgctgaattcctctatacattcatggagatgctcctgccaccaccg

SEQ ID NO: 35462 - DNA, 702 bp, Oryza sativa
  Clone ID: PAT_MRT4530_3937C.1
atgacgatgacgacgaacactggcggggttcggtcgaaggggaggcgaggccgagggcggcgtcgcggctgcgatgcggaaggtggtggaggtgcggccaaccggtgcaccggtgaggagggacgggcggccgaacaactccggcgaggcggatggagaggttcgcggcgatgtgcggcggcttccgggcgaaaccgaggggtggacgaggtggagggctacgtcaccgtgccgagagaggggacggcagcgccggctgacgcacgggcatggcgaaaggggttgccggaggagacgttgacgaggaggaaggtgaggccggcgcgggcgacggtgttccggcgaaattcgggcgaggaggaggtgatgccggggatgagagcggcatcgcggagccgagggaggtggtggcgacgtcgaccggtgctcaggcagggagacagaggcggctggaggcggccggcgcggaggaaagggaagggcgacggcgggaacgcagctccgggggtctccgcgggaaacggagggcaagccggggaaggggaggccactgcgatgctggaggaggcgacggcgcgaccggacggcgctccggcgaggagggagaggcggctggaggcggccggtggcacgggagagaggaggacggcggggagagggctagggaccacgggagatcgcgggagggggctaaaacgatag

SEQ ID NO: 35463 - DNA, 413 bp, Oryza sativa
  unsure (1)..(413): unsure at all n locations
  Clone ID: PAT_MRT4530_39380C.1
gggtgcaggacttcggccgagtggngtcctgnccgggattctcgtgacggggatntactactccgacnantagntggggcagacgacgatcttctcctactccgaaacncagcgcctncgcctcggcccaaactacctgctgctcncgcccatcgcgcccaantncgcccaccacaactaccactacgacgggttcatgaacttcatgcgccgcgacnaggaggtcgactactncccctcccgntacnatcctgccaancncgccccccgctacnccatcccctccgccaccctcancggnngccgcnanaangtggtgnttnccaacgagaacaactncccgcaaccaggggagaggtaccgttcntgggatccggcaaggcaagaccggttcatcanaaaatggatcgacg

SEQ ID NO: 35464 - DNA, 421 bp, Oryza sativa
  Clone ID: PAT_MRT4530_39381C.1
gggggcccaattccggggaaagaaaaaacaggcccttttttaaaaccccccccaggggttttttccaaaaatttttttcccaatgggaaaaaccccaaattttttttaaaaagggttttaaagagaaacccccttttttttttggggaaaaaaaaaattttataggggggaaaaggacaaattgcccctcttggcccatctaaaaaaaacggccccactattaatgtcctttgggaaaaaaattaggaaatttgggagaaaaaaattttaaaacaatgggccttaaacacggaaaaaggggggtccaccaccaaatttaaggggggcccccgaaattcccttttataatttttttagaggggccccaaaaaattgggccccaattgccctggaaaaaaaggggggggccccggggggccca

SEQ ID NO: 35465 - DNA, 347 bp, Oryza sativa
  Clone ID: PAT_MRT4530_39382C.1
ccgtcttttgcagcagggccgacggggggagcgaggtcgttcctgcaggccgtgtcgaccgtcaccgaggaggcgccgtcgccgctccgcgtagtgcagatggagggcctggctgtcctgaagatcattacgcactgtgaggagtttgcacctgctctacttacaggccaactgcttggttaggatgttggcagcgttctttatttaacgaactggtatcctttcccaatgagagaagatgatgaagaggctgatgctgatggtgcatcattatttctttgcgatcatgacgtgcttgagggatgttaatgttgacaatatcactgttggatggtgtcaatcttgct

SEQ ID NO: 35466 - DNA, 981 bp, Oryza sativa
  Clone ID: PAT_MRT4530_39383C.1
atggagatttggccaggggttagtcggcgcctggacggatgccgtgtcgaggcggcgtggagggtgtcgcaaggcatggtggaggacgagggcttaggatatttctaccgtaccttacgagaaagatccggtggaggggaggggcagcggccaaaggagaggtgcggcggaggcgcggccaaaggagaggtgcggctcccctccctctcctctccctcggctctactctcctccgccgccggtcacgacgacgacgactaccgcaagacgacgacgacgccgccgccggccgatcgggccgtggccccccctcgagagctggtcgctgacgcctcctcgcctcccgaccgtcggccgccgccgccgccgcctccccacctcccgaccgccggccactggatctggcctacaaggcgcggatccggccaccgcggcctctcccccgccgccgtcgccgccgcgaccgccgcggcctccaatgccgagaaagccgccggtgccgccagtgccgccgtcgccgccgtgagggccgaacgcggatccgccgcggccgccggggccgccgccctggcccggttggccgggctcgcccggctgtcctcccgtcccaccgtgtcctcccctgccgccgccctggcccggctcgcccgcatcggtggcggcggcagccgggggctggagtggcgacggcggcgtgcgggcgagggctggttcgaggatgtcggcttgccggcgccgggcttttgctggggttcgaggctgttgtacaagccggagttgccgctgccgccactgagagctagaaatgaaaatgacatcgataataatggaaaatcagaaacggaactattcaagggaaacacatcaaaagaagtaattctactgttttcaacaaattacctataccggatggttcggtcgatgcaacttcagaaaggcgagtcagtccactcacgtacgtttgaatttgataaacggtta

SEQ ID NO: 35467 - DNA, 343 bp, Oryza sativa
  Clone ID: PAT_MRT4530_39384C.1
ggagtgaagctgagcctagatgatgctatccacattgtgcacagaacaatatgccatgggagccccatagttacaacatctggggtgtctgccaaggaaatttcgacacagaccttgaagctggcccggtgggcatcaacgtgccgattcccgtacctcgtccgttcttctccttcaccggcagccaagcctcctttgcacggagacttgaattttctacggcccagtgcgggcgtcccgttctgtcaccccgatcaagacggtcacgcagcacgtggaaggagtcccggctcagcgcgtctccctctccatgcccccctcgcagaagtgaggtgaaaaaaaa

SEQ ID NO: 35468 - DNA, 208 bp, Oryza sativa
  Clone ID: PAT_MRT4530_39385C.1
gagccctcacagagaagaaaccctcgcttcgccgtcgcggctggccggccgccaccggcgataacctcgccgccgacgactccgcatccgcttccgccgcacccggtggggaatggcttcggcggtggagcggagggagcattcgcggaggtcgtggcgctcgaggtcgcgctcgccggcgagggaccgtggctggccgccgcgcagg

SEQ ID NO: 35469 - DNA, 198 bp, Oryza sativa
  Clone ID: PAT_MRT4530_39386C.1
tttatcactaattgcaccactggaaccagtctggggtaattgtacgtcacggggccaggatggccacggacccctcaatgtgaatgccagttctaaccagttctttaaggccaatcaccagaacgggtgatcatgccttgaagttcaagaaaaggagcatcaacatgaggcataagggtgatttcgggatgaccagaa

SEQ ID NO: 35470 - DNA, 305 bp, Oryza sativa
  Clone ID: PAT_MRT4530_39387C.1
aagcgaggaatcacgcattattgtcgtctctctggccaacggtaacatcgacacacttggccgttgcctgcaccgggcatacacggatcaccagacatgcgtgaaccacaatgggccggcgcactggacaatgttcttggtccgaagaggcacagctgaactgcgcatggcgcgggttcgagtggtggtcaggtttctttgcgcggcggctgtcctgttcctgtccatgtttcgtgcatattgctgtccttggctttgctacagcaaacctacagattgctgcttggtaaaagggtgcgggggac

SEQ ID NO: 35471 - DNA, 630 bp, Oryza sativa
  Clone ID: PAT_MRT4530_39388C.1
cctcggtagatagaattgagagaagactctctgctacctcagtttttctatcttatggaaataaacttactatggttaattcagttttctattcctaccaacctactatatgtgtactttgaagttgcctaaaacaataattgacaatattgatcgaggaaggagacaccgtctttagagaggttatgatgtcaattccaataagaagtcattggctgtttgggacaaggtttgcaaacctaagacaaagggggttcttggggttatcaatcttacaatccagaacctccttctaaagtatctagacaagttctatgatagcaagaatttgccccgggtcaatcttatttgatcctcttattatagaaacggagtgcctcacttatccaccctcaaggggtcttttcggtggaaggatgtttgcaatttgatagatttcattggaggcattgccagatgtttaataggagatggagtttcatgctctttttggaatgatggacctcctctttctatccatatgccaagactgtcttcttttgttttgaatgcaaagatcccagtcacaattttctttcaatttagttggaagataattttcacttgcccctatctcaagaagcttatctt

SEQ ID NO: 35472 - DNA, 284 bp, Oryza sativa
  Clone ID: PAT_MRT4530_39389C.1
atgaccgtgttaattttctctgtacccaataacggacatcctggtggcgtcatccccagcaccacagaaagcatccgcccgccgcgcctccaacgccgccggccggccaggcgcaccgtccgcagcgccgctgtccccatcgtcaccgatcgcccatcacgccccgaccgccccaatcatcgatgtcctggtggcgtcgtcaccggcgctgcggcaagcttagcttctgactaccgcgcctccaccgccgatgtcctcatggcgccgctgtccccatcgtcgcc

SEQ ID NO: 35473 - DNA, 183 bp, Oryza sativa
  Clone ID: PAT_MRT4530_3938C.1
atggtgtcagcggctcccgcgggccggatccggtggtccgccaaggttctcccgtggatccacagcgaattcggcggaggcggcgatccagcggtggcggtgatgtcggcggcacccacgggcggatccggcggaggggacatcagtggcggcgggaagatccggcggaggggacgtcggtag

SEQ ID NO: 35474 - DNA, 399 bp, Oryza sativa
  Clone ID: PAT_MRT4530_39390C.1
ggcttcctacgagcttacctccctcggcttctcttcggttgctggcgccttctctggctcagcggcagcggcggtttcagttgtttctggtgaagtgcttggggcaccatcttcaacagggacggtcttcttgacggtaccgaccttcacgtacttgcccataaacttgtactcccagtcctgcaatgcgtcgagttcaaatgggccaagaccagagatgtcaccggtcaaatcctggggctcgaaggacatcttagcgagtgctctgctggcatctttgccagcgaatagcgcataaggtccaccaggtccatagaacatcctgcatatggccgtcaaaatgtgaatggtaattagaaacacagttaaaaaatatttaagtatccactttcaaaacag

SEQ ID NO: 35475 - DNA, 1491 bp, Oryza sativa
  Clone ID: PAT_MRT4530_39391C.1
aatatagaagttcaataatgctacaagataatatatgagttctctttatcctttgctatgcaagatgcagttgctggtggtgcacctatatttgtgggtagatgataatattaattttggatatcttggatctattgcttggaagctttaactttttaacttacattattgcttatacttttccaatgacaatcatttctttgctacactgtttcccattcaaaacacatggacagttgtggctttttaggtgagggattgtgctacatgatgtctacataatatattcatagtctcaggatatgcatgtttatttgtgttaggaattgttgcattgcccctaatattctgttttgaaagtggatacttaaatattttttaactgtgtttctaattaccattcacattttgacgcccgggctcggacgcgtgggcgagacctcgaagctgtgaaaagaccagaatacccctcatccccaaaagccccaaacccgaggaggcgagaggaggaggaggaggagctcgtcggcggcgagcgatggcggcggcggtggcggagctgtgggagacgctgaagcaggcgatcgtggcgtacacggggctgtcgccggcggcgttcttcaccgccgtggcggcggcggcggcgctgtaccacgtcgtgtcggggatcttcgcggggccgcccccgccgccgccgcggccgagggacgagcccgaggcggagccgctcccgccgcccgtgcagctcggggaggtctccgaggaggagctccgccagtacgacgggtccgatcccaagaagcccctcctcatggccatcaagggccagatctatgacgtcacgcagagcaggatgttctatggacctggtggaccttatgcgctattcgctggcaaagatgccagcagagcactcgctaagatgtccttcgagccccaggatttgaccggtgacatctctggtcttggcccatttgaactcgacgcattgcaggactgggagtacaagtttatgggcaagtacgtgaaggtcggtaccgtcaagaagaccgtccctgttgaagatggtgccccaagcacttcaccagaaacaactgaaaccgccgctgccgctgagccagagaaggcgccagcaaccgaagagaagccgagggaggtaagctcggaggaagtaaaagaaaaggaggatgctgttgccgctgctgcacctgatgaaggcgccaaagaaagttagaacactccagtaatccccattgcagcaataatttgtgtaattggatgtgcaatctgcactagcacataggacctggagctggaggtgctagtgcttattattattagttgttactgggagtattagacatgagatcacctggggtttattccccttttgttaagtctctgttaataactatatgggtgaataatatagctgcctttttaaaaaaaaaaaaaaaaaaaacgagggggggcccgtacccattcgcctat

SEQ ID NO: 35476 - DNA, 659 bp, Oryza sativa
  Clone ID: PAT_MRT4530_39392C.1
ctctcctcgtcttcttcctcccccatcttccggctgatgaatgcagatgtcatctcatctcatctcatctctatccaattccaacacggacacctataagaggtgaggttggaggcgcagcttcgtcgtcgtctgatggcgccatggcgtgcggcggcgatggcgtcgtcccagctcgcgcgccgctgcggcgaggaggctgctttcgtctcagcatcgccgtcactgcgccgcgcccgcctgtccctggctcctgggctcggcgccgccggttcttgcgccgtctccggtggctgcggcggcggcgggagatcgtcggggattctgctccgtccggcgtttcaccggggagagcaacgccgccgccgccgtctaggaggcggagaactggttggtggccggtggtgatcagcaggcaatatatttccctggaggaaaggtctcctttgttgctgaaatgaacttccttccagaatctcagagggataggatcaactgctaccgtgttcttgacgatgacggcagaacaatatctggaagcacattccaagaggtcagtaaggagctggctctgaaaatgtacaatgaaatggccaccctccaggtcatggatacgatcttctttgaagctcacaggcgaggaagaatctcattctatc

SEQ ID NO: 35477 - DNA, 1074 bp, Oryza sativa
  Clone ID: PAT_MRT4530_39393C.1
cggacgcgtgggcgagacctcgaagctgtgaaaagaccagaatacccctcatccccaaaagccccaaacccgaggaggcgagaggaggaggaggaggagctcgtcggcggcgagcgatggcggcggcggtggcggagctgtgggagacgctgaagcaggcgatcgtggcgtacacggggctgtcgccggcggcgttcttcaccgccgccgccgcggccgagggacgagcccgaggcggagccgctcccgccgcccgtgcagctcggggaggtctccgaggaggagctccgccagtacgacgggtccgatcccaagaagcccctcctcatggccatcaagggccagatctatgacgtcacgcagagcaggatgttctatggacctggtggaccttatgcgctattcgctggcaaagatgccagcagagcactcgctaagatgtccttcgagccccaggatttgaccggtgacatctctggtcttggcccatttgaactcgacgcattgcaggactgggagtacaagtttatgggcaagtacgtgaaggtcggtaccgtcaagaagaccgtccctgttgaagatggtgccccaagcacttcaccagaaacaactgaaaccgccgctgccgctgagccagagaaggcgccagcaaccgaagagaagccgagggaggtaagctcggaggaagtaaaagaaaaggaggatgctgttgccgctgctgcacctgatgaaggcgccaaagaaagtgaatcatgatttgcgcggcaacacatcccataagcatgacctctaactgaatcagtttctactgatgtgatgcctgacatgcaaaggttcagcttagtcaaaatgtcaaacacatgttttcaagggcttaatcacgtgggtagctgataccatattttgtcaagaacatgtgatgcagatttccaattgatgggtgagaccaagagcgttccaagcacgatgttggaactgagaccgtactgcataactctatagtgaacgggctgcagtatcccagtcgatttcaaaactactgtttgccggtcaaagggggaggggggagggggg

SEQ ID NO: 35478 - DNA, 272 bp, Oryza sativa
  Clone ID: PAT_MRT4530_39394C.1
ccacggcggcgtcgagggatgagatcctctccaagattgtcaccgtcgccggtgacgggactgcccttctcccccccgaggcacgcaccgtcacggagtgctctctccatggcctcatcgccttcctcgggtgggcgtcgtggaccaagctcggcgccggcgatgtccaagccgcgcgccaccggagcggctgcgtgagggtcactgtcctcgtccagcacacggtgaccaacgtgcgcgagcaacaccggagaggttgtgatcgagcttga

SEQ ID NO: 35479 - DNA, 216 bp, Oryza sativa
  Clone ID: PAT_MRT4530_39395C.1
atggtgatccagctggtgctggccgacgacgacaagccaacgtttgcactgctgacgaagcttcacttatcggagactgtcatcaccgatgacgagggcgggtacgtatctcagcgagccaatctcacaaagatgcaagtgaaggattgcttcgtcattgaattgaaggactcggccatgtcactctcgatgccggcgatggaggagttctgctag

SEQ ID NO: 35480 - DNA, 1449 bp, Oryza sativa
  Clone ID: PAT_MRT4530_39396C.1
tttacatttctcgacacactcgcgcgcgcaggggcgcaattatggtgcacgaggctatcaatggacatggccacgaggtgaccgtgaaggtgacgtcggcgtcgacggtggcgccggcgctgccggtgcaggagcaccggctgccgctgtccaacctcgacctcatcctgccgcccatggacgtcggcgtcttcttctgctacggcgccggcgagggctccggcggcggcggcgcgctgctgccggcggcgaccctcaaggccgcgctggcgaaggtgctggtggcgtactaccctctcgccggcgaggtcgtggccaatacccgcggcgagggggagctcctgtgcagcggccgcggcgtcgacttcgccgaggcgaccgccggcgacgccgtgctgcgtcagctccggcttgccgtggtcgacgagagcgccgagaagctcgtgcccaagaagaaggctggcgtcatgtgcgtgcaggtgaccaagttcaagtgcggcggcgccgtcgtgggctgcaccttcgaccaccgcgtctgcgacgcctactccttcaacatgttcctcgtcgcctgggccgccgccgcacggggcagctccgccgcgccggcgccgtccttcgaccggtctttcctcgcgccgaccagcccggctccgccgtgccccgacgcgctctcggacaggctctttgtccccgtcagctgcgtgccggcgccgccgtcttccgccccggaggccgccgccgccgccgtcaaccgcatcttccgcgtggccgccgccgacgtcgcggcgctgcaggccgcggcggggccagggcgcaccaagctggaggcgttcaccgcccacctctggcagctccacgccagggcggcggcgtccccgccgcgccaccgccgttcgtgctgcatgggcgtcgtcgtggacgggcgcacgcgcctccgccgcgacggcgccatgggggcttacttcggcaacgtgctgaccatcccctacggcgccatgagctccggcgacctgtccgccatgcccctcgcggacgtcgcgggcgacgtgcaccggtgggtggcggaggcggcgacgcgcgaccacttccggggcctcgtcgactgggtcgagcagctgcggccggagccgtcggtggcgagggcctacctgggcggcgacggcggcgcggaggcggcggcgtgcgtggtgtcgtcggggatgaggatgccggtcggcgaggtggacttcgggcgggggcggccggcgttcgcgtcttaccacttcccgtggccgggcggcgccgggtacgtgatgccgatgccgagcgcgcgcggcgacggcgactgggtggtgtacgtgcacgcggcggcggaggtggtgaaggcgatggaggaggaggagaccaccgtgttcagggccctcgagtcggactacgtgttcggtccggtgcagcagtaaacacatg

SEQ ID NO: 35481 - DNA, 501 bp, Oryza sativa
  Clone ID: PAT_MRT4530_39397C.1
aaaaaatgaatgtttattgcgaggtagtaaaaatgtggtgttctacttcttcaccgcataatagtcaactcaaatccaagcgatagataataatttaaaaagagaactaactgcttatttagcaactcgttcatttacagtatcttttgagatttccgagtagtcagtggcttggatttcagctccaataccaacgagtttctttcttaaagcgtctttagaagaagcgaataacattttttctctaattttagatgagtctggagcccaaacaacaaagaggattttgtttctttgtccttctccggcatcatattcaaaatcgaaaacagcatatctgcattcgttggcaggtaattcggcgaggaaatcttcataagaagcagaagcaggagctttcttaacaacaacaatttcggtgttatcagcgtttaattttgcaataaagtatctgttttagtgtcccaatttaagatcttggtaagcttcaacaacttcatc

SEQ ID NO: 35482 - DNA, 438 bp, Oryza sativa
  Clone ID: PAT_MRT4530_39398C.1
atggtggagcgcgcgccagctagcgtcgcgctgcattgcgctctgcctgcgtgcacggtcgctgctgctgctggtggtggtaaactgtttttgcaaccaggaatctggacgccatcggtcattggtcatgacctgatcaacgccacgttacgtcgtgtcactggcgtcgccttttccctgcatagcactgtagcacactacgctgccctttctggccgccctggggtgacagagcagaccaccacggctggcattttcaggttgccgaatcctgggacccaaacacgacgcagccaccagccagcaccaaacctaccacctctgcgacgcggcatagtagtaggagtattagtttggaccagaccacccacaggtttgcacttccgtagcaccatttataagaccaaaatgaccagcagagggcgccggattcagtaa

SEQ ID NO: 35483 - DNA, 146 bp, Oryza sativa
  Clone ID: PAT_MRT4530_39399C.1
gcacgaggcgtcttcttcctccgcgaaggcgagagctcagtgcgagctcgcgcgatgtgccatggcgagccccaccaacggcgtgatgtggagtgcgggaacaaggtgatcagcctgcgcctgcagtactacttgcgtgctcgcgg

SEQ ID NO: 35484 - DNA, 324 bp, Oryza sativa
  Clone ID: PAT_MRT4530_3939C.1
tttttgatcagaggaaggtcggcctccctatgcgtttgaatgccatcactgtggggtaaatgcaaaggctacacctatgatgcgtcgtggacctgatgggccaagaacattatgcaatgcctgtggcctcatgtgggcaaacaaggggatgttgagggacctatcaaaagcacctcccacacctattcaagttgtggcattagttaatgatggtaatggaagtgctgctgctcctaccaccgagctagaaattcctgcaccagccactgtcaatggccacgaatcatcaacgtgagtatagcgatgtttgtcttgtggaggatc

SEQ ID NO: 35485 - DNA, 2255 bp, Oryza sativa
  Clone ID: PAT_MRT4530_393C.1
ctactcattcgcgccggcgaaccgggcggcgccggcgcagccctcctccgccttccacaccccgtcgtcgaagttgcgggcgtagctcgccggatcatacgaccccgccgccgacgagatcctcctcgccggcgcggccaccgccacgcccctcccgacgcagagccccgcccacgtcagcctcctcgcgccgccacagccgacgccgacgcaccgcctcctcgccgcgcgctgcagccgcgccgccacccccgccgccgcccgccgcagcagcgccacccacgcccgggcggcgcctccgccacgacggctcgccggcgaaagcttccggtacgccacgacgacccccatcgccgccgcggcgcgatttcgccggccgcgcgaggcgtcgtaatcccgtgaagtagaccatgggcctggattgaacagctgcccatgccttgggccgaaggcgaagtacacgcctgtcctcaagtggtccccagggactgactttgccgttatgttgaaagcatcagacatgtattgaacgacagcctgagctccctttaaagctatatcccttggtggcacttgtaaagggttcttttctgcaaggtggacacggagttagagccgctgggcaacgcaatccgtcaggtccgagagctacgacatgataccccgagccccccaggtcttctttggcttcattggctctgactttgtagttctcttggaagcatcagacatgtattgaacgacagcctgagctccctttaaagctatatcccttggtggcacttgtaaagggttctcttctgcacggagcacacggagatgctttaggtttccaaaaaaagccgttagaaccctaatctgattgttgctcatctccaactcgtcctgcatctcatgtttcccaatagagccaggcagaaaatgtaggacatcaaaattattcgcaacgatctctttaatgagagagctagcaaagcaggagtaatcagggattgcctcgaggtcgttcaagataacatcgacctccttcagtttagggagacaggccattgtagttggaaggctcctgagattgttatatctcacggagaggatctctagaggctctagctttccaaccgcctcaggaagagcctttaggtgattataacctgcctgcagttcaaccagtgaaacacagtgaccaatggtgtaaggcaactcatcaaggtcgtttgtctcgacaattagcttcttcagtcgtgtaaggcttcctattgaatcagggagtgacgaaagcccgttggaacccacatcaagctcctcaagatttaacagcctgccaatgctagaaggcaatgacgagagctgattacctctcatgttgaggtaaatcaagctgcggagatccccaattgattcagggagctgactgattcgattagcatgaatatcaagcttggccaaagaaaagagcttcccgattgcgtctggcaaagccagcagccggttttccgaaatatcaagggtaactagcccagtgagctttccaattgaatcaggtagccactcaatctgcgccatgagtttgccttgaaggttaagatcccgagcacctttcttcgcagatacctcaatcatgctagctagcttaataaggctcaatttctcattatcatccccatcccacattgctgccttcgccttcctgacatagctgtcgtccatggagacgcgccccgtgctcgtgctcgtccccgccaccctgctcgccgtgaacccattggtgcccgacgaggcgtggcgctcggcgttgcccacggcggacgacgacgacgagccggcggcagcggtgctggtggtggtggtggcggcagccggtgccgcgatgcccggcgcggcccgggtggaggtggaggggaggcactgggaggccccctggatgaggtcgtccaagagggggtggagcgcctcgagctcgaggagggcgcgcggcgtcccgcttctgctcgcggcactggaacccggcgagcgcccggggcatctcctgggcgacgccagaggaccccgtcggccccggcgggggacccgccccgccccgccccggcgtcggcgcgcgcccgctcctcccggtcggccgccgccgccagcgcctccgccgcctccacctcctccaccgccggccgcgccggcagcgaccggtgcagccgcatcacctccccgaccaacccatccaccgtgtcgaacaccccggcctccacccccacggcgcccat

SEQ ID NO: 35486 - DNA, 533 bp, Oryza sativa
  Clone ID: PAT_MRT4530_39400C.1
acactattgaagagctatcacggcagtgcagcacgcgcgcaagcgcgggtgactctatatcgggcgccctcttttttttttttttgtttgtgattttaatgtttgttttatttattgtatctggtgtacagtgaagcaagctttacttttacggatcatacattcatcgcaaattaacagctctaagccagaacacaataaatgcttgcaacgacgagatgacagacgagcgggataagcatgatgacgaccaatgctgcaccaccgaacacgctcagagaccaccactgccgcacaggacaaggtggagggggtacctcaaactgaaggcataaaatgcaagagttccagaattgagggcccgcctgccggacaagatgacgcaccattacgcactgtggttgcccaaggggacactggatcttggactgtgaaaaatctgacgtgaaggacgactaaagcaagaaagcgatcgtcttgccactgacggtcatgaggaagatctacatgccttcactaaggcgcaagacaag

SEQ ID NO: 35487 - DNA, 340 bp, Oryza sativa
  Clone ID: PAT_MRT4530_39401C.1
cggacgcgtgcgccaaagcagagagatggtcactgattatgctcccatggcaagccaggtgatgaagagcatcttgctgtgcttcaagccgtgggggcctgttggtgcttacctgacatggcggcccacattcacaggcaacgtcatccagtatgagaagccaacgtaccaggtgatgcatcccatcaatggcgaccacttcatctgcaggctgcagacgccggtgacctacagcccgctggtcgactggaacctatacaacctcccgtcgtaccgcacacgcttcagccccctgatgcgtgctattgaagcctgactagcccactgctacctgcttgtt

SEQ ID NO: 35488 - DNA, 216 bp, Oryza sativa
  Clone ID: PAT_MRT4530_39402C.1
cgctcaggccgcttggcgccgctcgccgcccgacgcttccgtcaccgctcgtgcctctcaaatccgccaccgcagctcaaccttatgccccattaccattcttgcaacgatgttgtaggggccagtggtggggtggggatggaatgggagggaaggggaggggagggaggagagagcggaggactggaggagggagtgaaggtgcacgtggtggag

SEQ ID NO: 35489 - DNA, 728 bp, Oryza sativa
  unsure (1)..(728): unsure at all n locations
  Clone ID: PAT_MRT4530_39403C.1
tgatcgagcttgagcaggtcgggcatggctgctgcggctgctgcttgacgtagagaccaaactggttccaggcctccatgtactcctttctccactcctctcgcagctccgcggagtcgcggtaccattgcctgatgattcacaaaatgatgagcaaagtttcaggtcagaagggtactagtactgagcaaattgcttgaggtaacagaagaaaagatgaatattcttgtgttcagtattcacttcttttacaaaaaaaaaaaaaaaaaaaaaagagtattcacttcttttagcaactgatcaagcaccaattaaactaactgtagtttcactttggtcagaaaattcaccaagaaatatgatggccgtttgcttgaccgaaatgttcttaaaacacgaaaataaatcggatttagggatctccctaattcaccagcgatgatccatcatcaattcaactcaccggtgttaagagcagagctatgatccagcctgtaagcaaaaggcagataccaatagacagcaagctacgtcagagccattgacacggagagatcgagcaaaccggattcgattcactgcatcgagcgagctcgaggcgtccgggtgggcattacgtcgaacacgccgcgtgcaagaaccgggaatcgcgtcgtgctttgctcactgacccgcacacgagcgaacagctccgccaggtcgacgcagtccagctgcgagaacncacg

SEQ ID NO: 35490 - DNA, 809 bp, Oryza sativa
  Clone ID: PAT_MRT4530_39404C.1
ttatttctctctctctctccccttgacaagagccgatggcaggcgagggctcggtggcggcatcagcgagtgggtgccggagtggtggctgcggtgggcggtggacctcgggcgacgtgcgacggaatgcgtcgggggagatgggagcacgctcccagccaccgctcctcgtccccactctgtgtcgagggcaatgagggggcagcggccgcggcgtcgacggtgaggtgggcggggccgcagtggaaagggagcaatagcttgcacgccccaacgcgcggcggcggactggcctcgagcgctccggcgtcgacctggccatgatgcggaacagcgactggagctcctcctcctccgacacgggccccctccccgaccacgtccgccgcgagaccgcccccttcttcctcttggacttgccgccagccgtgcccgcggcggcctcgcggaggctcgggaagttggcagcaggagtagggggctcggtggccgccggggcggcagcgttcttgcgctcctccacctcctcctcggtgcgctcggtgtcctccgccgcgcacattccttcgtgccaccgtgcccggctcgctccctccccaccacggccgccccgcgccatcgtcgccggaatcatcctgctcatcgctgttgtgccctcgccgccatgccctcgccccgccaccatccccatctcccgtggcgccagcgccgctccagtcccggacctgccgaagctgaatccttgctactgcggcggcgacggcggcggcggaggcggcgcgaagaccgtcggctgccgctccgtccat

SEQ ID NO: 35491 - DNA, 581 bp, Oryza sativa
  Clone ID: PAT_MRT4530_39405C.1
aaaagctaaccatctttggctttacttccaatatatcagggaacagcacaaattttttccttgcccctcaacagtggctaagggagaaaaaaacggcccgaaacggattcttttatactggatacaagggatacccggcggcgggtaaacaggaaaacactttttagggggggcaaaaacaaaatggaccacccgatccaggggggaggcctacccggcactacaaccttatttagtcttgccaccaaaatggattcctacccagaggggcccaaccatgaggggccttctccaccccacacaaagggggcatcggggaacccaaagcacccgccgtttttgaaatatgctgctcacaaacccatcgggatgaacatgccaaattgtttctgccacaaggttcccctttgaaagccctgccaacggggggaagcatttgggctcgggcagaaaaagggagtttgccacaataacttcctaaaaaaggcctccaaaaagcctttcaatcgcaggagggctgcaaaaacagggctaggggaaaaaagtagggggggaaaacgacttacttttatgcctacaaa

SEQ ID NO: 35492 - DNA, 182 bp, Oryza sativa
  Clone ID: PAT_MRT4530_39406C.1
gcctgcaggtaccgaattgcagtttcgacccacacctacgcatggtggtgctcatcacgtatacacattttcagagtggattgactacacaccttcgcactccttgaccaatgacgtgaaggcgcaagaggatgctgttttcctcaaccaattcactggttgaaggcgatcgctccacccct

SEQ ID NO: 35493 - DNA, 403 bp, Oryza sativa
  Clone ID: PAT_MRT4530_39407C.1
tcgtgctgcggtctgacaggcgcccatatgacccggagggcaagtgaactacactgagttgctcattgacggcaaactgccgtgattcagcagtctggcagagactttcccaactttggactatcacaaagctgagctgatagcgcatgcggctgcaggcgaatcgagagacattcactgcgagcgtcatgcggaccgcaggggtttcaatgtaaggccttgagcaaagatcacatgcctgatgagagatgcccagaggactcgtggcggcgggctcccttgattgagaggcacacctaagaaattgccagcattggagacactgatgacaggcggagagccatatgcagacgatgcctacattgaagcgacaacggaggcaccgcgctgatcgcggcaccta

SEQ ID NO: 35494 - DNA, 559 bp, Oryza sativa
  Clone ID: PAT_MRT4530_39408C.1
gacgaggctagtctcgagtttttttttttttttttttttttggcgcttgtgcagcgaacaaccgctttcactcagctccacccacgcatgggcaaacaaagctgaggtaccgtttttcgcacccaggtctgaaagtcaaatgaaggactcctctgtacacttcgtcacaatctgaagctgacgcaacaaatggggtgagaatggtatcaagggtgcggtgatatagggggcccaactctcatgagcagctcttgcaaccaccgtctcgtcgtgacgtcatcccttaggcacgcgctaaacgtggtgtccctcagcaagtccggcagacaattcctcagggcctcgcaagccctggggttgtccgagaggcgcaggtagcaccggattatgtgcttaagcagccggaccgacggctgctccgccagcatttgcaccatgttgctaaggacggcccccacagcgaagaagcgctccgcggtcgcgcagatgtacgccagccccacgtcgtccagcagaattttctggacgataaatgtcgctaccgttttggacaactcgc

SEQ ID NO: 35495 - DNA, 271 bp, Oryza sativa
  Clone ID: PAT_MRT4530_39409C.1
gcaactgaaattactgagagtttttttttataatatggagcgcaagaactgcaaaatttccatttgaagacaacataaagactgggggccatattaaacatgtttttaacatcactcccaaaaattgagtttagtctcataaaagcccaggccagcggcacgattccaacataggactatagtacaggagcacagcgtgggagaattatcgaatgctgcaataacttattattccggggactataaacttttgacttttgattccaagcag

SEQ ID NO: 35496 - DNA, 1197 bp, Oryza sativa
  Clone ID: PAT_MRT4530_3940C.1
atgcggtcgcggacgcgtgtgttcctcgtcatccaccgcgccccgctcgagccgcgcgtccgctgcccctactgcggcgcccgcgtctggagcatgaccaccgccgggctcgcccgcctctcctcctcttcctccagcgacggcgagcgaagcaccgactctgactccaaccacagcgacgacgagacattcgccaccgccgatgtgagcctcccacttcctctggctggccgcgtgtctccaggagtgcgccaaattatttctcaaaatgctctcatcatggagagatcacaagttcctggtcatatgtccccaagtgcagagtctccaagagctagatctctgtctccagtggcaaggagggcttttgattcattggatcggtttgatcctaactttaaagatgctccacaatttttcgattgggagaatgcagaagttctttgcaaacatctcaaggtcttctatgatgcaactgttgtggtttccgggacatcatatcccactgttactcgctactttcatgaattttggaaagtgaaggtgatgattctaaatgagtccaacaatgaggatgatcttgttgctagcttggtttctaaaatggatacaaaatttcagaaatattgggatctacagttcctgcagatttgggttcctgttatttttgatcccagatttaagttgaaattccttgagtttaggctgaaagcaggttttggagataaggcaactggtccaaatggatatctccctagaattaagaggacagacattaaatcatttgacatctcaggcaaattaccatgtgagttctatgcaatctgggttctgagaaattttgctagttctggagcagtgcctgcccgctccagccgtgcgggcaatgcggacgcggcgcgggctgtccgcaaccgcgccgtctgcacccctaccgtctgcctccgtgtccgcttccgcgccgaggaaatcgagctgccattgcggcgtggcgcggcagcggcatgcgtggggagcgagcttcttgagcttccccgcagctgcggcggcggcggcggcaaggaatcgagagacggagaaggcgatggcgatgctgacgccgcctcgggcggcgaggggaggaggaggaaggaggagagcggcttccattgctcgccgccggtagactgcgcggaatgcagcaggggtagtggataa

SEQ ID NO: 35497 - DNA, 301 bp, Oryza sativa
  Clone ID: PAT_MRT4530_39410C.1
atgacggttgtgatggttggaatggtcggtaataccctccaaccgtcattggggatcaatcccaaccgtccagaagaagccctgcatccaacggcgacgagggaggttcagccgaacccccttgttcggccgaaccaggggccggcccaaccagcccaagttttggctggcggcctcctccgttgcttcacttcatagactggtgaattttggcccaattcatcgtgtcaattctgagttcttggtccattcatgcataagtctgattcttgacatcgtccgattgatttatcatctgagt

SEQ ID NO: 35498 - DNA, 273 bp, Oryza sativa
  Clone ID: PAT_MRT4530_39411C.1
atgagctaccaaggtcctcctcccggcactgcaggtattgaaatctcttggtttcttgatctgattggagaactccctgcgtacccgccaccggggacggggtacccaccgccggcgtacggcgcgccgccgccagtcgccgccgactacggcgggtatcagcagcagcagccgccgccgccgccgcaggactcgcagagccgcggcgacggcttcttgaaaggatgttgtgctgctctctgctgctgctgcctgctcgacatgtgcttctga

SEQ ID NO: 35499 - DNA, 348 bp, Oryza sativa
  Clone ID: PAT_MRT4530_39412C.1
atgggacgtcgatcggcgaggacgaacggtgacgaggaaatgacgatggcagccagcagcggctgcgcggaggtggaacacaacgctgcgatgttggtgaaggtggtggtgcagcggggcgacgagccgacgaggaggaataggcagttggcgcggcggcggcgttccggcgaacttcgggcgacgccacagccgggccggagaagaggatggcgcagcagcaccgacagaggtggcaacgacgtcggccggcgctcaggcgaggcggcagggatggctggagatggtacagtggaggcaaagccacttgaagccggcggggccgcgtctccggcaatttccccatga

SEQ ID NO: 35500 - DNA, 1989 bp, Oryza sativa
  Clone ID: PAT_MRT4530_39413C.1
gcacaagatggtgcctcctcccccccgccatccggatgttgatctaactctctgctgcccgctgacgccgagagatttgtgtcagacatgggcgccgccggcctcccggcaccgggatgcctgcagaaatttggacatatcgttgatgccgaaagatttgtattaaacatgtccaaccgtggaatccataaggcactcagttttcagtgctttgcttctgatgggcgtggctttggagctggttctactaatagacggaaaattaaaagcaagaagaggcaaaaggatgttgcacaggaaccaagcaaggtaatatctggaggttccaagaacagggaccaatgggcactggacttagggactcgaagggaaagtaaatatgctaaaactgtcatggataagcaatttctagaaaaagtggaagctgttcgaagatctgcacttgagaaaaagaaagctgatgagaacaaaaattatcaagctattgattatgatgccccaattgaatcagataagagtacaattggttttggtacgagggttggaattggcatagctgtcatggtctttggattagtcttcgcttttggggatttccttccatatggaagtgttagccccagcaaagaaagcactgtggttagcaaacaactttctgaggaggaaatacaaaatttcaagacagcactagaaggttttgaagcaacactgcggacatcacctaatgatcctactgctcttgagttctttgctgaacttgtggcatggaacactttcttaaaaccatacctcataaggccacaagatggagatagtttctttccaaatattgccacaaatggcatgcgacacactttttttgacaaaactatggcaaagtctggcatatgtaaccaaattgccctgtatatcaacctgatggtttactgttcatgttcacaaacaggtgcggcagtatcattggttgaacttggtgaatatcagaaggcttcagaattcctagagaagcttgttaaggtgatccctgacaaagttgaagcataccgtttgttgggtgaagtaaagtttgaactcaaggattatgatgggagttcttcatcatacagaaaatctttatctgcgtcagagaatatcgattttgaagttttacgtggtctgaccaatgcactacttgctgctaagaagccagatcaggcagttgatgtaattctctcttgccgtcaaaagttgaatgagaaaagtcaaactcaagttgcgaatttggcggctgcaaatgatgatggtgctccaaaatctcaatatattgatcttatccaaaaagggtacaacaacctaaatattaatggggtgaaagacaatgagcttcgctctagaaagctcatgcgtttgaacgtaggctctggtttgactcgttctattctcgagcaacttgctgtgacagaggttgaggaagaagaacatggcaattggtgggttgatctgcttttaggaaaggcttattctgattggggccatatcagtgatgctgttgctgtttatgaaaatctaatcactgaacatcctgaagacttccgtggttatttggctaagggaatcatattaaaggaaaatggtaaatcaggtgaagcagagagaatgtttattcagaaatttacctgatgctgtaaaggcactagttgatcgatatgcacaaaggtagcgtgagacacaacagggaaattccaattcctctaatttttgtcccattattttttgtttagatagcatcgatctaagttcgtcaggaattttatcgcctgtcaattcctagattcagcacgacagaagggacacggggataatttgcttgtcaaacaatatttagatcaaggcagttatagtgtatagaaaaccttcttgtcgataatagcaaatttataggattttgagattgtgtattcttttattaatgaattgatttgaaataaaaaaaattacgaatttccgtag

SEQ ID NO: 35501 - DNA, 469 bp, Oryza sativa
  Clone ID: PAT_MRT4530_39414C.1
tcaaatttgactgcaaatagtatgtgttagaggaccgggaggaatggttttttcatataacctttaatgaggttaacagattttggttggtccttggtgggttgaattgccatgctgagaggggcacacctctgctcttctattcaaaaatattgattttaaacccaacctaacttttgatttttcacaacacttgaaggtctcgaacagtggtatcctaaagtttttgttatgtttgtttttttttaaaaaaaagttttttgttataagaaaattaaatgcacggtaagtcactcctctccccctccccctaaaaagaaaacctaatttggtggcaaataaaaatattttgtaaataaaacaataaccatcaagctaaacaggttctcaaatttgagttatgcttgaagtttaggagataaattcaaaccaaataacacggaaattaagctattggttgtttttacta

SEQ ID NO: 35502 - DNA, 297 bp, Oryza sativa
  Clone ID: PAT_MRT4530_39415C.1
actttcaacttttttcaagaatcacaccctaaatcaaaaacttcaatcaatcaaaagctgcatttcagcctttcaggcttcgctaaatcgccagtaggcagctccagacctccagtggctgacccacacaagacaataaaatggcaggtgctgaacgtccaaatcaccgtggggacgtttggaacgtttggacacatctgcctcctggatcagaataatcatatcgagttccgatctaacttgccaagctctgtcaccaacatcagcatcatgttaatcctaggggttggtacgttg

SEQ ID NO: 35503 - DNA, 645 bp, Oryza sativa
  Clone ID: PAT_MRT4530_39416C.1
atggagggcttcagccaggagcatgtcattggaattcctctggcttccttcgcatatgctgaggagaaaatagaaaggaaaacttcccggtcttctttggttcataagaagggcaaaaagaattccatcatttatcggatgagcaaactgagccagaaaacagatagttatgtgcagggtttcaaagaacacataactctgggaccaaagatttcagacacactcaaagggaaattgagtttaggtgcaaaggttctccaagctggtagcatcgacaaagtgttcaggcaatactttcaagtcgacaaagatgagaagctattgaaggctttccagtgctatctttcaaccacagctggccctatagctggcatgcttttcatctccactgaaaagattgccttccacagtgataggcctttggatttgacatcaccaaaaggaggcataacaagggtgccctacaaggtcttgatcccagcaaagaggataaagagtgctgcagtgagagaaaatttgtacaatcctgacgagaagtacatcgatgtagttactgttgacggctttgatttttggtttatggggttcatcagccacacaaaatcatttgaatatcttcagcgtgtaatttcagaatttagatga

SEQ ID NO: 35504 - DNA, 240 bp, Oryza sativa
  Clone ID: PAT_MRT4530_39417C.1
atggaggtggagttggcggtggaaaaggttggagtaggggggttccatatgttgctcgttgagcagatgcagaagttgggtgaagaggtggtgctgttggcatcatggatgaagctggaggcaccattgatgagcatcagaaactatagtggtggtcgctggcgaaggttcaaggggaccatctatggctgcagatgtaggcacagcctccaattcctcgaactcactgttgccaactag

SEQ ID NO: 35505 - DNA, 400 bp, Oryza sativa
  unsure (1)..(400): unsure at all n locations
  Clone ID: PAT_MRT4530_39418C.1
ttgcaagcccctgtggggattggattgctgatgtgcaatatgggagtgtgttgttgcactgcactggcgccaacaaaaaggtgtgcgcccgacaagtggatgcaactgagttgtgaaatgaatgtggcctgcacctggaaaanatgcctgcccctgggttcaagctgaaggtgttggttctaagagtgagaaatggtactttggtggatgcaagttcctggggtagctggctgatcccatgtcttatgcttatgtatggttggtttaaatggtggggattttgttccatcttaaatgtttttagccctttggtaagaagagtttagttcatgaacgatgccgcctaaattctccggttatcancaaatccccantntctggncaaaaaaaaaaaaaaaaa

SEQ ID NO: 35506 - DNA, 579 bp, Oryza sativa
  Clone ID: PAT_MRT4530_39419C.1
atggtggttgcgcagccgcttgtccccccgccgccgctctgcctctgccagcagtcgccgtcgtcgtcgccgtcgtcgcgccacggcggtgatgatgcggcgcacggtgtcgacattcaggatgccagcgagagggccgcgagctccgcggtccaccactcaggcggcgcgctgtcacttcgccgccgccgccgcagccgcaccgccgcgccgctcgtgcatcacttctccctcccatcaccatgccgcaccaacccccatccagttccccacaagcaagccacatccagcgtgcgacaacatgtccagcggtgtggcaacaagcctaggggtgtggcggagggttgggttgcggtcgcggcgaacacgacgacgttggattgggatgtggtggcagcagcggccacgatggtggggaagggttgggttttggtagcggtgacatacacaaaaggttgggttgtgacgatgtcgatggcggcaggttgcaaattcaagttcacccccgattccaataatgaagtcgacgaccaccggttctccctggaccaggagtttgtgcccgagactgagttctag

SEQ ID NO: 35507 - DNA, 1113 bp, Oryza sativa
  Clone ID: PAT_MRT4530_3941C.1
ttgagtagagtgtccactagttggggttttgtttattctagggtaaacaagccgaggggagggggcgcgcggaccgggtccacgggagtggggcccacgcggcagcctcacggtccacggtggaccgggtgcacccgggctcacaccggccggcgccgtgggtcccacacgtcagccgcacccgaggacgcgggcggctgacggccgggccccacgcggcggccactcggcgcggccggcgggaggcggcgcccgcgcccctatggtcgccggcggcggccataggcacggcggagcggcggtcgagagaggggaagggaagggggaaaagaggcggcggtccacggctcaccctaggttgacggcggcgacggaggaggcggccggagcggagggaggcggccgcgcggctcgggtcgacggggtcgacagcgttccggcagtcggcgaccgaaacggagaggtggacgaggttggcgaggatgcggcgaacccgaaggaggcggcgccgaggtgggaggtggtccggggcgacgacggcggcggaccggagctcggcggcgacggtggagagagagagcgacgtcgcgagctcgaatccggcgaggaggaagggcggcgagaggcggaaacggacggaggaggtgcggggagggtttaaatagggttggaagggggagagagcggccggcggggaaggaataggtgcgggaggtccggccaccatcaatggcgccggcgagatttgcgggggcaaatccgcctgtttgaacgcgagagagaggggaaaaaatggggggaaagggagaggggatcacggggagtgatttcccccactttattgcacgcggggacggcgggaggcggcgggattcgcggcggcggcggcgctaaggcgcgggggaggcggcgggagcagcgggaggaaggggatgacgggtgggccccacccgtcagcaagggtggcgggcgggcccgcccgtcagcggcgcgcgcgcggggagaggccgagtgggccgtggggagaggagagagagggggaggtagatgggccgggccggcccaagggagggaagggggacttttagggtttttctttttataaaataattt

SEQ ID NO: 35508 - DNA, 468 bp, Oryza sativa
  Clone ID: PAT_MRT4530_39420C.1
atggaggactcacctgaggatgaccggtggggctcggtggagggcgtcgccggtcagtggaggcagcgccgggctcgatggaggcagcggtctcggtggcggcggcggcgggctcggcgaaggaggagttcgcggcggcggcgctgggctcggtggagggcggcgccggtcgggcaggtcggcgccgggcgggcggcgttgggctcggtgggcgtcggcgacaggctcggtggcggtggcggcgggctcgggggggtcgtcggtgaggaggcggcggaggtccaaatggagggccgaggaggctcggtggtggcggccgcgggctcagcgagggaggcggcggcctcggcctcggcctcggcgtcggtggtgacagcggcagactcagtgagggaggacgacggcggcggcggtgggctcggtggcaacggcggcgggcttggcgagggaggacgacggtggcgctag

SEQ ID NO: 35509 - DNA, 801 bp, Oryza sativa
  Clone ID: PAT_MRT4530_39421C.1
atgaatgggaatgtgcgttcattggcttttgctgatggtgggaatcagctactaagcagtggtggtgatggccatgtgtaccactgggatctcaggacaaggaagtgtatccacaagggtaccgatgagggttccttggcaggcatttcgctttgcacttcacccgacagctctttgtttgccacaggctccaccagcggcattgtgaatgtgtacaagagggatgattttctgggcgggaagaggaagccactgaagacgatcgagaacctcacaaccgagatcggtgaaatgaagttcaaccatgatgcccaggttctggcgataagctcgagaaaggagaggaacgggatgaggcttgtgcacgtcccatccctcaccgtgttccagaactggccagggcctcggttcagcctccactacccacggtgcttggacttcagcccgggcagcgggtttttgtccgtcggacatgctggtggaaaggttttgctgtataagctgcaccactaccaaaatgcctaagatctgaatgtgttactctttcccctatgggctgaaatgtgacctggaaagaaaattcaactttcaacactgtgtttcaattttgagagatatcgatggtatctgtagtctagttcttctgaattcttttttttttctctctttactttgggtgttgtaatcccttactctggtgcttaatgcaaagctggcaatttacccatgttgttgcatttcttttatcatgcaaattgatatatctgtaccggtgattgctgtgtcaaaaaaaaaaaaaaa

SEQ ID NO: 35510 - DNA, 229 bp, Oryza sativa
  Clone ID: PAT_MRT4530_39422C.1
gcaggtaacacaacaacaaactgaattctatcggtctacatatccatcatatggacataccaaggccgaatctctaagactcatttttctttctttcagcaagaactatctgctgcctgaatcctattcatgttcgattcacgcatatagctgctttcatatttaacacattcactgctgattccatcctttattatatagaccctatttttttaggagatatttgggt

SEQ ID NO: 35511 - DNA, 1299 bp, Oryza sativa
  unsure (1)..(1299): unsure at all n locations
  Clone ID: PAT_MRT4530_39423C.1
cacgagagtcatctcgaaggcgaagatggtgtggagcaatcccctgtccagcgtgaacccgaacagtgtgatcccgccgctgttgtggcacaggcgcacgccgccgtcgtcgtcgtcccgagctccggttggtgcggcgcgtccacgtcgctggccgacgagctgggcgccgccggcaatggcgccgacttggcgtggtgcgccacggcctccatgctcatgtgccactggctcgcgatggacacgatcctttgcgctctgtgcgtgatcctcgccgcgccgaagaggcacatgaagaagccgctgagctgcaccgacgagccgacctgcgagacggcgagggaggtcgccggagttggcgaagctcttgccgtccttggaggagagggcgacgacgagggcgccgagctggctgacggtgatggtgacgaggcaggagaggatgaatgccctgtagcggtggctggtggcgagaagctgcgtgcggatgcggcggtgctcggcgaagatctcggcggcggcggcgcgcgcctcgacgtcgaacatgtggtagatcccctcgaagcggaggatctggagctcgcacgtgaggcggaacagcacgcacaccaggaggaacacgcccgtgcggtacacccacgacgccaccgtggccaccagcgccaccgcgcgccacggcacgccgacgccgggaagggggaaagccggctcgacgcgtacggtggcgaagaagaatacggcctgtgcgcggcctcgacgcagagcgacggtagaagcagcgcgtcgaggagcggtaacgcncggtccagctcccgcgcgtacccgcgccgcacgaacgcggtgtcgtcgcggagcccgccgtcgaggaacagcagctgccggagcccgccgccgcggcggaagaagcacgcgagcgcggcgaacgagatcgccgccagccccgtcgccggggcctgcgcgacgcggttgaacgtgatcgccgacgcggacacgggggacgccccggcgtcggcgcgcagcgagagcgacacggcggcggggacggcgagcgccagcgcgaggaacgccgcgtacgacgcggcccgcgcggcgcgggaggagtggtccagcgcgcaccactgcaggaacacccggaagctgcgcagctcgtcgtggatcaccgacttgctccgcgcgtacgccgggttcagcagcagcggctgcgacgacgccgccgccgacaacaacgacgacgaccacggcgacatggaagacgtctcctcctcctcggaatccattgccattggaacagttggataa

SEQ ID NO: 35512 - DNA, 480 bp, Oryza sativa
  Clone ID: PAT_MRT4530_39424C.1
gccttctccaggcctttggactccaccgccgtggcggccgctctaaactagtggatcccccgggctgcacgaattcggcacgacacatgctgcactcggcgatacactacaatgagatggcacggatgcccaacaagcataccaagggaaacctgccacatacacaattaccaatggtctcttggctacgcatgccactttatgatgcggattttgggtgggggaacccgacatcatctctcgtgcggactctgtgcgtggcggatttgtctatatcatcgatcgcattcacaaccatcggggtggcctgcgtgtgctcatcttctatcgaagcaccaaacatccaaggattccaacgactgttttatgccagtttgcaccatgaaaaaaactacctaccttagaacattaatccatgtttttctgttcctattaatccataaatgcgatttttcctgtttataatataacccaaatacc

SEQ ID NO: 35513 - DNA, 1107 bp, Oryza sativa
  unsure (1)..(1107): unsure at all n locations
  Clone ID: PAT_MRT4530_39425C.1
atggattccgaggaggaggagacgtcttccatgtcgccgtggtcgtcgtcgttgttgtcggcggcggcgtcgtcgcagccgctgctgctgaacccggcgtacgcgcggagcaagtcggtgatccacgacgagctgcgcagcttccgggtgttcctgcagtggtgcgcgctggaccactcctcccgcgccgcgcgggccgcgtcgtacgcggcgttcctcgcgctggcgctcgccgtccccgccgccgtgtcgctctcgctgcgcgccgacgccggggcgtcccccgtgtccgcgtcggcgatcacgttcaaccgcgtcgcgcaggccccggcgacggggctggcggcgatctcgttcgccgcgctcgcgtgcttcttccgccgcggcggcgggctccggcagctgctgttcctcgacggcgggctccgcgacgacaccgcgttcgtgcggcgcgggtacgcgcgggagctggaccgngcgttaccgctcctcgacgcgctgcttctaccgtcgctctgcgtcgaggccgcgcacaggccgtattcttcttcgccaccgtacgcgtcgagccggctttcccccttcccggcgtcggcgtgccgtggcgcgcggtggcgctgggcattcatcctctcctgcctcgtcaccatcaccgtcagccagctcggcgccctcgtcgtcgccctctcctccaaggacggcaagagcttcgccaactccggcgacctcctggtcggctcgtcggtgcagctcagcggcttcttcatgtgcctcttcggcgcggcgaggatcacgcacagagcgcaaaggatcgtgtccatcgcgagccagtggcacatgagcatggaggccgtggcgcaccacgccaagtcggcgccattgccggcggcgcccagctcgtcggccagcgacgtggacgcgccgcaccaaccggagctcgggacgacgacgacggcggcgtgcgcctacagaagcagacacgccctcgtgacgtacctgtgccacaacagcggcgggatcacactgttcgggttcacgctggacaggggattgctccacaccatcttcgccttcgagatgactctcgtgctatggattctaagcaaa

SEQ ID NO: 35514 - DNA, 427 bp, Oryza sativa
  Clone ID: PAT_MRT4530_39426C.1
cggcgtgcgcctacagaagcagacacgccctcgtgacgtacctgtgccacaacagcggcgggatcacactgttcgggttcacgctggacaggggattgctccacaccatcttcgccttcgagatgactctcgtgctatggattctaagcaaagtcctctcttaattaattattagctcgtgttaattgttaaaatttcctcaccagtttgcaagaacgcaattatgcaatgtgtcagtaaatgtttatgagtgtggtttgtgtgtgtgctgattattgctgaattaaacccgtgtgttatcgattaattaagcagctggtcgcttcggcgactatgcgtgtatcaacgtatgaatttgtgtgatgtgatgtacccgtgctattctcagtgaaattaatcaatcgtgtattcgtgtggtttgcctagt

SEQ ID NO: 35515 - DNA, 589 bp, Oryza sativa
  Clone ID: PAT_MRT4530_39427C.1
cggacgcgtgggtggcaatggattcggaggaggaggagacgtcttccatgtcgccgtggtcgtcgtcgttgttgtcggcggcggcgtcgtcgcagccgctgctgctgaacccggcgtacgcgcggagcaagtcggtgatccacgacgagctgcgcagcttccgggtgttcctgcagtggtgcgcgctggaccactcctcccgcgccgcgcgggccgcgtcgtacgcggcgttcctcgcgctggcgctcgccgtccccgccgccgtgtcgctctcgctgcgcgccgacgccggggcgtcccccgtgtccgcgtcggcgatcacgttcaaccgcgtcgcgcaggccccggcgacggggctggcggcgatctcgttcgccgcgctcgcgtccttcttccgccgcggcggcgggctccggcagctgctgttcctcgacggcgggctccgcgacgacaccgcgttcgtgcggcgcgggtacgcgcgggagctggaccgcgcgttccgcctcctcgccgcgctgctcctcccgtcgctctgcgtcgaggccgcgcacaaggccgtattcttcttcgccaccgtacgcgtcgagcc

SEQ ID NO: 35516 - DNA, 493 bp, Oryza sativa
  Clone ID: PAT_MRT4530_39428C.1
accttccccccccccttcgaataacatatgagccagaacactggcatgtttatatacccaaaaatttgcattaaccaaaccgattcacgggccacaaatacaggaaaattgcagattcgaaaccacgcagggttattgaacaggaaaaacccgaggcttggatataaaaggctgtaaaaaatatccaggagatgaattccttgataaaccctgtttgttcataagggaaaataaatcatagcattgtatatttaactttgcccataaatctgaacctgtacctgccactacaaactggttacagagcccgtcgaggtactagcagaatagcagatggctgaagtacgaagcagaagcagcagcgcgttaactgtctagattggataggatcggattagtagacactaattcttagaaaacatgccctatttggactaccatgcctcgccataggtggaggacttgcccatctgcgccatagaattggacttgt

SEQ ID NO: 35517 - DNA, 3870 bp, Oryza sativa
  Clone ID: PAT_MRT4530_39429C.1
gcatcaaaaaatcgccacccccgccctgcccactcgtctgcactgtttgcctcctcctcactggccgtacaaatctctccctttttttcactgattatgtatgattcccagcccctgcgcaccaagcagctggtgttagggctaccttacaggacagcaacaccaacaccttagtacagctacagcgacgctgatgccggtttccaaacccaactaacatgtcatcccacaactccacgaggggacatcaaccaaccacaacgctggtcaaaatacatgtacaagttcacggctgattactacaacagcatctgcctatttaaggtgaataatttatcaccggcctaatcagcactcgagcgcctggctggtgcctccctcctcgggtcttcagtttcccctgcctcctggactcgatccttccctttcctttctggggggctcgaaagggggcccagaggtcggtgtttcggcccttgggggcctttaatctgttacctagaaactagctacacggcacaatatttcgtccctaccccgattttaacttagatcaaaaccagcttctgcatttatcgcgtacaacaatttgctttccaattgtgtcttgtttctataaggagggagcttcaggaggttcatgcaagtggccgatgtaggcaagcggtcttcgtcctcctcctccatgccaggaacaccagccctctgaatgcagaattttggttcgaggtactgaaatccaaggagtggtccacgagaacatccggtcacgaacttgagaaactttttctgattatgcgaactgaagctctttaggacctcccagaatatatcaataagctcatggtccggatgatatcctccagaatagttagtgttcgagcgcaagtcatcgatgtccaagctttctagagagccagatatgagaacctggaattcatgttcattgaacatgttaatccattcattcggtattagttgttgaaagcctctcaaaaaatgtgtgctttgggcgcggatctgatagttcaaccgatggttggcgacaagatggatataagtaataacattttcactagttacacgcatatctctcccacgtgggagcagttcttcttcagattgttcaccatattcgttattcacaataacaaagtataactccaattgcgagatatcaccatcataatgctttaaagacagaagatgacgatacaattctggatccaatgaaggcagatcatttaagaagttgtacttgtgttttagtttactcaagaagaatgttgcaaatggcagatcaacaagtatgccctcatagattgccttcccaaggagactgccaagaaaatggaagtattgcagatgctgttcatggaccaatccagatccaggatttgggtagagaagatgatcggctgtctccttgaataaaccgtactgcacatcaaaagcggctcgagtgatattttccatgaaatccttgaaaattccacctccgtcaatcccagcctcttcaacaccatgctcattaacaaacaccactcgaattggtcctttaaggtcttcttcagaaagcatgcttagctgatcaaaagcgtcttccagaagtcgatttcttcttattttgaaccggtgtcttgtcaaagcagaatgggatgttgtcgattgtctagaatttgccaattgtgaagtgaatattttaactctgctggtaaaaggtgctaaaaagggagccagctttataatttcagatgctcgagtattgccaagaagagcctgagagacaaaattttcactagttgcttgttgtgaatagaaatcattggaagaagtaaatgggagcctgttattccagtcttgcaactgtgcaagtagttcagataacccaatccttgccccaatcttgacattctcaattgacaacttcttaaatccagaagggttgggtagcactttcttagcaggagaggcatgtgaaggaataacccatagaagttcccataaagccttctttagaattaaaaccaaggacttcaaatctttaagtgacaaaggtttctcttgttcatagaattccccgttatcaattatcttcaacatgtgcttgtatatgggacagaatacagatacaggtaggagccaacccacggcatctgcaggcggagaagagacaaacttggaaaattgtggccagctttggttctcattacatcgctttatgaagttccatagtgcaggaactatttcagtccggtaggccaggccagtcataatccgctctgcaggcaatgtgttgaatgtgacatgaagaaaagcacatatagatcctacagcttccacctcaatatctgacggtccagttggataagaatagtctgtactaattgtgcctctgaacagagcattcaccaaatgttgaagcaaccttgaatcaattgctgcagtaatttgtttttccaaatcagcatcaagaccattaatgacatcatccatgggtgtgtcatcgtcgtcatctgcccttccggtaggtgatgtaatggttggcaacgcgtccagcagtaacttttcatgtaaaaccatcagagtttcaggaggcgttaacatgcccagagttggggaagggcgtgtcaagcagcatccaatccacgtatgaacacatgcataacctggatgattagatgatatatcatttggaagaacatcagcgcagctaggcaaaaagcaagctatctgatggatataatatttgctgagtccattctccggtataagcttgtggttccgagatattatggggaaattattccgatttccagctgaggaaaatggttagcctgtaacctaacccactactggacaacaacacggatcatcgccaatatgtgaagcaataagcataagaacttgctccagagcagatgtattgttattatgctccaaatttcttgcagtttgcggtatggatataataatccccctaaataagcaatagatcttcttccgctgaagatacccaactaccttgcagttccatgcaagcttaggatttatcaagcaagcggcagtttcgagtaatgaaccacaaggctttggtgtgctttctggcggcatcaaaagctgactgccccaatcatgccttttctgatgtacagtttgcacacaaatgagtgcaagttttttaaccctgtgaatcacaagaggttccagtgaggagtaatttgtaccaccaaagagtcttagaacatctccaccatgtttgacataatataacagcaaattgcagacttgacagagtatagcaatatcactgtctttctttgcattgaagaagaacaggaattgacgaaggaaatcagaattagcaccgaaactgctccaatcaaccctctggcagtgctccccaaaagtagagcaaaagttccctcgaacttccgaacgtgccaattccaaatctctcttccctctgaagcatttctggatcttcgtggcggagctgttctgcaggcgcaggcccagccgccgccgccgctcctcccgcgtctgctcgagcagcacctgccggtcccgctccttgctgctccgcccgccgaggtccacccgcttcctcgccgtcgggtcaccggagaagaacatccccgactcccccttccccttcgcccttacacatttgcctctcctttctggatataatgtgtatatatttcgaatttgaccaaactttgacaaattttggaagaatttaacatatttcggcaagaggttaggagcgccagcccgccggcagcaagtcgtgcctccctgcgtccctagcctgcgctccagcccgaggtcgccgccgtgcctgcctacatcctttaacagcgccat

SEQ ID NO: 35518 - DNA, 5732 bp, Oryza sativa
  Clone ID: PAT_MRT4530_3942C.1
tacatagaatttacgtatttggtcaatgttccaagaatttgctaattcgcgaccgtcgccgtctgcgattttgaatgcgcctggccgcaagacttgtgtgatcgtgtaaggtccttcccatttaggtgagagtttgtttcgccctgcttggctttgaactcgtcggaggacatagtcgccgatcgaaagtatgcgtgcacggatgcgcttctcgtgataacggcggagggtctgttgatagctggctgctcggacggcaactcgttcccgatgctcctcgagaagatttacatcgatatctcactgctcctcctggttctcgtcggagtacttctgtactcgtgtactctgatgttgtagctcgcttgggagcatggcctcagagccgtacacgaggatgaagggtgtttccttataagacgttgtcggtgtggtgcgtacggcccatagtactgatgggagttcttcaacccaccttttgtcgtgtgacatgagcctgtcatagacgcgggttttcatcccttgtagtactatgccgtttgccctctcgacttgtccgttgctttgagggtgagagaccgaggcgaagcatattttgaccccctgcccgatgcagtagtcctggaaatcggcgctgatgaactgggagccgttatcagttatgatgtagtgtggtagtccgtatctgcaaaatatccctttgatgaatttgatggcgttgtcggccttgatttcccccgtgggtactgcttcgatccatttggtgaatttgtcgatcgccacgaataggaatctgtagccaccctgtcctcgtgggaatggcccaagtatatctagcccccagcacgagaatggccaagtcagagggatagtctggagcgcttgcgcgggtagctttgtgtgtttactgtggaattgacaggcttcacatcgctggaccatgtcgcatgcatctttaagggcggttggccagaaaaagccttgtcgaaaagctttgctgaccaatgtccgaccggcggcgtgtgacccacatatgccttcatgtatgtcgaggaggaggttctgccgtcgtcggtcgagacgcatttgagaagttccccgtttggcgctttcttgtatagatcattgccgaccatacagtagatctttgctttacgggttattttctcggccactgtgtcgtcctcgggcaactcctcgctgctgatgaatttgattagtgggatgcgccagtcgtctgtggtttcgatgtcggcaacggcgcgttctgcctcggtgacctccgagctaatgtcgggggtgttcgggctgacttcaccgctaacctctttcaccgatggcttcgtcaggatatcgagaaaagtgccaggctcgagcgattctcgtctggacgcacgtcgtgctaggtcgtctggctcgacgttgtccttgcggtagacgtgtcggacctcgatcccatcgaactttttctctagcttcctgacttctgcgagatacttggataactcggggttagagcatttataatctttgtgtacctggttcacgactagttcggagtcccctttgacgattagtcgcttggccccaagtgtagctgcagctcgtatcccggcgagtagtccttctgcagtgttattggtcgccccctgctccttggctgttgagtgcgccatcgaacgccattgtccatgttgcattgtcgccttggttgtctgatttgttatctggcatagtccgatcggcaacgaagtcggcgagtacctaggacttgatggaacttcaccaagagggaaagaggagacaactgtgactctgtgggcttgaaaatagtggcgtagcttccttgatgtcatgatgactgcgtaaagcagcttttggatctgtgggtatcttgtctttgcatggtggagagcttcgctgacgtaataaactagtcgctgtactttctctctctcgacaacaatgacagtgctaacggagtgtggagtggcggcaatatagaggaataattcttcattaggttggggagcaacaagtacgggggggtttgataggtagcgcttgagtgcaatgaatgcctcttcggcttcctgtgtccatacaaatttgtcttgtttcttcaacagagtgaagaaagtttgtccttgttctcccatcctagcgacgaatctgcttagtgctgccatgcatccggttagcttttgtacctccttgagtcttgtaggcgacttcatgttctcgattaccttgatcttctcggggtttgcttctattcctctgccagagacaaggaatccgagcagcttgcccgacggtactccgaacgtgcacttctcaggattgagcatgaggcgatatcgtcggaggttgtcgaacgtttcccacagatcgtcaatcaatgagtcgcctgtcttggttttgacaacgatgtcgtcgacgtaagcctcgacattgttgccaagctggttgctaagtgcaccctggaccgtgcgctggaaagtattcccagctgttatcagtccgaacggcatcttaacatagcaaaataccccaaatggcgtgatgaatgctgtcttctcttcgtcctcttttgccatgctgatttggtggtagccagagtaagcgtcgaggaagctcaataactcgcaaccggctgttgaatccaccagttggtctattcgaggaagtggaaagtgatccttggggcacgccttgttgaggtcggtgaagtcgacgcacattctccatttttcgttggacttccgcaccatgactggattggctagccactcggaatgaagtacttctctgatgaagccagctttgagaagtttgtcgagctcttctcgtatggcttgtttccggtctggtgcaaatctccgcagtctttgctttactggcttggcatcaggtcgcaccatgagtttgtgctcaatcacctccctggggacccccggcatgtcggacggttgccaagcgaacacgtcggcattgtcacggaggaaggtgatgaccgcgagttcggtcttgtcgaggttggcactggagagtggaacaatcttgatggcgccgtctgatttcggcgtcttgtttgtcttggtcactttcttgggtggctcagtcgtggcgggtgggctgggcatttgctcgaccatgtcgaggcttttcttttcgcatttcaccgccagctttgcgttcccctgaatagtgattgttcccttcggtctcagcatcttaagcacttgatatgcgtagtgagatgcggccatgaacttcgcaagtgcagttctcccgatgatggcgttgtaagctgtatcgaattcagcaacatcaaaggtgatctgttttgttcggaagttgttggcttggccgaaagtcacgggcaacgtaatcttgcccaaaggtctggacgatgattggggagtaattccatggaagggttgatcagttggtgtcaactcgttttgcggaattcccatcacgtccaaagtgcacttcatcttgggtgcagccccctgccatgtcgagcagacttcacgttccactttcttgtattctcgtttggaggagtatgttgtggaaccgccgaagatgtgtgagacgtggaggtcggagtctggatacgctgagtccgattcgtgaggagccgtctcttcgttcgtctcgacaacgcgtactcgcttgcctttttcaaatgccatgtgcttctcgagcgactttttgaaaacaaggcaatcttccagagaatgtctgtccgtcttgtgtatggggcaccatgatttctttgtgtcgctgctttgtgggtctgggcgtttgggagggttcgcgtattctgctgcgaggacttccacttgagctttccttttcccgtttttgcgatttttcttcttgcttgactcagatgtgtccgtggctggtttcttctctcccccggtcttcaacctatcgttcttgtgtcttagcgcatcatcagcgtgggcgcatcgctcaacgatctcgaataatctccgagtggttgtgatgcgtcttgtcgccaactcctgggtagtgtagcgatctctgacaccggatttgaaggcacgaattacagaagcgtcggtgatttcaggaattgtgtttctgcactcgttgaaacgtcgaacatattccctcaatgattcacccgagttctgtgtcaacgcgtgtaggtcatcttcgatcgcgtggcgcttgtatgttccttggaaattggcgatgaattgttgccataggtctgcccatgaagagattgagtagggaggaagatgcatcagccatgaacgtgcagaacccttcaacgcagttggtaaatagttcgctaacgcgttgttgtctgctccggcagcatagagtactgtggagtagacttgaaggaactcctctgggtcggtgcacccatcatacttttctattgctccgggtcgaaatctctcaggccatcggacatcacgtagggaacgaccgaaagccctactcccagcgttgggggcggtagttgccggcggtcgtgtgtccttcgtggatgtctgtgttgtctcgtgtgcgtcgtgcttcccggcggccattgatttgatcttgaagatcgccagtgccgcgaggtggaggggtagcttgtggggtgattccctccgttccggatcttcaccattggcctcgctagttggtggctgctcctggtgtgctacggtagcggcttcttcaaacgcgttgctgaggttagtcaccgattcccgtagtcgttctgtccaatgctcgaggtcaacgttcagaacgggatcgtagggagtttccctcagtatcgcttgaacagccctgatgtgctgggctggagtagtcgattgattccccgcttctgtgttggcgtgcgctgacgtgccaatgtcatcgatagctaatacctcccgcggcgcgctcgttgtcgatgacccatagtcctcgaggagatgtaagactgatggttcgtgaggatcgatatcgattaccccaacgaatcgatctgaagttggagtcgctccttgttccttgctgttatccctgatggggatatatgacttaggagactgagctttcatggcaccgagaaagactttgcagctcgagaggtcgtgattctttgtcttgtgaataggacaatagacatcccgagttagagaagtacgctgaattccacgttctttgcaggcgcgaatttcagcacggacgttgaggaaaacccagcaatcttgcagggtgtgtttcttagttttgtggataggacaccaagaccttgtggcttcggaagtcatctttgtcggctcgtggttcatgtcggaaggacaaggtttggccgtatcagaatccttcttgagcttggatgtcgtcgatattccgttctccgtctcgatgggaggatttttcgacatggaatcgccttggttcgtagccactgcgttctcgtctccggtcattggaggaccgactgagatcggcgtcgtggtgtaaaccgggaagacgatttcgccaacttgagtccataccagcattgttgaagcagggagtacttggctgaggctggtgctgacgttgttgtcgacaaagctggatgacatagtagtagaaccttgagtaccaaggccctctacctggcgcgccactgtcgacgggtgatacccgtagaccggatatagaaggtattggggtacgttggtacaaggatctacgtagtacgacat

SEQ ID NO: 35519 - DNA, 423 bp, Oryza sativa
  Clone ID: PAT_MRT4530_39430C.1
atagtgcattcgttacacgttcttgggcatgcgtcccacacaaaaaggcacactggatcacaggtcacgaagggaggggacagtacccccccccctacccccaacatgcaagatacatgtttgttacagcggcacggtgctgtgtcgctcgactcactctggtgctgctgacatgactgcaagcagcaagatggcgtcacttagcggcacaaacagacaagcatccacagctgctgctgccgttgctgcaccaagagcgtctttgttggcaggtgaccgcgtcgcgtgcacaacattgataacgacggaatgcgtaccatttgagtgttggataatactggcagggtaccctggccagtcacattacatgccacttaactactgccgctatgtaagttgagcccctgtgcagaaagacaacag

SEQ ID NO: 35520 - DNA, 494 bp, Oryza sativa
  unsure (1)..(494): unsure at all n locations
  Clone ID: PAT_MRT4530_39431C.1
cccacgcgtccgcacatacgtccacacctacggctacatgggcaggctcaaaggcatggacaacggcatgaacgacctcatgatcgacctcggtgtaaactagcgcgtctactggctggactacaagaagcagctgcagaagtctgagcaatggtacggggaagtctactgatggatatatatatgtaaataattaataaatccatttttatgcatacttgcatgcatgcatgcccaacctgcatacgccatcttgtggtactatatctgatctcatctgatgatatgcttgtaaatattatactgacgattcgtggactataaagtggtgttgcattttctgctgcnnaaaanaaaaaaaaaaaataaaaaaaaaaaaaaaaaaaaaaaaaaaaaaaaaaaaaaaaaaaaaaaaaaaaaaaaaaaaaaaaaaaaaaaaaaaaaaaaaaaaaaaaaaaaaaaaaagggggggccnttgggggggccccttttta

SEQ ID NO: 35521 - DNA, 184 bp, Oryza sativa
  Clone ID: PAT_MRT4530_39432C.1
ctaccacgtgttgcggtggcgcctgatcaacgactggctcgacggctgcggttgttgatgggcaccctagctctatgagcactggcgaggcacgggggacacagcgcacgggcctgtgacgaaatgggccacgctcccgaggctgagctactggtccagcgtctggccctacggtgaggcgtgc

SEQ ID NO: 35522 - DNA, 332 bp, Oryza sativa
  Clone ID: PAT_MRT4530_39433C.1
ggaaagaagaatcatgacgatgttattgcagcataattccaccgataccaaacatttcgtgatgtacctttacaggattggcgttcctttcttttggagtattacaaagaaaatcaaagaattggataatacacacacgtatcaaaaatggggaaaaaatgcgatgtaactgcttttccagttcacaaaaagcccaatcgaatatcgtcacttaagaagtattaataaggatctgtaaatgctactatcatgcttttactggggttaggtatctctcatgaatcttcagggcccctttgcatgccttttttgcatccagacttccagtgata

SEQ ID NO: 35523 - DNA, 337 bp, Oryza sativa
  Clone ID: PAT_MRT4530_39434C.1
atgaataatggtttacccccttccccatttataacttggggccaaaatgggggtggggggggccaatttaaccatggggcttaccaagtttggcccacccagaacaacaatgtttgggtttaaaacacctgacaattccataaccgagggttccaaaacacttgggcttgggccccccccattaaaatcaagtaaaccctgttccgaaaagagaagaccttcaaccattttttttaacaccaggatttgccggcgaataccctattgggacaataaatagggttcaagggttgacgggtgcacacaaaaccggtagcaacggttggggtttcccttt

SEQ ID NO: 35524 - DNA, 203 bp, Oryza sativa
  Clone ID: PAT_MRT4530_39435C.1
gtgccaaaccgacggatctacccagtagtcgcactaattcctgtaggttgtactaccctgattccttgtcgctccacccttgtggtacttcggtatccgtgctctctgagcgcgtataccaaatatcacacatacaccgttgattgtcgaaaatttgggaaatggatttgagaagccttgaaaacccgacatatggtgtcggt

SEQ ID NO: 35525 - DNA, 609 bp, Oryza sativa
  Clone ID: PAT_MRT4530_39436C.1
atgggcgcccgtgccggcgcattatccgtcgctgtcagcggcgaccgtgtcctgggacgcgactgccgagtcgtactattgtggccagcaggggaggccggccaccggcgccgccaagtgcgccgccggcgccgggcacgacgcgctcctcgaccgccgctgcgccaactgcggcaccgcgtccacgccgctctggaggaacggccctcgcggacccaagttcacttcgcggtttcgccgacgtacgtcgtgtcgctgacattgccgccgtcgtacgtttctctgcagtcgctgtgcaacgcgtgcgggatcaggtacaagaaggaggagcggcgcgcggcggcgacgacgacgacggccgacggcgccgccggatgcggcttcatcaccgcgcagcgtggacgcgggtcgaccgcggccaaggcggcgcccgccgtgacgacgtgcggcgaggagacgtcaccgtacgtcgtcggcggcggcggcggcggcggcgaggtcgcggacgcggcgtatctcgcctggcggctcaacgtcgtcccaccggcggcgacggcgacggcgttctcggtgtggccggagcgagctagcctctaccactacaactag

SEQ ID NO: 35526 - DNA, 585 bp, Oryza sativa
  Clone ID: PAT_MRT4530_39437C.1
atggaagggatgagcaagctcgccggaggaggaggcgacgtgacgttcgtcggcggcggccgtcgcatggcggccgcggccgccgcggcgctccggctcgtcgagctggacctcatcggcacggtgggcgccgccgtgccggggcaggcgacggcgcctcgtctgctcgtcgtgtcgccggcgccggcgaaggaggaggaacgcgacggcgacgacgacggcgagccgcggcagctgttcgcgtgccactactgccggcgcgagttctacagctcgcaggcgctgggcggccaccagaacgcgcacaagcgggagcgcacgctcgccaggcgcggcgccggcgcgggcgccggcggcgagcaagcgtcgtcgtcgtctttcgccatccaccacggcgcgttcgtgtcggcgtcgccggggtggatggcgcgcgtgcttcacggcgaggcgccgccggcgatctcggtggccggcgacggcggcggcggcgagcggtggtggtggggcggtggaaacgtcggctactactggccgcgcgacggagacgatcaaacgcgtcaactcgacctgacgctaaagctgtga

SEQ ID NO: 35527 - DNA, 888 bp, Oryza sativa
  Clone ID: PAT_MRT4530_39438C.1
atggcttcctccaccttctcgctcttcttcccgatgtccaatgggcagtgttggccgccgtcgacggtggaggagtccgcggcctacgacgaccacagcaccgtcaccacctctccttcctcgccttcgtcgtcctccaccggctccgtcgactgcacgctctcgctcggcacgccgtcgtctcgccgcgccgagcccgtcgcggcggcggcgccagcggcaaaccatggggcgcccgtgccggcgcattatccgtcgctgtcagcggcgaccgtgtcctgggacgcgactgccgagtcgtactattgtggccagcaggggaggccggccaccggcgccgccaagtgcgccgccggcgccgggcacgacgcgctcctcgaccgccgctgcgccaactgcggcaccgcgtccacgccgctctggaggaacggccctcgcggacccaaggttcgtcgccggcgacgctcgctctcgccgtcgctgttctctatctctgcagttcacttcgcggtttcgccgacgtacgtcgtgtcgctgacattgccgccgtcgtacgtttctctgcagtcgctgtgcaacgcgtgcgggatcaggtacaagaaggaggagcggcgcgcggcggcgacgacgacgacggccgacggcgccgccggatgcggcttcatcaccgcgcagcgtggacgcgggtcgaccgcggccaaggcggcgcccgccgtgacgacgtgcggcgaggagacgtcaccgtacgtcgtcggcggcggcggcggcggcggcgaggtcgcggacgcggcgtatctcgcctggcggctcaacgtcgtcccaccggcggcgacggcgacggcgttctcggtgtggccggagcgagctagcctctaccactacaactag

SEQ ID NO: 35528 - DNA, 623 bp, Oryza sativa
  Clone ID: PAT_MRT4530_39439C.1
atggcgaaacttttctcttctctttccagcttctgcttgktgatcgagtcatcmactgaacccaagacagagcagactgttacacttcatcaaggcaatgcagtcctcccaacaccccaggtccacaatgtgataagccaggagcaacgtgttgtagttatgctttcgaaacctcgggagcggcgtcggacggtggggacggtggtggggagctgtgggtggttgccaccagttgggtgggagcagcatgtcgaggacagaggaagggcggcggtgggaaagcggagacggttgcgagtggcggagagcggacgtggcagggagcgaagacggcagccttcggcggttgccgacatggactgggtaaggtgggaggacctccctgacaacgtcctcctcggtgtcaccgcccgcatccccgccatgatgtgcatgccgaccgtgtgctccccctctgccctcgcgccgttacgccgccgcctcctccccctcagctgtgtgcacagcgccgctcgctttgcctccgctccatccttgcgcgctcccccctcatggcatgtcgcggccacggcgccgcggccactgccgtccccaccaccattgccgccactcctcaccgccat

SEQ ID NO: 35529 - DNA, 412 bp, Oryza sativa
  unsure (1)..(412): unsure at all n locations
  Clone ID: PAT_MRT4530_3943C.1
aaaaaaatttaaaaaaaaaaaaaaaacgggaaggaggagaaaaaaaaaaaaaaacgggcggccgcccaaaaccaaccaacccaaccacccccagccaacaacgtcaaatctcttcaatagagccaccaaaaaccaacccactggccgacatacaacaacgtcactactttaaaaaccggaggtggacccaacttaacctccatgcaccacaaacccctttcaccaactaccataataacaaaaacccccccacctatcccccttaccaacanttacacatccaaaatnacaaatccaaccccccctncatcnccccattaaccccccctnttttntttactacccacannacaaccccaccacttaccatccccctacccccccctcctttccctttcctcccttcctttct

SEQ ID NO: 35530 - DNA, 535 bp, Oryza sativa
  Clone ID: PAT_MRT4530_39440C.1
caccacacaaaatttttttaaaaaaataaaaagttagaaaaatttatgtatagaaatactatatataaaaaatttgattcaaattcaaatttgaatcgggtatgtaaactttttgcgcgcgtgtggctccaactcggccgccgcggtcgctgtaacgtcccgcctctcccaggctgggtccgcttacatctggcagctttcataggtcatagactgtcctcacagaccaacacaagtcttttctgcacactttgtcctcactcgtgcgcacccgggaagaatttcccaattggtcacccatcctaaaattactctaggccaagcacgcttaaccctggagttctttggagatcggcttccggaaaagaagttgcaacttgttgatatgagtattctattaatcctattaagccctaggctaggatgtcacagtcggccgccgctcctcctcgtcggcgagcacggagaggaagcagatgccgctgccttgctcccctcaccgccgccaattgaaattagagatatctatctatct

SEQ ID NO: 35531 - DNA, 384 bp, Oryza sativa
  Clone ID: PAT_MRT4530_39441C.1
gggcaagcaagctttgggatattcttattatatttaacagtttactcagacgaaacacagggttctttttttcacaacccccccgggcattggccatataagggggagagcccccaacatgaaggacttttgttttttccgacacaaagcctaagctcccacgggattcggacgttttgatattgataagggccacagtcccccttaagggctaaagggtaaagggagggtgtaatttccccacttgtagcccacggggggggcggccatttttcaacccttggggatggggatgggaaccttcggtttgatcccggggaccctggccgggttggaaagaattacggggcacagggaggtggggctttgcccgatggggggcac

SEQ ID NO: 35532 - DNA, 660 bp, Oryza sativa
  Clone ID: PAT_MRT4530_39442C.1
ggccgccccttttttttttttttttttgtgaatgtttgtattgtttagatatttgtgctgactagttatgttcaggggcttggaagcttgattcccgtaagctcttcacaagccttgacgacagcttcctgcttgtctagatccgctgtcaaggcgtgaggctgagccctctccttcttagggtcaaagtaaacaccagtcaaagaagtatcgtaatcaccctcagccaacatgacatatgtctcgataccatcctccatcttgccgggagcgtcttgacctgcaagcttggtgggaacgtatccagggtgcacagcaatgaccgaggtgtccttgaaacgtcgcgcaattgcgttgactaggaggacaacgtggaacttggcgtcgcagtatgctgggaaatccttccactccttctctccgcgctccaaccagaagatgtccttgagacttgtgtcggcctcatggtgcagaacagaggcaataaagatgagacgcttgggcgggttgaggagggctgcgaagatgtatggggagacaaggttgacaaagacgcttgctggaacaccaagatctgactttcggaacggcccgtagagtagtccggcgttgagaatgacggcgtcaaaggtgccgatcgcattcgcttcgtcagcgagc

SEQ ID NO: 35533 - DNA, 269 bp, Oryza sativa
  unsure (1)..(269): unsure at all n locations
  Clone ID: PAT_MRT4530_39443C.1
ggcccgaggcttggtgagggaaaattttcgtcacatggaagattatattgaagctgtccctggaagcaccaaaagggtttggttttctctgtgttgnaccntttttcatttgcccggcccttgaaatctatnctgcnctaattgcagatgtgccgagaaagatatatncccagaagcaatgtttgtcccatcatttttcnctgtagcaaattttgatgagatcaatggctccagctcctgtgaaaaaaaaaaaaaaaaaaaaaaaaaaa

SEQ ID NO: 35534 - DNA, 330 bp, Oryza sativa
  Clone ID: PAT_MRT4530_39444C.1
atggagcctcagctgaacaactcccccaaatttcgttcaaagcaaactactattaagcccaaaagagaagctttcagatctaccagagaagctgagtttgaggcaaagaaaaaaaaggaacaacgaggaagaggatgctcgtacctgtgctcaccgacaacgaggcggtgggaacaacgtgcaaggacggtggcgctggtggctcgcgggaagcgggtgacgaagacctcggcgttgctcgacgcgggcagagatgaggaacttgtggggagtcgagacagagtcgaggcagagttgcctatggcagaggagagagggatacagaggtga

SEQ ID NO: 35535 - DNA, 278 bp, Oryza sativa
  Clone ID: PAT_MRT4530_39445C.1
acgcgtgcggaccgacgacacgattacgcagaaagccattgaagtcgatgcagacatgtacggaatagaaccaatatctgcagattggacggacagtaagatgaccatcatcggtgaaatggacacagtgtcgatagcaaagatgttgaagatgattgggaagattgacatggtgtctggtgggcctgcaaaagaggagaggatgggggagaggagaggggggaggatagaggggaagagggaggagaagaaggatgataagttagtggaaatgtaag

SEQ ID NO: 35536 - DNA, 695 bp, Oryza sativa
  Clone ID: PAT_MRT4530_39446C.1
aactagtggatccccgggctgaggctcctccccctcctcttcgccgcctccaaagccctccgcctcctctcccacctccagcgccgcacctccacctccacctccctccccgtccccgtcgtcagcgtcggcaacctcacctggggagggaatggcaagacccccatggtcgacttcctcgcccgcgccttccaccgcatcggcgtctcgcccctcatcctaaccaggggctacgcaggcggcgatgaatccaggatgctccgccgccgcctctccgatacctccgccaagattggtgtcggtcccaatagagcggctgtcgctacctccatgctccgcaaatatggtgctcaaattggagtcgccatactagacgatgggatgcagcacctcagcttgcttcgagatgttgacattgtcatgatcaacgccctcaatccttgggggaacaaacatctcattccacgaggacccatgagggaaccactcactgcactcaccagagctcatattctcctcattcatcatgctaacctggtttctcaaccacaacttaaaacaattctttccacggtccacgacaatggcgcagcatgtccagtcttctttagtaaattggtaccatcgcatatttttcaagtcaaccaacccatgcacaggcttcctcttcatgtgctgcacggtataatcgtgct

SEQ ID NO: 35537 - DNA, 435 bp, Oryza sativa
  Clone ID: PAT_MRT4530_39447C.1
atgctcgtcgcgctggaggccgggggactcttccgcggactcctcctactgctgctgtacagcctctaccccatgctgctccggcttggccatgaccgagcgaccaagctcatggtcatggtgagctttgccgacgtcaggaaggaggatggtcgtcgtcgttcagggtgggcatcgcgctcgctggtgccacgagccatgaggcccatctgcctggagatggcgaagacgactgtcactgtgggcgtcggcatggcaagagataggcagaggccgccgatagcacaagtgcggtcgttgtgtagctgcatagtccacgccgccgtcaccgcagaactattgcgagacagtgtcgaagtgctcgaggaggtgatagatgggtgccatatcgtccttggcagggttcagcatgccactgttgaagatgatctctag

SEQ ID NO: 35538 - DNA, 608 bp, Oryza sativa
  Clone ID: PAT_MRT4530_39448C.1
tcaagggggagtgttctgaaatatttgggtgatctcatccatatatatggatagtgtaacaaccaactcagggacacgacggttggtcatgccccacacctcttctcgcctcacggcgattctagcaacagacgtgatggttcccaaaccatcgcgcctccggttgctgcctctctcccccatatatattgtaacactcctccctcgattcgatggagtcaccaccatcgccatgtcgggcgccattctagggttggtggccaccgccaccatcctcggcgccgcatttgccgtcgctgacgcacctccgactccaccaccacaagcgcacaccacgagtgcaccggcgccccgctgcgtccaggtccaggctccatggatggactgtggtggtgacgcccgccggcgagtagtgctccctcccaccggagatgcagtcgccgccggcaccgttccccgttcgccgctcggcctccccactactttccgcgccattcctcatggctccccgagctacacgctcccgaacggagtgggggggagggggggacagcgtccgaacccgatcggcctcttactccgatgaggagagggggccgtcggcttag

SEQ ID NO: 35539 - DNA, 643 bp, Oryza sativa
  Clone ID: PAT_MRT4530_39449C.1
accaaagcgatcagagagaaagggtcgacaatgacggtccggctacaacacactacaccggtgaacggcataggggcagcggttgccggcgaaccacggcacaataatgcaaacggagggcaccgggaggaagagcacgagacgacggtccttaccaacacttacgcgatgacggacagcgacggaagatggccggcgacgagcttcgaagggcggcgaggtactgtccacggcggcgacgactttccggcgatgtgcggcaacaacggaggggtggccgggcttcacttcgcagctgcgaatccaatggaggcgacggcaaagcttggcgacgacggaaggagcagcagtggcctcgccggagatcaaaatgcggcggcgagcttcgggttgacagtgtcagcggcgctctggcgatcttcggcggaaacggaggacgggacgaggacggcgacgacctcgcgatgctgatgaaggagacggcgaccgacggcgacgaccgaagcgacggctaggggcggctggagcggcgccggcgcttggagagagaagaagagcgcggggagagcgattccgacgacggcggaagatggaacttgaggggataggtagaggacgacgagggggtcctttatataggcac

SEQ ID NO: 35540 - DNA, 2517 bp, Oryza sativa
  Clone ID: PAT_MRT4530_3944C.1
atgagaacattccggactgggcttagtatggcatatttgaagaaaacacaatggatggatgttgaagggaatgagggtgctgatgaacttggtcaaatattgcgggacttacaggaggactgcgaaagtgaaaagaaggtgcagaaactagagcgcatgttagcggaccacagaacagcgttgtacccaagttgcgagaagggctacaaaaagttgagtaccatcctagaattcttgcaatggaaggataaaaatgatgtgagtgacaaggcgttcggcgagttattgaaactcgtaaagaacattcttccggaggggaacgaattgcccgaaagtacatacgaagctaagaagacagtctgccctctaggtctggaacggaagtacatcatgatgccgattattattcaaggcccgaagcaacctggtaacgacattgatgtgtacctaagaccattggttgaagaactaaaagtgctgtggtggaaagagggcgtcgccgtgtgggatgaggacaagcaggagcaatttaacctacaagcgttgctattcgttacaattaacgattggcctgcacttagtaacctatccggacaatcaaacaaggggtacaacgcttgcactcactgtatggatgaaactgaaatgttcgaaatggtgaaggatctgaaagtagtatttgtaaaggggcctggcagccaacctatagagagcgaagatggtcacgcggcgatgtggaagaagaactctattttttgggagctaccctattgggaggtcttggacgttcgccacgcaatcgacgtgatgcacctcactaagaacctttgcgtaaacctgatgggcttcttaggtgtatatgggaagtccaaagatacactcgaagcatgcaatgatctcaagcatatggaacaatacgagggccttcatccagaaccgaatgagaaaggaagccattacttgagtccggcgagctacaccctgagcaaggaagagaaggatagtatgtttcaatgcctagagagcatcaagctgcttcctgttataattcgtggtatccttcctgataatgtgcgggcaacaataacgaagctttgtgctttcatgaacacaatttcacagaaagtcatcgatccagaaagtttagctgcccttcagcaggatgtgaggtacataggtgttctaaagaagtatgttcgtaaccgctctcgtccggaagcaagcatcgcgaagtggtatggaacagaggaggtcattgagttctgcgtagattttattgaagacctcgagccaatcgtggtacccgaatcaatccatgaggggagactacggggaaagggcacacttggaaggagagcaattatgactgtagacaacgatttattccgtaaagcacatttgacggttttgcaacaatctttgttggttgctccttacatcgatgagcacctggcgattgttcgctcagaaaacagtggcaagtctgatgcctggattaaacgccatcatattgatactttccccgcttggttgcgagaacacctcctgggtaacgagacgattgaccgacaactagccttcttggctagaggaccctccggctcggtaactacattccaaggttatgaaatcaatggatacactttttacacaagagcccaagacaaaaagagcacgaaccagaacagtggtgttcgtatcgatgccataggacatgatggtccaactagcacatattacggtgtcatcgacaacatatgggaactagagtatggacccctgaaggttcctctgtttcggtgccaatgggttaggctgactggtggaggcgtaatgattgatgatagtgggatgacaacggttgacctaaacaaggttggatactcagatgaaccatttgttctagccaatgatgtaacgcaagttttttacgtgaaggacatggataacaaaccaaagaaggggaaagggcccgatgagcccagacgccacgttgttctcccaagcaagaggaaaatcgttggagtcgaggataagactgacgaaaattacgatctgtttgaggggcaacctccgtttgtagtgacggttgacccgagcatcctggagaaggctaggcagagattagccgatcgccgggaacgcaaagacattgaagctacaatccagcacaatcggcagcttgtgcatgtagagaagtccaagcttgatcagctgtctgaaggcccgatcaaatcaaatatcgatcggcttgaagctcgtaagattgatctcatggcacagcttcaagaatgcaacgctgagttggatatggagcacaaaaagctagccgatctcccgcaagatattgaagaacagaaggcaaagctaaaatcggctatcaagaatgtcgctgatatgaccaagtccttgaaagttatccctggaactgacactcaagatgcccaagccatagaagatgtagaacatattaggcagaaggctatatcggctatcaagcaatacttatcccaataa

SEQ ID NO: 35541 - DNA, 477 bp, Oryza sativa
  unsure (1)..(477): unsure at all n locations
  Clone ID: PAT_MRT4530_39450C.1
ggattatattgttgttatttatcatcatcaaccgatcgcctttatatcattatctacattggacatatagccgattgcttaaggccctatcgctatcggctggtatcgacatcggctaggattgctccatcgcttgtcagccgatcggttatttgatctactatttatatatcttttcagttgcaggattaaactgattggcacgctcgtatctcatcaagtcttggacctgcactggagctaagcagatctcccaggccagtgtgtatttttggcgtcaacagcgggttatgcacgcgagaccgagaagacgcaccacgacggacaaaacggattgtgatgattgtaaaaatatgaatatatatatatatatatatatatatatatatctctctatctatagacctgttgaagtctagcgatacacaggncgaagtctagctcaaaggaccagcagcgggcaaaaacgcatataca

SEQ ID NO: 35542 - DNA, 140 bp, Oryza sativa
  Clone ID: PAT_MRT4530_39451C.1
acaacctttatgtcaaaaatcatttcgagaccggaagcacaccagaaataaaactagtgatcattggatcagacacacagtttgccaactacaaacagctatcctcaccacaacaatcatggagattcactctaatgtag

SEQ ID NO: 35543 - DNA, 488 bp, Oryza sativa
  Clone ID: PAT_MRT4530_39452C.1
atgataccgacgagatcgtagtcgagttggttcaactagatcacccagcgacttggctcctgtaggctccggcttcgtaggctgtggtggttgtcttagctgtgagattcgatgccttaggtccttccgggggtcctatttataccgcaggtcagttagtcaccaagtaaaactcagagatatcggaccctacacgatacaatgacgacccagttctgtccgagtaggactccttccatctgtggactccgtgatggatttccttaatgtgtacagaaagcgtccgtatacgcgcaggtataccatatcaatacacgacgtatatccaaaggtagagggtataccttatccgtaactctgacacagaccacagctaatccatggattatgaactggtttgcctccacacggaggggaatgcagaagctaaacatgccattcaacaccatgaaaaataacagaacatcaacagttatttgtgtctccat

SEQ ID NO: 35544 - DNA, 615 bp, Oryza sativa
  Clone ID: PAT_MRT4530_39453C.1
atggtgggcagcgggctcctccttggcagtggcgcgcagggacgcgcggtgggacaccgccgccaccgcggctcctcctccgagcggtcgtgccgcgccccatcccacctccctgcgccaggatcggcgacggagactggcggacgcggttccatcgaggacgcaggcatggatggcgaccgggaatcccgctccaccagccccttctactcaccaatcccgctccaccaccccagatccaaaggcgagctcggtgatgaggcatggagctcgggtcggctgccgcgcgcgcgtcggcagcaacggcggtggccacaacagcaacaatgccggcacaccagtgccggcgccggtgccggcgtcgtcgtcgtcagtaagcatggggaagccgagccgacggccgcggcggcgacggatgtggctgcacgagagcgaggcggtggtgatggagttgacggagccggagctggtggacagcatgatcgagatgttgtgcaccaatggcgtccggccgttggaggacctgcaagacctcctcgcctgctacctctcgctcaacgcgccgagcaccaccgcaccatcatcgcgctcttccgccgcgtggccctcgtctag

SEQ ID NO: 35545 - DNA, 300 bp, Oryza sativa
  Clone ID: PAT_MRT4530_39454C.1
atgagtgcaattaaaattaactgcgacaaagtttccatgagtccttaccaccgcaaggtgagtatcgctgtagcaggcaacctggacggtagctgtgaagttgtggtggctccatccaagccatggttccccgaacttctatctcgctctagaagcttcgtgacattcaggtggcctgatatcaacctcctgggaatccaacagcatgacccaattaaccgacgcaatctccaaaatcgccttattgccatgcagatttcatcaaaaccagagcagattccccataattcaactgagtga

SEQ ID NO: 35546 - DNA, 302 bp, Oryza sativa
  Clone ID: PAT_MRT4530_39455C.1
atggaatacgttgtagcacttcaccttcgagtgactccaaaaggatatcaaactcagggaacgtgtgtaatctacctaaggctaagactatccaaggacaacaaccgttacgtggttccgtctatggctctataatgtatccgaacatggaggatcactaggacgggattcagggctgtcatcacctgtcgcctacctctgacaaatccgtgagatacccaaccaacaaaggtaatctctaacgtagacaccacacctaagtttttaattactactctaatactagcgcagggctgcaggaa

SEQ ID NO: 35547 - DNA, 352 bp, Oryza sativa
  unsure (1)..(352): unsure at all n locations
  Clone ID: PAT_MRT4530_39456C.1
ttggcccaccccttccgcaccccttccgttacttgaccaaacttccctacttatatttcccaacttccccatccagtccttaagctttatattgccgcttttaaccggtaaggggtggtggcggtgattgtggttgccctttttttttgnnttttctttttttatnttttatattttattttttatntgctggcgaggagagcttcttgccacctgcgtgggtcttgtgtgctctatgcctattcaatggcttctgatttgtgttccctcatggcattgagacaactttacatgctttattcattcaaaatattatgcttttcctccctttctcaagatcattctcatttga

SEQ ID NO: 35548 - DNA, 302 bp, Oryza sativa
  Clone ID: PAT_MRT4530_39457C.1
atggccaggagggacagaggaggaggcgtcggtccctcctctctcgtctcccgtcttctgtgtgtagataggagggtgggacccattgacttcttggaagttgcagaaatcaagccacacaagtaaaaaaacaatatgcaatatgcgacctcttccaacaaatggaccgagtagtagcgcactaccagcgccaaaagctactcagcaaacggcacgacgaccatcgtttggcattagagccgatggtcggttcaggtgtttcaacgctttctgccgccgctgacaccgacgccgacgaaaat

SEQ ID NO: 35549 - DNA, 420 bp, Oryza sativa
  Clone ID: PAT_MRT4530_39458C.1
ggaaatgctaaacatgcagcagtggtccgcacatctgggaaatgaacttgttccatgcatgcatgtgttttaaatccgtttcacaaggttcatcagagagtagcacttacggttcgaagtagacgatgatactgttgtaagaaaaacacaacagcaacttattccacaatggaaaaaaaaaccctctatatactactcccgcaaaaaaaaaaagtatgtttaacacttcaagcttttctttctcaaaagtaaaggaggtttgtgcttcgtttcattgagaaaaataaaaaaaagggaaaaataattacaaacataaggaacaaattaaaatggccacactcacataaactcgttacccagaaagccatcattagtcgtccaaattaattgacctacatacaaagaaagcttacagagcgc

SEQ ID NO: 35550 - DNA, 1473 bp, Oryza sativa
  Clone ID: PAT_MRT4530_39459C.1
tcacttccttcctggaggtgagatcttcgcctgctcattggcggcgggccacgtggcaccagatgcgagggcttggtgtgctttctccatcatggaccgcatgtatttctcctgggcctcaaccctcatctggaggtgcttttctgcctcttgttgttcttggctctgggccttcttatctgccccattcacatgcacgttgcggccataggagatgttcctagccttggctccaacaattggactactcatcctctcacttcctacaggtagcactgtttgctgtggaggtggtgatctcatgtcaagcttagagctcatctgaccctcaaaccccttactgcccatggagtctcctcctgacatggtgatggcctccatcatcatcgtcgtcgtcgccggcgccgccatctggagctgatgatcgccggagatcttcgccggctcgccgccgccgtcgtcggcgccgggccacaccattgggctcttcccagtactggagctgtaattgaatgccaagaaggtatcaattgatggcctgatctccatctgctcatgctgctgatgcaggtgatctagatggcttcctccatataactgcagatcatcttgcagagaagggaagctcatggagctgccaatgtcaaggacagcttggctgcctagagatttgtatcctgcgtgccacgtggcgcaatctcctgaggacgagatggcttggtatgctttctccaggatggtctgcatgtatttcccctgggcctcaaccctcatctgaaggtgcttttgcacctctaattgttcatggaatcttctctgaacttccatcttcatccttagtgcctcattcacatgcacgtcattcatgcttcttcccatgatgcccgaagaagacgctgcattccgttgcatgtccattgcatccttaaccgagtggtcgttgaaatccttgtgctgcttcccaagtctgaatttctgaagatggctcttgagatggtaaagtgtgagtcccttgactcccataaccctcatgatcgtctttggagtcgccttgtccgggcctccgagctgggtgacggcgtcgacgaagcggtcatggagctcgacggtccagcggaggcgtggcttggggtcggtggtgaggacgaggccggagtcaccctggacgcacaacggcggccgatcattcgagctcgccgccgccgcggcgccgccgacgccgacgccgccactgagctgctgctgcttcttggaggaggaaggagaaggagaaggagaagaagaagggaacattctattctcctagctagctttcctcctcctcttaagaacctctctctctctctagactcactagatctcctccctctctctctctctctgttacagatttggaagagattcaagaacaaaggaatagggttcgatcctctcgcggcacgcggaacgaggaggggagggggaggaggagag

SEQ ID NO: 35551 - DNA, 765 bp, Oryza sativa
  Clone ID: PAT_MRT4530_3945C.1
atggtgaggaccgtgactatgttcaaagaggaacagaggtctagtgcggtcgggataccatgtgagaaggtgactagagttgggaatcttggaggtcaacttcggtcaacggtggggatccggactaaactcagggaggagttgagatccagacggtcaaaaataccgggtgacgaagttggatacgagatgacatacgatggatggatatcgtgtgggagagatcttcgcaacgggcttcacaaggctcggcttggttggcccatgtggcagtcggtccatgaggcatggcagcagcgcaggcggcagtgcggcgatctaaccggcggcgtacgagcagtccgaccggcggcgacaggactacgtcgagatttccatcgatttcaggagtttataactaacaagtcactacgatcaccaaaatgtaaatcttgctatgaggagatctctccagcaagtgcagaggcgaggagcttgagtgccacacatctaggaacacggccgagcataggcggagatgaggtcggacaacaggggcacaccgggcttgaggtacaactccctgaggtcgccaaggaggtgctcgaggagcgtggcatcgggcgggtcccgcgtgttgatggcgggttgaagaacaccaacggaagggttgagtccgccatcatcgtccacactcgcggaagcccttgccgcattgatggactcgagcaggggccgtgccttgtctgccgtgattgtgttgagcgtgggattccatggctctag

SEQ ID NO: 35552 - DNA, 249 bp, Oryza sativa
  Clone ID: PAT_MRT4530_39460C.1
atggagagcttggagaggaggggtcaccggaagttaaaaaaatggattctgctcatcaaggagattcagtttttggcattaaagacagagattgatgaggtagatgaaggaattagtaaaggggaattagaggaggctttgctgagaaggagaaacgctcatggtataaagacgaggcagaagcggcgtgggaggcaaaccggccttcagcgaattgggcatgttcgtggggaagtcggcttggtctag

SEQ ID NO: 35553 - DNA, 1404 bp, Oryza sativa
  Clone ID: PAT_MRT4530_39461C.1
ccggccgggaccgatcgcgcccgcgacacgtacgacggcgacggcagcggcggccatgtcgtcggacgacacgacgccgacgccgctggggcggaggacgaagccgaagccgccgatgtcccgcctgatgcggctgtccctcaaggccgtcgactgggccaccgacgccacgcgccgcgccgacggcacgctcaaccgcctcgcgctgtccgtcctcgacccgcgcgtcccggccttctcctccccgtgccgcggcgtcgcctcccgcgacgtcctcgtccacccgcccacccgcctccgcgcgcgcctcttctacccctccgccgccgccggcaaggacgagcggcctcctcctcctcgccctctccccgtcatcgtcttcttccacggcggcgggttcgcgttcctctccgcggcgtccgcggcgtacgacgccgcgtgcaggcgtatcgcgcggtacgcgtccgccgcggtgctgtccgtcgactaccgccgcgcgccggagcaccgctgcccggcggcgtacgacgacgggatcgccgcgctgcgctacctcgacgaccccaagaatcaccacggcggcggcggcggaggcgtcccgccgctcgacgccgcccgatgctacctcggcggcgacagcgcgggggggaacatcgcgcaccacgtcgcccgccgctacgcctgcgacgccgccgccttcgagaacgtccgcgtcgccggcctcgtcgccatccagcccttcttcggcggcgaggagaggacggactcggagctccgcctcgacggcgcgcccatcgtgaccgtctcccgcaccgactggatgtggcgcgcgttcctccccgacggctgcgaccgcacccacgaggcggccaacttcgccgccccgtccgccgcccccggcgtcgactccccggcgttcccgccggtgctcctcgccatcggcggctacgacccgctccaggactggcagaggcggtacgccgagatgctgcggggcaagggcaaggacgtgagggtgttcgagtaccccaacgccatccacgccttctacgtcttcccggcgttcgacgacggccgcgacctcatgatacgcatcgccgagttcgtcgccgagagcgccgccgccgcagccgctgccagcggcggtggcagcgagtgaccgggccacggagcagcaaggtgttcgtccgcgtgtcagcgtcgacgtggcgtgcgtggcggtggccccgacttgtttggctgggttagcgtgtgtctatgataagcagtgcagtgtatagtctcttggtgatgtaattttttcgaggtttaggtgtggtttgcttgagtgattaagtaagaaatagttaaattaatgtggacgataattatatattagtattaaaaaaaaaaaaaaaaaaaaaa

SEQ ID NO: 35554 - DNA, 399 bp, Oryza sativa
  Clone ID: PAT_MRT4530_39462C.1
atgccgtcgcaagatccgacaccaccgcttggatctgtggtcgttgttgctcaaagccaccgtcgtcacgcacggatctgttgtagtcgtcatcatgcggaagcttccacctccgtcgcatcgggatccaccaccgttgtcgtcactcaaaggagctgcgccgtccttgctcgaagccgccgcattgtcgttgtcgttgtgcggaagccaccaccattgttgcgtctagatccatcttcgtcagtgtcgttcgagggaggcggagaggcagcggaatctgcgcgggaaggagagatgccaccagatccgcccgtcccatcgccgcagtgggtggatctaagtgtgtgggggcgaaaggtagcaggatccgcacgatccgaggccgctgtcgcctcctga

SEQ ID NO: 35555 - DNA, 3930 bp, Oryza sativa
  Clone ID: PAT_MRT4530_39463C.1
tcattgcctcatcgccataaagaagcataaatgggctaaacttggttggtcttgtgggggtcgtccgaagggcccaaagaaccgaaacaattcttctggccatttgcctttcgccgctccctcaagtcttttctttagtgcttctaggatcttgccatttgtatgttcggccgccccatttgactgtgggtgcgcgaccgacgcgaacctgatttctaggttaagcccttcgcacatttctctgaacttatcagagtcaaactgcttgccgttctcagtaatgaactctttcggcaccccgaaatggcaaacaatgtttttccatacaaacttctgtactgctgccgaagtgattaacccaaggggttcggcttcgatcgggaatggcccaataatgtccagtccccatctggcgaagggccatattggtgcaatgggctgcagatcatactggggcacggcttggctttggccatgacgctggcaacttttgcacttcttgatttgctcaacacagactttcaacacagtgggccaataaactccttgtctaaacactttggaggccactgttcttgcagcctggtgcgcgccacatagcccctggtgtatttcctttgccatttcttcgccttcgacaaaagagatgaaacgatgtaagggttgaagtaccccggagcggtaaagctgacccgagaccatcttatacttcgtggctctgagttgcaaacacttcacttctgcttcgtctaccggaagccagccagtttcaaggtgtttcacaaatggggttcgccagtcatatgggtcttcgcccagtttctcttggtcgattgtcatgacttccgagctgtccatgggcacacttggagcatgtaggacttcgaaaaagatgccaggcgaatgcgggccaccacaagcagcggatttcgccaaggcgtctgcttcctcattttggtctctcttcattccctcttcttttgcctcgaaggatttgtcaacatggcctgctaccaacttggagtcagttcgaattagtaggcgccggactcccagtgctttcgcctttcttaggccaaggagaacggcttcgtattccgctgcattgttggttgtgtcgaactgcaatctcgctgcgtaccgaatcggcacaccattcggcgaaaagaggactgccgcaacgcctgcccccttgtgcgaccacgaactgtcagagcacatcacccagaactggtcgtcgggctcggggtcgggggcaagtaccggtgtccattcagctacaaagtcagctagcacttgagacttgatagcagagcgtgcaacaaaatgcatgtcgaacgggcatagctctgccgcccacttgctgagccggccagtgacttccttgcatcggagtatttcgcccaaggggtactgtgatgggactatgactttgtgggcctggaagtagttcttgagcttgcgcgaagccattactagagcgtaagcaagcttttccatttcaatgtaccttgtcttcgctccttgcagtgcttcggagacgaagtagaccggtttctgtccagactctgtttcttggacgagtgcagcactgactgccactggcgaagatccagctgttgaatccacgagctggtcgattcgcggcaaggggaaatcgtctttcggacacgccttgttcagatctgtgaaatcgacacacatgcgccatttgccgtttgacttccgcaccagcactggattcgccaaccactccggatcatcaatctcttggataacccccgcccggagtaatttttgtacttcggccttcaccgcttcttggcgatcggcagacatctcgtcagggctccaggcgaagatatcgatgttctttttgagcacctctagtatgctctcaacttcttcttcgcccatgtcgccccccagtgatacgagttttgtggggtcggcatcatcaatctgcactttcgttaccttgccgtgaggggtgggcttcggcgtgtgcttcggccgctcatgcggttcggtctcaacattgtgcactgctctgttgattatggctagattgagttttgaagcggccgaatgctgaagccccttgactactatcaccccttttgggccaggcatcttgagcttgagataattgtggtgggaaatggcttcgaacttgttcagggttgcacggccgaagatggcattgtagttgtatgggatgttgacgacgtcgaacagtatttgctcttcgcgcctgttttctcccgagccgaaagctatcagcaaaagtgcttggccaagaacttgcactgcctctccgctgaacccccggagcgacgtttgtgccggtgtaagagcttgggttggcaagcccatcttcttgcgggctagctgctgatggttgcttgtttgctgggcgtcgaactccttgcggagggcttgcacttcttcgacagccatcacagccttgcccgctcgatctgttctgaactttctccaagtcatgggggcttggccttgccttggtggctgtccctggatcgccggctgagactggcgaacagagaggggaggtggttcggcaatttgaacttgcgcttgagcttgagcagcggcgacggagcctttatcatactcagcttgtatagcttgtcgtcgcctagaatcctcctcaccccttgcgaacccgtcaataatgcgaagtaggtgttcgagcgtctgcggctccttgttggcgatttttctcgttagttcgccctcaagcagaccagccgatgcggcgtttatgaccgacgcctcggttatgtcttgaacttggcaccgggcttgcgagaagcgactcatgtactcccttatcgacttccccggcctttggcgaatgccgagtaggtgttgttgcgccttcggctcctcgtaggtgcctcgaaagttaaggacaaaaacatcgcgcaattgctcccatgagtaaatgctattggctggtaaattgaaataccaagaacgggcgatgccgtctagagcgagatgtattaccttcgccttggtattttcgtcaccatgagccgcttcgatcgctgactcgtagatggagaggaactccttcgggtcagtttcgcctgaatagcgcgggacgggtgggaacttgaactggggtgggattggatgagtcttgattcccccactcagcggtagccccttttcgcctcccgccctgtttaccgcaccttgctgcgggtacggtctggtgaagggcgaaatcgcagcttgtgcgtgaggttgggccatggcgttcggctgcccggctccaactggaggcacttgctgagccgccatggatgggtcaaaaattggctgcgaccacgtcatagcagcttggattggtgcttggtttgttccgaagcctggggtcggagcttgctgccgaacggttggcgccggcgcctgtgcggcttgtggcggaaagggctgggtcgtcacttgcggatggacttgatgtgggacatagcctgccgaatactgaaggattggagccgacgtggccttgacccgccttgccgcctcgtatgcttgttgttgttcttgcatttggcgaagcatgtcttggagccgtgtcatgttctgccgcatggcttccatgtcggcttcggcttgtgcttcggggtcaaggctggtttgggactgtacaacggtgagcgcggttgtggtagctgccggctgtgatggagctgcctggggcaccaccggttggcttgtcgaaaggatctccgccctggtctggagtgcccttgccgccgcagccgcctttgccacgtcggcctcgttcggcacgtgcaccgaggttgcaggggccgaaggcggttgtgatggcgcttgtgctcctccagcttcggccacgggcgccgaaggctctgctccttcctcggcggccat

SEQ ID NO: 35556 - DNA, 1931 bp, Oryza sativa
  Clone ID: PAT_MRT4530_39464C.1
gatttggaaggggcgaaggccctagttgcattctcctcgggcaaggcggcgaagggaggtccggtgcaggggccgaacgtggccgacgtggcgaaggcggctgcggcggcaagggcactccagattagggcggagatcctttcgacaagccaactggtggtgccccaagccactccatcgcagccggcagcagccccaactgcgctcgccgttgtgcaggcccaagtcagccctgaccccgaaacacaagccgaagccgacatggaagccatgcgacagaacatgacatggctccaagacatgcttcgccaaatgcaagaacaacaacaagcatacgaggcggcaaggcggaccaaggccacgtgccagtgtacttcaccgggcagcaatcggccgcagcagtgcatccggcccgtcacatgcaactgcaagctcaaccagtcgctgcccaagtacaccatcaaccacctggccaagcgccacaaacagtggcggaaggggcttcggctctgcaggcgcaactccaagctttccttcagcaactcaactaaccccactgcatttcaagcacaaccccatcggcccacccggaggggaatacaagtcaagtttgacttcgtcaatgctgctcaggcaccaaccgttcggcaacgaactccaagcttcggaacaaaccaagcaccaatccaagctgccacgacgtggtcgcagccaatttttgacccatccatggcggctcagcaaggcgggaggcgaaaagggttcggacaaaaaccggtctacttcgtctccgaagcactgcatggagcgaagacaaggtacattgaaatggaaaagctcgcttacgccctagtgatggcttcgcgcaagcttaagcactacttccaggcccacaaagtcatagtcccatcacagtaccccttgagcgaaatactccgaggcaaggaagtcactggccggctcagcaagtgggcgacagagctatccccgttcgacttacattttgttgcacgctctgctatcaagtctcaagtgctagccgacttcgtagctgaatggacaccggtacttgcccccgaccctgagcccaccgaacaattctgggtgatgtgctctgacggctcgtggtcgcacaggggagcaggcattgcggcagtcctatgttcgccgaatggtgtgccgattcggtacgcagcaagactgcagttcgacacaaccaacaatgcaggagaatacgaagccgttctcctgggcctaagaaaggcgaaagcacagggagtccagcgcctgctaattcaaactgactccaaattggtagcaggccatgttgacaaatccttcgaggcaaaagaagagggaatgaagaggtatctggaggttgttcggtccatgcaaaaatgcttcaccggcataacggtcgaacacttgcctagagaccagaacgaggaagcagacgccttggcgaaatccgctgcttgtggtggcccacattcgcctggcatctttttcgaagtcctacatgctccaagtgtgcccatggacagctcggaagtcatggtaatcgaccaggagaaactgggcgaagactcatatgactggcaaaccccatttgtgaaacaccttcaaactggctggcttccggtagacgaagcagaagcgaagcgtgaagaaatggcaaaggagacacaccaggggctatgtggcgcgcaccaggctgcaagaacagtggcctccaaagtatttagacaaggagtttattggcccactgtgttgaaagtctgtgttgagcaaatcaagaagtgcgaaagttgccagcgtcatggccgaagccaagccgcgccccagtatgatctgcagcccattgcgccaatatggcccttcgccagatggggactggacatcattaggcccttcccgatggggcgaaacgg

SEQ ID NO: 35557 - DNA, 778 bp, Oryza sativa
  Clone ID: PAT_MRT4530_39465C.1
gcacgaggccctgccttatccccttttctcccttggcgagcggttgacggcaccggaggagtggcctcctcatatgtcgagcggcggcggctaacggagaggtgacggctggccggccagccggcgcacgcgccatgaggtggcagcggcgaccggcccaggaggtggcggctggcctgggtggtagcggccggcccgggtacgacgcagaggccggtcgctgacggaggagcggcggcggccgctggaggacgcggcggctagccgccagcgcacgtgcggcaaggtggcggcggaggctgatgaatgacacggcggcctactcaggaggtgacagccggccgccggcgcacacgcgccgaggtggcaaggcagcgaggtggcggcagccggcggcagccgccagatccggcaacggcggtggcggtggcggtggtggtggaggctgccacgggcgaggtggcttccggcggggtggcccaggttcctcgtgttttctcgttgggggtgctgccgctggtgtctccgccgtgtccaacttgttgagttcttgatactttgcgccgcggcggccgggcggggcggtggatggcgggatgcggtgcggggcgcgggagaatgtggtgaagtggccgcacacgatggcctacagcggcggtggcggcggccggcggggtggaggaaggcgagatgcatggcgggtggcggggtgaagaaggcgagatggaggccggcgacttttttttcttttagttttgttccccttatgccttatagg

SEQ ID NO: 35558 - DNA, 2982 bp, Oryza sativa
  Clone ID: PAT_MRT4530_39466C.1
atggagcaagaacggcgtgaggcaaagagtcgtacgagtgccttgccaggccagaggcgtcttaggcgaagggtgcaagacgaagactatctgccgaaggaagacgacttcgccatggcaagttcgcccccgcaagggccgaggaagcctttccggcccatcaagcctaggggctatagggccggcgatcgccagacggcccatcaggggcccatgagcccctataacattatgtacccctgtaaatgtccctttcgcaaggtcgctgcccaagtacaccatcaaccacctggtcaagcgccacaaacagtggcagaagcggcttcggctctgcaggcgcaactccaagctttccttcagcaactcaaccaaccccactgcatttcaagtacaaccccatcggcccacccggaggagaatacaagtcaaggtgcgcctaattggttgccaccgattcagccgggcctgggagcttcgccatggaatcaaggaccgcagttcgacttcatcaatgctgctcagagaccaaccgttcggcagcaagctccaggcttcggaacaaaccaagcaccaatccaagctgccacgacgtggtcgcagccaatttttgacccatccatggcggctcagcaagtacctccagttggagccaggcagtcgaatgccatggcacaacctcacgcacaagatgcgattttgcccttcgccacaccgtacccgcagcaaagtgcagtaaacagggcgggaggcgaaaaggggctaccgctgagcgggggaatcaagactcgtccaatcccaccgcagttcaagttcccacccgtcccacgctattcaggcgaaactgacctgaaggagttcctctccatctacgagttagcgatcgaagcggctcatggtgacgaaaataccaaagcgaaggtaatacatctcgctctagacggcatcgcccgttcttggtatttcaatttaccagccaatagcatttactcatgggagcaattgcgtgatgtttttgtccttaactttcgaggcacctatgaggagccgaagacgcagcaacacctcctcggcattcgccaaaggccgggggagtccataagggagtacatgcatcgcttctcacaagcctggtgccaagttcaagacataaccgaggcgtcggttataaacgccgcttcggccggtctgctcgagggcgaactcacaagaaaaatcgccaacaaggagccacagacgcttgagcatctacttcgcatcattgacggctcaagcacaagttcaagttgccaaaccacctcccctctctgttcgccagtctcagccggcgatccaaggacagccgccaaagcaaggccaggcccccataacttggagaaaaagttcagaacagaccatgcgggcaaagctgtgatggcggtcgaagaagtgcaagccctccgcaaggagttcgacgcccagcaagcgagcaaccatcagcagccagcccgcaagaaggtccgaaaagacctctactgcgcctttcacggacgctcttcgcacaccacggagcaatgtcgaaacattaggcaacgtggcaatgggcaagacccaaggccgcagcagggaacaactgtcgaagcaccccgcgaagtagttcaggagcaaacacccccagccgaacaacgccaagatgtacagcgaagtgtaatccaagtgattacaagggctgacccgccaagccagttgtccaaacggcagaagaagatgcatatccgtatggtccacagcatcacttcggcgggtgaaggggcgccgcagtatctgaaccagctaatttcttttgggccggaagacgcagaaggagttatgtttccgcatcaagatcccctggtaatctcagctgagatagctggtttcgaagtccgacaaatcctggtcgacggagggagttcggctgatgttatcttcgccgaagcatatgccaagatggggttgcctacccaagcccttaccccagcaccagcatcgctccgcggtttcggcggagaagcagttcaagttctcggccaagcacttttgctgatagcctttggctcggggaagaacagacgcgaagagcaaatactgttcgacgtcgtcgacatcccgtacaactacaatgccatctttggccgtgcaaccctgaacaagttcgaagccatttcccaccacaattatctcaagctcaagatgcccagcccgacagtggtgatagtagtcatggggcttcagccttcggccgcttcaaaaggcgatctagccataatcaacagagcggtgcacagtgttgagaccgaaccgtatgaacggccgaagcacacgccaaagcccacccctcacggcaagataacaaaagtgcagattgatgacgccgaccctacaaagctcgtatcactggggggcgacatgggcgaagaagaagttgagagtatcctagaggtgctcaaaaagaacatcgatatcttcgcctggagccctgacgaggtggggggtgtcctggcggatctcatcatgcatcacctagcagtcaagccggacattaagccaaaaaaacaaaagctgcgcaagatgtctgccgattgccaagaagcggcgaaagccgaagtacaaaaattgctcagggcgggggttatccaagagattgatcatctggagtggttggcgaatccagtgctggtgcgaaagtcaaacggcaaatggcgcatgtgtgtcgatttcacagacctgaataaagcatgtccgaaagacgacttccccttgccgcgaatcgaccaactctgggggcgaagaggggcgcgaagtatcgctcgaactcttagaaggagtaagggtcgaagcgctcgagcacatgcacaagtacgccacaagcacttcggcaacttacaacaaaaaagttcgacccacgcagctgatgcctggtcatcttgtcctaaggaagaaggcgaatccagtagtggttggtaa

SEQ ID NO: 35559 - DNA, 372 bp, Oryza sativa
  Clone ID: PAT_MRT4530_39467C.1
atggtggtccacagcatctctttctctgatttcgggacaaagctgtcatcatcccctcacaacccaaccgctgtggcgtacaaaattcttggctgcttctgccggggcactaggtcggccatcttcgtccaccttagttatgatcgtgtcacggcggcggtggggcgttgcggcggcttggcgcggcgcggcggcgtggcggcggggcggcacggcggcgtggtggcgtggcccgccggcgtcgcgcggtgtggcatcggcgtcgttgtggcggcgtggataagacgatgcgggggcatcggcgtcgtcgctgtggcggccgctcggcatcgacgcgtctacgtcggcggcggcatcggcaacgagagctag

SEQ ID NO: 35560 - DNA, 3153 bp, Oryza sativa
  Clone ID: PAT_MRT4530_39468C.1
ctagacatagaagcgcttgagggaggcggcgttccaggaatggtcgaactcctcgccttcgagtgtcgctaggcgaaaagatcccgtcctggacttgcgcttgatgaggtatggtccttcccactttgattcaagcttgccaactgctactgggttcgccttcttccttaggacgagatgaccaggcatgagctccgtgggtcgaacttttttgttgtaagttgccgaagtgcttgcggcgtacttgtgcatgtgctcgagcgcttcgactcttactgcttccaagagttcgagcgatacttcgcgtccttcgcccccgaaaaacatcacccttggtgagttagcccctagctctgctggggttattgcctcatcgccataaagaagcataaacgggctaaacttggttggtcttgtgggggtcgtctgaagggcccagagaaccgatagcaattcctctggccatttgcctttcgccgccccctcaagtcttttcttcagtgcttctaggatcttgccatttgtgcgttcggccgccccatttgactgcgggtgtgcgaccgacgcgagcttgatttccaggtcaaactgcttgccgttgtcagtaatgaactcttttggcactccgaaacggcaaacaatgtttttccatacaaacttctgtactgctgccaaagtgattgccccaagcggttcggcttcaatccatcgagagaaatattccacagctacaattgcgaatttatacccgtttcgtgccactgggaacggcccaatgatgtctagtccccatctggcgaagggccatactggcgcaatgggctgcagatcatactggggcgcggcttggcttcggccatgacgctggcaactttcgcacttcttgatttgctcaacacagactttcaacacagtgggccaataaactccttgtctaaatactttggaggccactgttcttgcagcccctgtgcggtaaagctgacccgaaaccatcttatacttcgtggctctgagctgcaaatgcttcgcttctgcttcgtctaccagaagccagccagttttaaggtgtttcacaaatggggttcgccagtcatgtgggtcttcaccccatttctccttgtcgattgccatgacttcggagcagtccatgggcacactcttcattccctcttcttttgcctcgaaggatttgtcaacatggcctgctaccaacttggagtcagttcgaattagcaggcaccggactcccaatgctttcgcctttctcaggcccaggagaacggcttcgtattctgctgtattgttggttgtgtcgaactgcaatcttgctgcgtaccgaatcggcacaccattcggcgaaaagaggactgccgcaacgcctgcccccttgtgcgaccacgaaccgtcagagcacatcacccagaactgctcggtgggctcagggtcgggggcaaatactggtgtccattcagctacgaagtcagctagcacttgagacttgatagcagagcgtgcaacaaaatgcaagtcgaacggggatagctctaccgcccacttgctgagccggccagtgacttccttgcctcggagtatttcgcccaaggggtactgtgatggcactatgactttgtgggcctggaagtagtgcttaagcttgcgcgaagccatcactagagcgtaagcgagcttttccatttcaatgtaccttgtctttgctccttgcagtgcttcgaagacgaagtagaccggtttctgtccggactctgtttcttggaacagtatttgctcttcgcgcctgttttctcccgagccgaaggctatcagcaaaagtgcttggccaagaacttgcactgcctctccgccgaacccccggagcgacgttggtgccggtgtaagagcttgggttggcaagcccatcttagcatatgcttcggcgaagatcacgtcggccttcttgcgggctggctgctgatggttgcttgcttgctgggcgtcgaactctttgcggagggcttgcacttcttcgacagccatcacagccttgcccgcccgatctgttctgaactttctccaagtcatgggggcttggccttgccttggcggctgtccctggatcgccggctgagactggcgaacagagaggggaggtggttcggcaacttgaacttgtgcttgagcttgagcagcggcgacgtatagcttgtcgtcgtttagaatcctcctcactccatgacttgtattccccaccgggtgagccgatggggttgtgcttgaaatgtagtggggttggttgagttgctgaaggaaagcttggagttgcgcctgcagagccgaagccccttccgccactgattgtggcgcttggccaggtggttgatgctgcccggcgaagttcaccggcgcctgtgtggctagtggcggagagggctgggtcaccacttgcggccggacttgaggtggggcatagcctgccgaatactgaaggattagagccgacgtggccttggtccgccttgccgcctcgtatgcttgttgttgttcttgcatttggcgaagcatgtcttggagccgtgtcatgttctgccgcatggcttccatgtcggcttcagcttgcgcttcggggtccaggctgatttgggcctgtataacggtgagcgcagttggggccgccgccggctgcgatggggcggcttggggcaccaccagttggtttgtcgaaaggatctccgccctagtctggagtgcccttccgccgtagccgccttcgccacgtcggccgtgttcggcacttgcactgacgttgcgggggccgaagacggttctgatggcgcgggggccgaaggcggttgtgatggcgcttgtgcttctccatcttcggccacggacgccgaaggctctgctccttcttcggcagccatgtccggtccggcgtcgctctccttccgcctgataaccttctccttcacgaccctcttcggtggcattcgctctcagtggtttcgctcggagtccccacggtcggcaccagctgttgtcaaaacgacaactgcatacgtcgaaagacgtggttaccttcgtctgagacgcctctggcctggcgcttgtacgactcttcgccttgcgccgttcttgctctatagccttcgccat

SEQ ID NO: 35561 - DNA, 396 bp, Oryza sativa
  Clone ID: PAT_MRT4530_39469C.1
gctaataccctttttctgatgccctcctagtacttcgagaagccacccctgactgccgagttccttacgacagcccgtcatgaccatacaaccggggctaaatacggaggagtaccctccccaggaaattaacttaggactatatacacgcgcggaggaatactcgtactgagctgtcaccatcagcggcccacctctcatctgcagcatataacccaaaataatgatacccaataatctagacaccatgcctaaactaccagatactactataatatcatcgtcatgacatagagtaattgcataagcaaacattatacctgtacctatgcatctcccagataagctagcagtataatcagtataacatgaacataatgtaaagttggcattcat

SEQ ID NO: 35562 - DNA, 2724 bp, Oryza sativa
  Clone ID: PAT_MRT4530_3946C.1
atgagaacattccggactgggcttagtatggcatatttgaagaaaacacaatggatggatgttgaagggaatgagggtgctgatgaacttggtcaaatattgcgggacttacaggaggactgcgaaagtgaaaagaaggtgcagaaactagagcgcatgttagcggaccacagaacagcgttgtacccaagttgcgagaagggctacaaaaagttgagtaccatcctagaattcttgcaatggaaggataaaaatgatgtgagtgacaaggcgttcggcgagttattgaaactcgtaaagaacattcttccggaggggaacgaattgcccgaaagtacatacgaagctaagaagacagtctgccctctaggcccgaagcaacctggtaacgacattgatgtgtacctaagaccattggttgaagaactaaaagtgctgtggtggaaagagggcgtcgccgtgtgggatgaggacaagcaggagcaatttaacctacaagcgttgctattcgttacaattaacgattggcctgcacttagtaacctatccggacaatcaaacaaggggtacaacgcttgcactcactgtatggatgaaactgaaagtacgtatctgaagcattgcaggaaggttgtgtacatgggccatcgtcgattccttgctgcaaaccaccctgtacggaaaaaaggcaagcacttcgaacagaaggcagaccatcgtactaaacctaaacattgcaacaggaaagcagtgttcgaaatggtgaaggatctgaaagtagtatttgtaaaggggcctggcagccaacctatagagagcgaagatggtcacgcggcgatgtggaagaagaactctattttttgggagctaccctattgggaggtcttggacgttcgccacgcaatcgacgtgatgcacctcactaagaacctttgcgtaaacctgatgggcttcttaggtgtatatgggaagtccaaagatacactcgaagcatgcaatgatctcaagcatatggaacaatacgagggccttcatccagaaccgaatgagaaaggaagccattacttgagtccggcgagctacaccctgagcaaggaagagaaggatagtatgtttcaatgcctagagagcatcaaggtaccatccggatactcctcgaatgtaaagagaataataagcacgaaggataagaagttcacaaacctaaagtctcatgactgtcacgtgcttatgacacagctgcttcctgttataattcgtggtatccttcctgataatgtgcgggcaacaataacgaagctttgtgctttcatgaacacaatttcacagaaagtcatcgatccagaaagtttagctgcccttcagcaggatgtgaggtacataggtgttctaaagaagtatgttcgtaaccgctctcgtccggaagcaagcatcgcgaagtggtatggaacagaggaggtcattgagttctgcgtagattttattgaagacctcgagccaatcgtggtacccgaatcaatccatgaggggagactacggggaaagggcacacttggaaggagagcaattatgactgtagacaacgatttattccgtaaagcacatttgacggttttgcaacaatctttgttggttgctccttacatcgatgagcacctggcgattgttcgctcagaaaacagtggcaagtctgatgcctggattaaacgccatcatattgatactttccccgcttggttgcgagaacacctcctgggtaacgagacgattgaccgacaactagccttcttggctagaggaccctccggctcggtaactacattccaaggttatgaaatcaatggatacactttttacacaagagcccaagacaaaaagagcacgaaccagaacagtggtgttcgtatcgatgccataggacatgatggtccaactagcacatattacggtgtcatcgacaacatatgggaactagagtatggacccctgaaggttcctctgtttcggtgccaatgggttaggctgactggtggaggcgtaatgattgatgatagtgggatgacaacggttgacctaaacaaggttggatactcagatgaaccatttgttctagccaatgatgtaacgcaagttttttacgtgaaggacatggataacaaaccaaagaaggggaaagggcccgatgagcccagacgccacgttgttctcccaagcaagaggaaaatcgttggagtcgaggataagactgacgaaaattacgatctgtttgaggggcaacctccgtttgtagtgacggttgacccgagcatcctggagaaggctaggcagagattagccgatcgccgggaacgcaaagacattgaagctacaatccagcacaatcggcagcttgtgcatgtagagaagtccaagcttgatcagctgtctgaaggcccgatcaaatcaaatatcgatcggcttgaagctcgtaagattgatctcatggcacagcttcaagaatgcaacgctgagttggatatggagcacaaaaagctagccgatctcccgcaagatattgaagaacagaaggcaaagctaaaatcggctatcaagaatgtcgctgatatgaccaagtccttgaaagttatccctggaactgacactcaagatgcccaagccatagaagatgtagaacatattaggcagaaggctatatcggctatcaagcaatacttatcccaataa

SEQ ID NO: 35563 - DNA, 276 bp, Oryza sativa
  Clone ID: PAT_MRT4530_39470C.1
ctcacgcgtccgcggacgcgtgggctgacgcgtgggagagtcatagaagctgaggtcagaagcagagatagaatgtctgaatgtggagacgctctatgatgggacggcgagctttaaggtgacgaggctagcccgacgccaagttgactgtgaagagtaagggcgcggagaagccctccgccaagggcaggtaggggaaggccggtaaggaccttaacaagctcaagagggctacatacgctttgttggtttttatggaggagtttcgtaaggagt

SEQ ID NO: 35564 - DNA, 296 bp, Oryza sativa
  Clone ID: PAT_MRT4530_39471C.1
gcaaagaaatggcaaaggagatacaccaggggctatgtggcgcgcaccaggctgcaagaaaagtggcctccaaacgccatggccgaagccaagccacgccccagtatgatctgcagcccattgcgccaatatggcccttcgccagatggggactggacatcatcgggccgttcccggtggcacgaaacgggttcgtgtcggtcgcccacccgcagtcaaatggggcggccgaacgtacaaatggcaagatcctagaagcactaaagaaaggcaaatggccagaagaattgctatcg

SEQ ID NO: 35565 - DNA, 501 bp, Oryza sativa
  Clone ID: PAT_MRT4530_39472C.1
tctcgttattatcacttttggatatgcaattcaaccatccactaaccaatcaatcaatcagtatagatggtgtttaaattacgggatatcattatttggggttatatattgcggatgagaggtgggccgctgatggtgacagctcagtacgggtattcctccgcgcctatatataatcctaagttaatttcctggggagggtattcctccatatttagccccggttggatggtcatgacgggctgtcataaggaactcgacagtcaggggtggcttcttgaagtaccaggagggcatcggatagaggtttcgtttgcagaggtacctgcttgggtgaaataaaagagactgagcgaaaggaatgcatggatgattaaagaagttgattggggaccaaaccaagaccttctccaagtccacttccatatcaccacgtcacttttggtccatagaagacaagagataaagttctacacgttttggattcggattcaggcctcc

SEQ ID NO: 35566 - DNA, 231 bp, Oryza sativa
  Clone ID: PAT_MRT4530_39473C.1
atggcgcctgacccctctttcaccctccgttggtggcaaattgtcagagagaaggatgaagaggggtcgaagggaggagactacacctacaaccacggctactacatgatcggctatatcgacgaataggagaatcaacggacgatacagaaggggacgcaggcacaaggtggaggaccgtccatcagagatgcaatcgattatggtgagccaaagaagatgaagaaatag

SEQ ID NO: 35567 - DNA, 2037 bp, Oryza sativa
  Clone ID: PAT_MRT4530_39474C.1
atggaagccatgcgacagaacatgacacgactccaagacatgcttcgccaaatgcaaaacaacaacaagcatacgaggcggcaaggcgggccaaggtcacgtcggctcaggcgcaactccaagctttccttcagcaactcaaccaaccccactacatttcaagtacaaccgcatcggcccacccggaggggaatacaagtcaaggcgccaaccgtccggcagcaagctccaactccaggtttcggaacaaaccaagcacctctagttggagccgggcagtcgaatgccatggctcaacctcacgcacaagctgcgatttcgcccttcgccacaccgtacccgcagcaaggtgcggtaaacagggcgggaggcgaaaaggggctaccgctgagtaggggaatcaaaactcgtccgatcccaccccagttcaagttcccacccgttccgcgctattcaggcgaaactgacccgaaggagttcctctccatctacgagtcagcgatcgaaacggctcatggtgacgaaaataccaaggcaaagccaatagcatttactcataggagcaattgcgcgatgtttttgtccttaactttcgagacacctatgaggagccgaagacgcagcaacacctactcggcattcgccaaaggccggggggagtcgataagggagtacatgcgtcgcttctcgcaagcccggtgccaagttcaagacataaccaaggcattagttataaacgccgcttcggccggtctgctcgagggcgaactcaaaagaaaaatcgccaacaaggagccacagacgctcgagcacctactttgcatcattgacgggttcgcaaggggcgaggaggattctaagcgacgacaagctatacaagctgagtacgacaaagcctccgtcgccgctgctcaagctcaagcacaacaatgtcgaaacattaggcaacgtggcaacgcgcaagacccaaggccgcagcagggaacaactgtcgaagcaccccgcgaagcagttcaggagcaaacacccccagccgaacaacgccaagatgtacagcggagggtaatccaagtgattacaagggctgacccaccaagccagttgttcaaacggcagaagaagatgcagatccgtatggtccacagcatcacttcggcgggtgaaggggcgccgcagtatctgaaccagctaatttcttttgggccggaagacgcggaaggagttatgttcccgcatcaagatcccctggtaatctcagctgagatagctggtttcgaagtcctacgaatcctggtcgacggagggagttcggccgatgttatcttcgccgaagcatatgccaagatgaggttgcctacccaagcccttaccccagcaccagcatcgctccgcgcctttggctcgggggagaacagacgcgaagagcaaatactgttcgacgtcatcgacatcccgtacaactacaatgccatcttcggccgtgcaaccctgaacaagtttgaagccatttcccaccacaattatctcaagctcaagatgcccggcccgaaaggggtgatagtagtcaaggggcttcagccttcggccgcttcaaaaggcaatctagccataatcaacagagtagtgcacagtgttgagaccgaaccgcatgaacggccgaagcacatgccaaagcccacccctcacggcaagataacaaaagtgcagattgatgatgctgaccccacaaagctcgtattactggggggcgacatgggcgaagaagaggttgaagcgctcgagcacatgcacaagtacgccacaagcacttcggcaacttacaacaaaaaagttcgatccacggagctgatgcctggtcatcttgtcctaaggaagaaggcgaacccagtagcagttggcaagcttgaatcaaagtgggaaggaccgtacctcatcaaacacaagtccaggacgggatcttttcgcctagcgacactcgaaggcgaggagttcgaccattcctggaacgccaactctctcaagcgcttctatgtctag

SEQ ID NO: 35568 - DNA, 490 bp, Oryza sativa
  Clone ID: PAT_MRT4530_39475C.1
gaaggttgattataagttgtggcttgctagctgtggacagaccatatgggcctcatgtcctaactgggcattttattcttttttcttaacttgtgcatttttcctctatccgatgccctcatggtacttcgagaagccacccttgactgccgagttccttatgacagcccgtcgtgaccatccaaccggggctaaatacggaggaataccctccccaggaaattaacttaggattatatataggcgcggaggaatacccgtactgagctgtcaccatcagcggcctacctctcatccgcaatatataaccccaaataatgatatcccgtaatctagacaccatgtctaaactaccagatactactctaatatcatcgtcatgacatagagtaattgcataagcaaacactatactcgcaccaaagcatctcccagataagctagcagtatattcagtataacatgaacataatgtaaagtaggtactcat

SEQ ID NO: 35569 - DNA, 975 bp, Oryza sativa
  Clone ID: PAT_MRT4530_39476C.1
atggatgagattaagggtgtgttcgaagagaaggggattgaggagattgagaagatacgtaaaacgagagagattgcacgcaagcatggccttgaacccatcttcgtgcactcgtgtgctgtgtattccacggtgctcctgcgtgtgactcaagcactgggatcattttcatcgtgcttgtcgatactagtagatatttgggcgtacaacacgacaaagaaggttccgaggcttgggaggctggcccccggcgtccgaggccttgagggtagtagggtggctccggcgggcggggcccaagcttggggagatccaggcgaggttcccggtgatggagacggcgttgtgcccgatcacgccccgcgggacacactcgagggcgctggggagtacatcaaccgcgctgtggggccggccgtcgccgtgcgcggcctcgagccgccgttcctcgcggcctccgccgtcgccgacgacctcctcggatacctcgtcgtgttgtcccgcctcgaggaggtgctccacttcctctccgacaactgcggcatcgcctcccagtggctcagcttcgccgagtacctcggggaccgcagcctcgccgacccctgcttcgtgtccgacctcgccgaggtgctctctcacctcaagaccccctccgcaaacctggacggcggcctcctcgtcgctgccttggacattcttgaggacgagttctgtcgccttctcaaggaacactcagcttcgctcgccatgaaagaacccaactatagccggccccgcctccaccttcgtgcccactgccgcgggcgttcggccccgcctccgcctccgcgcccaacaccgcggtgcccgcctgcacggggccgcttcaccggcggtggcgacacagcgcgacgacgccattcgcaaccggccgccgccctcgccttctcctgcatcgcagctgccgccgtcacctcctctcccgcctcactctag

SEQ ID NO: 35570 - DNA, 147 bp, Oryza sativa
  Clone ID: PAT_MRT4530_39477C.1
atgacgaccacactgccccgctcactagaccttgatgacgtcctcctcctagtctcctctatctcctgcctcccactgtaccgcaacccgcatcagcttgactactttgagggattgaggtgtcataagcccaaaactcgtaagtag

SEQ ID NO: 35571 - DNA, 4824 bp, Oryza sativa
  Clone ID: PAT_MRT4530_39478C.1
atggccgccgaggaaggagcagagccttcggcgcccgtggccgaagatggaggaggacaagcgccatcacaaccgtcttcggcccctgcaacctctgtgcaagagccgaacgcggccgacgtggcgaaggcggctgcggcggcaagggcgctccagaccaaggcggagatcctttcgacaagccaactggtggtgccccaagccgctccatcgcagccagcagcggccccaactgcgctcggtgttgagcaggcccaggtcagccctgaccccgaaacacaagccgaagccgacatggaagccacacgacagaacatgacacggctccaagacatgcttcgccaaatgcaagaacaacaacaagcatacgaggcggcaaggcgggtcaaggccacgtcggctccaatccttcagtattcggcaggttatgtcccacctcaagtccatccacaaatgacgacacagccctttccgccacaagccgcacatgcgccagtgtacttcgccgggcagcaaccggccgcagcagtgcaactgcaagctcaaccagtcgctgcccaagtacaccatcaaccacctggccaagtgccacaaacagtggcggaaggggcttcgtctctgcaggcgcaacttcaagctttccttcagcaactcaaccaaccccactgcatttcaagtacaaccccattggcccacccgaaggggaatacaagtcaaggtgcacctaattggttaccaccgattcagccgggcctgggagtttcgccatggaatcaaggaccgcagttcgacttcgtcaacgctgctcaggcaccaactgttcggcagcaagctccaattccaggcttcgaaacaaaccaagcaccaatccaagctgccacaacgtggtcgcagccaatttttgacccatccatggcggctcagcaagtacctccagttggagccgggcagtcgaataccatggcccaacctcacgcacaagctgcgattttgcccttggccacaccgtacccgcatcaaagtgcggtaaacagggcgggaggcgaaaaggggctaccgctgagtgggggaatcaagactcgtctaatcccaccccaattcaagttcccacccgtcccgcgctattcaggcgaaactgacccgaaggagttcctctccatctacgagtcagcgatcgaagcggctcatggtgacaaaattaccaaggcaaaggcaggggagtcgataaggaagtacatgcatcgcttctcgcaagcccggtgccaagttcaagacataaccgaggtgtcggttataaacgccgcttcggccggtctgctcgagggcgaactcacaagaaaaatcgccaacaaggagccacagatgctcgagcacctacttcgcatcattgacgggttcgtaagaggcgaggaggattccaagcgacgacaagctatacaagttcagtacgacaaagcctctgtcgccgctgctcaagctcaagcacaagttcaagttgtcgaaccacctcccctctcagttcgccagtctcagccagcgatccaaggacagccgccaaggcaaggccaagcccccatgacttggagaaagttcagaacagaccgtgcgggcaagactgtgatggctgtcgaagaagtgcaagccctccgcaaggagttcgacgcccagcaagcaagcaatcatcagcagccagcccgcaagaaggtccgaaaagatctctactacgcctatcacggacgctcttcgcacaccacggagcaatgccgaaacattaggcaacgtggcaacgcgcaagacccaaggccgcagcaggaaacaactgtcgaagcaccccgcgaagtagttcaagagcaaacacccccagccgaacaacgccaagatgcacagcgaaggataatccaagtgattacaagggccgacccgccaagccagttgtccaaacggcagaagaagatgcagatccgtatggtccacaacatcactttggtgggcgaaggggcgccgcaatatctgaaccagctaatttcttttgggccggaagacgcagaaggagttatgttcctgcatcaagatcccctggtaatctcagctgagatagctggtttcgaagttcgacgaatcctggtcgacggagggagttcggccgatgttatcttcgccgaagcatatgccaagatggggttgcctacccaagcctttaccctagcaccagcatcgctccgcggtttcggcggagaaacagttcaagttctcagccaagcacttttgctaatagcctttggctcgggggagaacagacgcgaagagcaaatactgttcgatgtcgtcgacatcccgtacaactacaatgccatcttcgggcgtgcaaccctgaacaagttcgaagccatttcccaccacaattatctcaagctcaagatgcccggcccgataggggtgatagtagtcaaggggcttcagccttcggccgcttcaaaaggcgatctagccataatcaacagagcagtgcacagtgttgagaccgaaccgcatgaacggccgaagcacacgccaaagcctacccctcacggcaagataacaaaagtgcagattgatgatgccgaccccacaaagctcgtatcactggggggcgacaagggcgaagaagaagttgagagtatcctagagagccctgacgaggtggggggtgtcccggcggatctcatcatgcatcacctagcagtcaagccagacattaagccaagaaaacaaaagttgcgcaagatgtctaccgatcgccaagaagcggtgaaagccgaggtgcaaaaattgctcagggcgggggttatccaagagattgaccatccggagtggttggcgaatccagtgctggtgcggaagtcaaacggcaaatggcgcatgtgtgtcgatttcacagacctgaacaaagcatgtccgaaagacgactttcccttaccgcaaatcgaccagcttgtggattcaacagctggatgcgagctcatgagtttcctggatgcatattccagttaccaccagatccacatgaacctgctcgacatccccaaaacattcttcatcactccattcggcacattttgtcacctcaggatgcctttcggcttaaggaacgcaggagcaactttcgccaggctggtgtacaaggtccttggcaagcagttagggcggaatgtggaagcttacgtcgacgacatcgtcgtaaaaagccgcaaggctttcaaccaagcgatcgacctgcaggagacattcgatagcttgcgcacagcaggcataaggctgaatccggagaagtgcgttttcggcgtccgcgcaggcaagttgttgggtttccttgtttccgaaagaggcatcgaggcgaatcccgagaaaattgatgccatccagcaaatgaagcctccgtcaagcgtacatgaagtacaaaagcttgcaggccgaatagcggcactcagccgattcctctcaaagacagctgaaagaggtttgcccttcttcaagaccctacggggcgcaggaaagtttaattcgacaccagagtgccaagcagcattcaacgagctaaagcaatacttgcaaagcccaccaactctgataagcccacccccaggaagcgcactgctattatacttagcagcttcgccggtggcagtcagtgctgccctcgtccaagaaacagagttcggacaaaaaccggtctacttcgtctccgaagcactgcaaggagcgaaaacaaggggagcaggcattgcggctgtcctattttcgccgaaaggtgtgccgattcggtacacagcaagactacagttcgacacaaccaataatgcagcagaatacgaagccgttctcctgggcctaagaaaggcgaaagcactgggagtccggcgcctgctaattcgaactgactccaagttggtagcaggccatgttgacaaatccttcgaggcaaaagaagagggaatgaagaggtatctggaggctgttcggtccatggaaaaatgcttcaccggcataacggtcgaacacttgcctaaagaccagaacgaggaagcagacgccttggcgaaatccgctgcttgtggtggcccacattcgcctggcatctttttcgaagtcctacatgctccaagtgtgcccatggacagctcagaagtcatggcaatcgacaggagaaactgggcgaagaaatggcaaaggagatacaccaggggctatgtggcgcgcaccaagctgcaagaacagtggcctccaaaatggggactggacatcatcgggccgttctcggtggcgcgaaacgggtataaattcgcaattgtagctgtggaatatttctctcgatggattgaagccgaaccccttggggcaatcacttcggcagtagtacagaagtttgtatggaaaaacattgtttgctgtttcggagtgccaaaagagttcattactgacaacggcaagcagtttgactctgataagttcagagaaatgtgcgaagggtttaacctggaaatcaggttcacgtcggtcgcgcacccgcagtcaaatggggcggccgaacgtacaaatggcaagatcctagaagcactaaagaaaagactcgagggggcagcgaaaggcaaatggccagaggaattgctatcagttctctgggcccttcggacgacccccacaagaccaaccaagtttagcccgtttatgcttctttatggcgatgaggtaatgaccccagcagagctaggggctaactcaccaagggttatgttctctggggcgaagaggggcgcgaagtatcgctcgaactcttggaaggggtaa

SEQ ID NO: 35572 - DNA, 398 bp, Oryza sativa
  Clone ID: PAT_MRT4530_39479C.1
atgaatgcctactttacattatgttcatgttatactggatatacggctaacttatctgggagatgctttggtgcgggtataatatttacatatgcaattactctatgtcatgacgatgatattagagtagtatctggtagtttagatgtggtgtctagattacgggatatcattatttagggttatatgctgcggatgagaggtgggccgctgatggtgacagctcagtacgggtattcctccgtgcctgtatataatcctaagttaattccctggggagggtattcctccgtatttagccccggttgtatggtcatgacgggctgtcgtaaggaactcggcagtcaggggtggcttctcgaagtaccaggagggcatcggatagaggatattagcta

SEQ ID NO: 35573 - DNA, 240 bp, Oryza sativa
  Clone ID: PAT_MRT4530_3947C.1
gtataattacaagtcttgtgacggaaataggcatcatcaactgtactgggtcaacctaatagagcctcacctcagatctcagcggggtgcctcggcaaaactaaagaggtgcgcactaaagagctgccatggcatgccacgtcccatgctttttcgctcattcaagagaacattaaaaaaatagtttccagggagtacgaaggcttcgcaaattcttctcctatccggtaaattaaaaga

SEQ ID NO: 35574 - DNA, 940 bp, Oryza sativa
  Clone ID: PAT_MRT4530_39480C.1
ccggccgggccctagcttctcacctcaccttcgaaatccggcggcggcgatggcggcggcggctacggcgaggtccggattccggcgcatgttctccatctcggccttctccccgcccaagccgcccaccccgcccccgaaggccgacccctcccccaacctcttcatctcaggcttaagcaagcgtacaacaacagatgggcttaaagaagcttttgcaaagtttggggaagtcatacatgctcgagttgtcacagatcgtgtcactggattctctaaggggtttggcttcataaggtatgctacagttgaggatgcagctaaaggaatagaaggaatggatggaaagtttctcgatggatgggttatttttgctgaatatgctagacccagaacaccaccgcagcaaccagaaatgaactcacagccacaacaatcatggggccctccatccagttcctggggtgcacagtagatgaagatacaatcttggggccctctatctggccgtggggctcacagcggatcgacaagttattgattctatatttagtttatcgctataccatattgttccaggtgtgaacagagtttccgatccaatattcttatcgtgttggagtggtcgtttgcttgcatcccatggtttccgcatggagaagcacttgtcaaactgaatatggaccaaacaatattactatcaacgcgcaacaggacacgaacagcttcaaacctttgctaataatgacccccatgtcttgcttgtcctgactcatgaggtgctggttgtgttggagtcaccctttcatttgaattgtcgtagcccttatcagctggtggcatgtgctgctcatgtactggataatgactcgttgctcagaataacacgtttatacatgacaaggtacaactgaattttccttaaaaaaaaaaaaaaaaa

SEQ ID NO: 35575 - DNA, 2907 bp, Oryza sativa
  Clone ID: PAT_MRT4530_39481C.1
atggagcaagaatggcgtgagacgaagagtcgtacgagtgccttgccaggccagaggcgtctcaggcgaagggtgcaaggcgaagactatctgccgaaggaagacgacttcgccatggcaattgtcatttcgacaacaactggcgccgaccgtgggaacctccgagcgaaaccactgagagcgaatgccaccgaagagggtcgtgaaggagaaggttgccaggcggaaggaaagcgacgccggaccggatatggccgccgaggaaggagcagagccttcggcgcccgtggccgaagatggaggaggacaagcgtcatcacaactgccttcggcccctgcaacctccgtgcaagtgccgaacgcggccgacgtggcgaaggcggctgcggcggcgagggcactccagaccagggcggagatcctttcgacaagccaactggtggtgcccccagccgaacatcccgcgaagcaattcaggagcaaacacccccagccgaacaacaccaagatgtacaacgaagggtaatccaagtgattacaagggctgacccgccaagccagttgtccaaacggcagaagaagatgcaaatccgtatggtccacagcatcacttcggcgggtgaaggggcgccgcagtatctgaaccagctaatttcttttgggccggaagacgcagaaggagttatgttcccgcatcaagatcccctggtaatctcagctgagatagctggtttcgaagtccgacgaatcctggtcgacggagggagtttggccgatgttatcttcgccgaagcatatgccaagatggggttgcctacccaagcccttaccccagcaccagcatcgctccgcggtttcggcggagaagcagttcaagttctcggccaagcacttttgctgatagcctttggcccgggggagaacagacgcgaagaggaaatactgttcgacatcgtcgacatcctgtacaactacaacgccatcttcaaccgtgcaaccctgaacaagttcgaagccatttcccaccacaattatctcaagctcaagatgctcggcccgacaggggtgatagtagtcaaggggcttcagccttcggccgcttcaaaaggcgatctagccataatcaacagagcagtgcacagttttgagaccaaaccacatgaacggccgaagcacacgccaaagcccacccctcatggcaagataacaaaagtgcagattgatgacgccgaccccacaaagcttgtatcactgggggcgacatgggcgaagaagaagttgagaatccacatgaacccgctcgacatccccaaaacatcctttatcactccattcgacacattttgtcacctcaggatgcctttcggcttaaggaacgcaggagcaactttcgccaggctggtgtacaaggtgcttggcaagaagttggggcggaatgtggaagcttacgtcgacgacatcgtcgtaaaaagccacaaggctttcgaccatgcgatcgacctacaggagacattcgacagcttgcacacagcaggcataaggctgaatccggagaatgctgccctcgtccaagaaataaagttcggacaaaaaccggtctacttcgtctccgaagcactgcaaggagcgaagacaaggtacattgaaatagaaaagctcgcttacgcactagtgatggcttcgcgcaagcttaagcactacttccaggcccacaaagtcatagtgccatcacagtaccccttgggcgaaatactccgaggcaaggaagtcactggccggctcagcaagtgggcggcagcgctatccccgttctacttacattttgttgcacgctctgctatcaagtctcaagtgatagcagacttcgtagctgaatggacaccgatacttgccaccgaccccgagcccgccgaacaatcctggttcgacacaaccaacaatgcagcagaatacgaagccgttctcctgggcctaagaaaggcgaaagcactgggagtccggtgcctgctaattcgaactgactccaagttggtagcaggccatgttgacaaatccttcgaggcaaaagaagagggaatgaagaggtatctggaggctgttcggtccatggaaaaatgcttcaccagcataacggtcgaacacttgcctagagaccagaacgagaaagcaaacgccttggcgaaatccgctgcttgtggtggcccacattcgcctggcatctttttcaatgtcctacatgctccaagagtgcccatggacagctcggaagtcatggcaatcgaccaggagaaactgggcgaagacccatatgactggcgaaccccatttgtgaaacaccttgaaactggctggcttccggtagacgaagcagaagcgaagcgcgaagaaatggcaaaggagatacaccaggggctatgtggcacccaccaggctgcaagaacagtggcctcgaaatccattgcgccaatatggcccttcgccagatggggactggacatcattgggccattcccggtggcgcgaaatggcgatgaggcaatgaccccagcagagctaggggctaactcaaaaagggtgatgttgtctgggggcgaagaaggacgcgaagtatcgctcgaagttttggaaggagtaagagtcgaagcgcttgagcacctgcacaagtacgccacaagcacttcggcaacttacaacaaaaaagttcgacccacggagctgatgcctagtcatctcgtcctaaggaagaaggcgaacccagtagcgattggcaagcttgaatcaaagtgggaaggaccatacctcatcaaacacaagtccaggacgggatcttttcgcctagcgacactcgaaggcgaggagttcgaccattcctggaacgccgcctctctcaagcgcttctatgtctag

SEQ ID NO: 35576 - DNA, 993 bp, Oryza sativa
  Clone ID: PAT_MRT4530_39482C.1
ttggccgaaccaatcctagtgcagttggatccaggttttggcgtggatgtccaggattgcatcccaatgacggttggagggcactttggataattccccttccacaaccatcataactacctctatataaggagctcactctcttcactcaacacacacctcaagcaagagctctctcatttctctcaagtttagtttagtagtatctagctggtgaaatagaaatagaacaggaatcaggagttcggaagccttcagaagagttcgggtatggctttagcagctttcctttcctcttttgtaagctttgtacttttattagaatactcttctatatacatttatggtattgaaatactttctaagtatatgaatacctactttacattatgttcatgttatactgaatatacggctagcttatctgggagatgctttggtgcgggtataatgtttgcatatgcaattactctatgtcatgacgatgatattagagtagtatctggtagtttaggcgtggtgtctagattacgggatatcattatttggggttatatattgcggatgagaggtgggccgctgatggtgacagctcagtacgggtattcctccgcgccggtatataatcctaagttaattccctggggagggtattcctccgtatttagccccggttgtatggtcatgacgggctgtcgctccgcatcccaaaaccctagaggatttggcggcggcggcggcacgaacaaagcggcggtgacacgaacaggtgacggggaggcacggcgacgacgcgacgtagggatgaagtatcaggcggcggcgaccgtggggcggcacgaaggggaggcgcgtgcgccgcggaccgtcgccaggactacgggcggacacaaaggggaggcgcgacggggacaacgggacgcaggggaggcgcacgcgcggccgaccatcgtcgggactgcgccgcggaacagcgctgctggaggcaagtag

SEQ ID NO: 35577 - DNA, 776 bp, Oryza sativa
  Clone ID: PAT_MRT4530_39483C.1
atggcggcggcggctacggcgaggtccggattccggcgcatgttctccatctcggccttctccccgcccaagccgcccaccccgcccccgaaggccgacccctcccccaacctcttcatctcaggcttaagcaagcgtacaacaacagatgggcttaaagaagcttttgcaaagtttggggaagtcatacatgctcgagttgtcacagatcgtgtcactggattctctaaggggtttggcttcgtaaggtatgctacagttgaggatgcagctaaaggaatagaaggaatggatggaaagaactgcctaatttcactggctgccactggaaaggcggaaacatctactaatttctaccatagtgaaaataaaatgaagcgtttatttggtgtgtttctcgatggatgggttatttttgctgaatatgctagacccagaacaccaccgcagcaaccagaaatgaactcacagccacaacaatcatggggccctccatccagttcctggggtgcacagtagctctatcgggctgtggggctcccacgggatcgccaagttattgattctatatttggtttatccctataccaaattgttccaggtgtgaacagagtttccgatccaatattcttatcgtgttggagtggtcgtttccttgcatcccatggtttttgcatggaaaagcccttgccaaattgaatatggcccaaccaattttcctaaaaaaaaaaaaaaaaaaaaaaaaaaaaaaaaaaaaaaaaaacaaaaaaaaaaaa

SEQ ID NO: 35578 - DNA, 305 bp, Oryza sativa
  Clone ID: PAT_MRT4530_39484C.1
ttcgactttcccaagcttgaacccgttccgagaggacccgggcgattttggaaacctaagccactgccaccttgcgcgccgcgagcaccagcgccctggaacccgtgcgggcgaccccgttctcggggatatcctcttgctgatgctgagggcggctcgggagcgcatagccacgcaagacagctgccctggctgactgggacaaaagcgaagccgatcaaggaggagaggatgggccgcaaccaataccgaagactgaggacgagctcgtccaaccccacggcggtaatcggagaactaaggag

SEQ ID NO: 35579 - DNA, 487 bp, Oryza sativa
  Clone ID: PAT_MRT4530_39485C.1
gtggcgaagactatggaacaagaacggtgtgaggcgaagagtcgtacgagtgctttgccaggccagaggcgtctcaggcgaagagtgcaaggcgaagactatctgccgaaggaagacgacttcgccatggcaagttcgctcccccccccgagggccgaagaagcctttccggcccatcaagcctaggggctatagggccggcgatcgcctgacggcccatcaggggcccatgagcccctataacattatgtacccctgtaaatgtccctttcgtaagggtaatcatacctcaagtccatccgcaagtgacgacctagccctttccgccacaagtcgcacaagcgccaatgtactttgccgggcagcaatcggccgtagcagcgcatctggcccctcacgtgcaaccgtggggctgtgtcttgtgggtacagttgtacacctctgatcagagtaaagttattcgaatagccgtgtccgcggttatggg

SEQ ID NO: 35580 - DNA, 4689 bp, Oryza sativa
  Clone ID: PAT_MRT4530_39486C.1
ctagacatagaagcgcttgaggcaggcggcgttccaggaatgatcgaactcctcgccttcgagtgtcgctagacgaaaagatcccgtcctggacttgcgcttgatgaggtatggtccttcccactttgattcaagcttgccaactgctactgggttcgccttttttcttaggacgagctgaccaagcatcagctccctgggtcggacttttttgttgtaagttgccgaagtgcttgtggcgtacttgcgcatgtgctcgagcgcttcgacccttacaccttccaagagttcgagcgatacctcgcgccccgcttcgcccccagagaacataaccattggtgagttagcccctagctccgttggggtcattgcctcatcgccataaagaagcataaatgggctaaacttggttggtcttgtgggggtcgtccgaagggcccagagaaccgatagcaattcctctggccatttgcctttcgccccccccccctcaagtcttttcttcagtgcttctaggatcttgccatttgtacgttcggccgccccatttgactgcgggtgcgcgatcgacgcgaacctgatttccaagttaagcccttcgcacatttctctgaacttatcagagtcaaactgcttgccgttgtcagtaatgaactcctttggcattccgaaacggcaaacaatgtttttccatacaaatttctgtactgctgccgaagtgattgccccaaggggttcggcttcaatccatcgagagaaatattccacagccgagaccatcttatacttcgtggctctgagttgcaaacgcttcgcttctgcttcgtctaccggaagccagccagtttcaaggtgtttcacaaatggagttcgccagtcatatgggtattggcccagtttctcttgatcgattgccatgacttccgggctgtctacgggcacacttggagcatgtaggacttcgaaaaagatgccaggcaaatgtgggccaccacaagcagcggacttcgccaaggcgtctgcttcctcgttctggtctctaggcaagtgttcgactgttatgccggtgaagcatttttccgtggaccgaacggcctccagatacctgttcattccttcttcttttgcctcgaaggatttgtcaacatggcctgctaccaacttggagtcagttcgaattagcaggcgccggactcccagtgctttcgcctttcttaggcccaggagaacggctttgtattctgctgcattgttggttgtgtcgaactgcaatttcgctgtgtaccgaatcggcacaccattcggccaaaagaggactgccgcaacgcctgcccccttgtgcgaccacgaaccgtcagagcacatcacccagaactggtcttcgggctcggggttgggggcaagtaccggtgtccattcagctacgaagtcagctagcacttgagacttgatagcagagcgtgcaacaaaatgcaagtcgaacggggacagctctaccgcccacttgctaagccggccagtgactttcttgcctcggagtattccgcccaaggggtactgtgatgggactatgactttgtgggcctggaagtagtgcttgagcttacgtgaagccattactagagcgtaagcaagcttttccatttcaatgtaccttgtcttcgctccttgcagtgcttcggagacaaagtagactggtttctgtccggactctgtttcttggacgagtgcagcactctttcggccgcctttgagaggaatcgactgagtgcttgacggaggcttcatttgttggatggcatcaattttctcgggattcgcctcgatgcctctttcggaaacaaggaatcccaacaacttgcctgcgcggacgccgaaaacacacttctccggattcagctttatgcctgccgcgcgcaagctgtcgaacgtctcctgcaggtcgatcgcatggtcgaaagccttgcggctttttacgacgatgtcatcgacgtaagcttccacattctgccccaactgcttgccaaggaccttgtacaccagcctggtgaaagttgctcctgcattccttaagccgaaaggcatcctgaggtgacaaaatgtgccgaatgaagtgatgaaggacgttttggggatgtcgagcgggttcatgtagatctcgtcagggctccaggcgaagatatcgatgttctttttgagcacctctagtatgctctcaacttcttcttcgcccatgtcgccccccagtgatacgagctttgtggagtcggcatcatcaatctgcactttcgttaccttgccgtgaggggtgggcttcggcgtgtgcttcggccgctcatgcggttcggtctcaacattgtgcactgctctattgattacggccagatcgcgttttgaagcggccgcaggctgaagccccttgactactatcacccctgttgggccaggtatcttgagcttgagataattgtggtgggaaatggcttcgaacttgttcagggttgcacggccgaagatggcgttttcttcgacagccatcacagccttgcccgcccaatccgttctgaactttctccaagtcatgcgggcttggccttgccttggcggctgtccctggatcgccggctgagactggcgaacagagaggggaggtggttcggcaatttgaacttgcgcttgagcttgggcagtggcgacggaggctttatcgtactcagcttgtatagcttgtcgtcgcttagaatccttctcaccccttgcgaaaccgtcaatgatgcaaagtaggtgctcgagcgtctgcggctccttgttggtgatttttcttgttagttcgccctcaagcagaccagccgatgcggcgtttatgaccgacgcctcagttatgtcttgaacttggcaccgggcttgcgagaagcgacgcatgtactcccttatcaactcacccggcctttggcaaatgccgagtaggtgttgttgcgtcttcggctcctcgtaggtgcctcgaaagttaaggacaaaaaacatcgcgcaattgctcccatgagtaaatgctattggcttcgccttggtattttcgtcaccatgagccgcttcgatcgctgactcatagatggagaggaactccttcgggtcagtttcgcctgaatagcgcgggacgggtgggaacttgaactggggtgggattggacgagtcttgattcccccactcagcggtagccccttttcgcctcccgccctctttaccgcaccttgctgcgggtacggtgtggcgaagggtgaaatcgcagcttgtgcgtgaagttgggccatggcgttcggctgcccggctccaactggaggcacttgctgagccgccatggatgggtcaaaaattggctgcgaccacgtcatggcagcttggattggtgcttggtttgttccgaagcctggggttggaacttgctgccgaacggttggcacctgagcagtgttgccgaagtcgaactgctgtccttgactccacggcgaaggtcccgagccttgctgaatcggtggcaaccaattaggcgcaccttgacttgtattccccaccgggtgagccgatggggttgtacttgaaatgtagtgggcttggagttgcgcctgcagagccgaagccccttccgccaccgtttttgtcgcttggccaggtggttgatgttgtacttgggcagcgactggttgggcttgcagttgcacgtgaggggccggatgcgctgctgcagtcgatggctgcccggcgaagtacattggtgcttgtgcggcttgtggcggaaagggctgggtcgtcacttgcggatggacttggggtgggacataacctgccgaatactgaaggatcggggccgacgtgaccttggtccgtctcgctgcctcgtatgcttgttgttgttcttgcatttggcgaagcatgtcttggagtcatgtcatgttctgtcgcatggcttccatgtcggcttcggcttgtgtttcggggtcagggctgacttgggcctgcacagcggcgagcacggttggggccgctgccggctgcgatggaacggcttggggcaccaccagttggcttgtcgaaaggatctctgccctggtctggagtgcccttgccgccgcagccgccttcgccacgttggccgcattcggcacttgctcagaggtggcaggggccgaaggcagtagtgatggcgcagatgcggaagcagatggtcctcctccatcttcggccacgggcgctgaaggctctgctccctcctcggcggccatgtccgctccggtgtcgctttcctttcgccttgtaaccttctccttcacgaccttcttcggtggcattcgctctcggtggtatcgctcggaggtccccacggacggcgccagctgttgtcgaaacgacaaatggttaccctaacgaaagggacatttacaggggtacataatgttatggaggctcatgggcccctgatgggccgtcgggcgaccgccggccctatagcccctaggcttgatgggccggaaaggcttcttcggccctcgcgggggcgaacttgccatggcgaagtcgtcttccttcggcaaatactcttcgccttgcacccttcgcctgggacgcctctggctcgacaaggtactcgcacgacccctcgcctcgcgctgttcttgctccatagtcttcgccac

SEQ ID NO: 35581 - DNA, 105 bp, Oryza sativa
  Clone ID: PAT_MRT4530_39487C.1
attggagaaggctacaatccgggtgtcccgccgcctcagtctcgagcctatggcgtccgccttaagggtaaaagcgaccccgtgtcgttgttgtggtgtcatgag

SEQ ID NO: 35582 - DNA, 591 bp, Oryza sativa
  Clone ID: PAT_MRT4530_39488C.1
atggaggacgacaagagtaaggaggggaaatcgtcgtcgtcgtaccgcggcgtgcggaagcggccgtggggcaagttcgcggcggagatccgcgacccggagcgcgggggagcccgcgtgtggctcggcacgttcgacaccgcggaggaggccgcgcgggcgtacgaccgcgccgcattcgccatgaagggcgccacggccatgctcaacttcccgggagatcatcatcacggcgccgcaagcaggatgaccagcaccggctcttcttcgtcctccttcaccacgcctcctccggcgaactcctccgcggcggcgggccgcggcggctccgatcggacgacggacaaggtggagctggagtgcctcgacgacaaggtcctggaggacctcctcgcggagaccaactatctacgaggagagcgggacgcggccgggttcgcgacggcgcacacgcaggctgggccggtgatgggctgcgtgggagcacacgcgattcgccgccgcccgctggagtccccgccgcccgccagcgactcgccgacgccccttcgccacgccaccaccgccatgttgcaaaccctcccgttgtga

SEQ ID NO: 35583 - DNA, 670 bp, Oryza sativa
  Clone ID: PAT_MRT4530_39489C.1
ccggccgggacagacgacagcgagcggaaggggaagggaggggaaggggaaggagaaggagaaaggagaagatgaaagcgagcgaaaccctagcctcgctccctcccgagatcttgacgcccgcaaccggaagccgtcggcatggctaaggcgctgcgctctctcgccgggaagctcaggccgctggtcgcagccaccctccgccgggcgccggcgtcgcgctccctccaccccgaggataagttgagtggcaacacaaatcctaagattaagccccttactttccataatgctgaggaggacgctcgcattatgtttgagaacatcaatgagagagcacgagtggtagcggaaccgatggtggcatttcggaggaggcaaaacaggattgtgattgcggcggctgcttctggatgcgttgttggtactgttgtgatgggcgtttttctttgtcaggattgaaacagctagataagagaaccatgcatcgactgccgctattatcattataactatgacttttaattaagactttcttatgaaacctctagcgtgcatgtttttttgtaagcaaacgtgtattgttaattacactgatgttactttgatatgcatggtgataaaaacagagtacgaaaatttaaaaaaaattcttaaaaaaaaaaaaaaa

SEQ ID NO: 35584 - DNA, 388 bp, Oryza sativa
  Clone ID: PAT_MRT4530_3948C.1
gcacgaggtttttttttttttggtttacgggacacacttccaaggctgcagtaaggcttccactgcgctcatcgctggggggcgcaggcagtcgacgactacatcacgggcgtgatcctgccagtgccttctctgggcgtcaaccctcgtgcagctccaggccatcatcgcagcgttcgcggaggcgagcgaggagggcggcagcccactgcgagtgatgcgcataggcaagggcgggccgcggttagcctcgtcgccaagcaccgtcagcccacagaagtgcttcagcgccatccgcgtccggttcggcgtcgcgttcgaccgcaatgcgacagcgtaaatggacctgcgaggcgaggcagccgttgcagttgcagccgagactgat

SEQ ID NO: 35585 - DNA, 354 bp, Oryza sativa
  Clone ID: PAT_MRT4530_39490C.1
atggaggtagctgaaccggtacgcactgagtcagcgtgggacccaccttggggcgccgtggcgaattcgtttgatgagatggagggtgagttcttggagtacctgaacgtggtgcttcggccatggccgcgtgtggccgcctataggcggtcggcccccggcgacggcgtcggagatcgacaatcgcttcgttcagagattgtcgactgctgcgtgcagaggcacaaacaagtgcagggtgagcttgacctggtgcaggatgaggccaccgagtgccacaagagatcagaagaagcggaggccggcaaggcacatgcggtgaaggacctaggcggcaccaatgcgccttcttga

SEQ ID NO: 35586 - DNA, 2466 bp, Oryza sativa
  Clone ID: PAT_MRT4530_39491C.1
taatacaatgccaccatctgctgctgcccacaattcttcagcaaaccctggcgcagcggccatgaacctgagctttgccaacttgccaccagctgatgctcagctttttgccatcttacagaatggcggctacccgttccaggttgctgctcatgctggaggacctcctgctgcctatcgaggcatggcaccaccaggacctgctgttccgttcttcaatgggcatgtttacccttctcacatgttgcacccatcacagcagcaaggggcgtcaccacaaaatcttcagaagaaccccatgtcaaacatgtccgcttcatctcagaagcatcagccacaacaatctcaagggttactgggatatgcaccaaatgctaatgctgctgcagctgccagtaattcccagagctattccagtggcaaccagcgtccagtgctgctgcctggccttgctcaccgccaggacagtgagaaaactgtgcaagatggtccatcgggtgatgacaagtcatctcaccctcagaaaggaggttatgatcataattatgccgttccagttcatcttccaaattttgcattgatgccccctacttccgctgctggtggtggtggtcagagtgacaagaagttaagtgatcaccacccgcatcagctaccaccggcgagtcgagggcagggtgtgagaattgatcttgcttcctctccctcttttgtggttccttttggttctgtgggtgctcctggatctgccccaggtggccttgacttttcttcattggggccgaaccatcaactattccagagccatcaagaagcaggcaggcatggttatcctcagctcaattttgccacagcgcaatctgttcaagctggtcaacacaagccccagcgaacaattgattcagcatcaccatatgaactctcgccccagatctgctgcaccaagcaatacaggtggatattcagaccgcttgaacatgccaagttttcagggtatgatgtacccatcaagtgctgcccaagtgggtgttcctagtcaatctcctcaattgaagccttcgtcagccagagcaacaggtgcacctgctggtgtggcttcccctggtgcttcaccctctaatttgattgtgatgaagagtggtctccatcagcaacaagctaaggctcctatgcagtctctctctacctcaaaccaccaaccccagagttcatcaaagatgggtcctgtcactaatatgtctactggaggaggggatttgtcaagatcttcaaatgctcccgttgcttctggttcaccatccaattcagtctccaaaagtactggtggcagcccaccggcttctggaagtgcaaagggtgttccaccagctgtccaattgccgtcacctcaacaacaatcagccaagaatccagcatcgacgtctggagccaagtcagctcccacaaatcactatagtagtatgcctatgccatcgtaagcagcagtcgcacatgatgaaacagcagccatttccacaaggaggtcatttcttcatctccaatgcatacacaccacaagcccctggagctgctggaggtgttgctcttggcctttaccagaagcgctcagctgacaagacgcagcagcagcagcagccccatcagcagagcgccatgtcggtctccgagcggtgtgcctcactctcatatgtcagcggcacaattgacttttggggccccaatgtcaatgtctgtaaaaccatcaagtgatcagaagcctgctgctggcaagtaagatgtcgatgctcggacttcaggacgctactctggacttgcgagctaactgctaattctgaatatgcgcgaacggagctacgcctcttggaccccagaagaagcagatcgcagcaacagccacaggcgcaagagcctgtttgctggctgttaatcgaagaggacggcgcgcccattcctttgctggatcatttgctaactgaagtatttggaatggttgatgggagtgatacttttgtgtagtaggttatcctctcatgatggaaagctggaggtgcatagaatctctttttagcagttttatgcatggatgtcaaaagctggtctctttctccctctcccaactgctttagctttgttctttttgttgttctcttaactgaagcaaaatttaattagaatgcaggacaaggtaacttttgtgataaaaaaaaattcctctttccctctatattcctcaccattctctgcttggattgttttagcaattgggagaagaaacatattatcccatagatgagccatgatttgattgggttggaggggggtggcatggcatggcatgacctgccttttcggttgtgttgtgttgtaattagctttgaaagagaagtgagaaatgaactgatgaaaagaaaaatcaaggttgaaaattcctggtcaaaaaaaaaaaaaaaaactcgaggggggccc

SEQ ID NO: 35587 - DNA, 957 bp, Oryza sativa
  Clone ID: PAT_MRT4530_39493C.1
atgccggcatcgagttcagcggtgttttgcccaagagaaggaagaagggaacgtgttttggaaggtgaggtcgccaggcagccgggaggagttgagggaggccgggcgcggcggcgcatcggacaacgacagaagtcaatttggcctgcggagcccaagatgatgggctgcctgggggcggtggacggagcggcgcgcgacggccgggcgaggagggaggcggtgcgcagcggccgggcgagaggaggggccgctcgcggcggccgggcgagcagggaggcggcgcacggcagctgggcaaggagggaggcggcgctcgacgactgggcgaggagggaggcggcgtgcggcggctgggcaaggagggaggcggcgctcggcgaccgagcgaggagggaggcgacctcctcctctgcctcttcctcctccggccacctccaccagctgttgacccccgcgcaccgccgactcccgccggctgtcgacccccgctcctctccttccctcccatcggccggcgcgcgctgcctcttctcccgccggccgtcccgacgagctcgcctcctccctcgtagcgctctcgccacgccgcccgccgcccgtcgccgtcgctccgcccgccgctccacgactgtgcgtcggaagaagacgacgacaaggctggcaccccttcggcttcgtgccgccgctctgcctgccgccgccccgttcctctgcccgcctagcgctcccaccgccggccgccaccgccgtagcgccggctgccggacctccccggacggccggacctgccttcacatggaccggcggcgctccagtcgaggggcagcgctgaccacgcccgccgccgtcgccggagctcgcctgctccgccgcccacccgcgccgtcccctgcctgggaaggagagagaggggaaaggaaagaagagagagaagggagagggaagaagagatga

SEQ ID NO: 35588 - DNA, 244 bp, Oryza sativa
  Clone ID: PAT_MRT4530_39494C.1
agcactcctccgcttgtagagagagcatctagcttggcagagcaagtatgacgacgagcggagagagatagcccatggatgatcctcacactgttagccaagtactgaaaagcatctatcaccactaaaggcctaggaacctggatgctacttctatgacaaagccgaaccgatgcacagctaaaggacatcatcagtgaaggccacactgccaggagcggcaacatataaatgaaggccctct

SEQ ID NO: 35589 - DNA, 1233 bp, Oryza sativa
  Clone ID: PAT_MRT4530_39495C.1
cccacgcgtttttccattatggaccgcccgcggcagcagcacgagccggagcatctcggcggcggcggcatcgacgtcgaggtcgagctcgacccggaggacctccagccgtcggtgcccctcaagaaggtccccgcgggggacctcttcgaggcggcccgcgcgggggactgcgcccgcctcgccctcctcctcggcggcggcgccaacgtcaacgagcgcgaccgctgggactccgtcgcgctctactacgcctgcctcgccggccacgccgacgccgcccggatgctgctcgaggccggggccgtctgcgccgagcgcaccttcgacggcgaccgctgccactacgccgcgctcaacctccgcctccggaggctgctcaaggcgttcgaggccaggcccccgccgctgccgccgctccccgccgcgctcagggccacgttcctcgcctgccccgccaaccgcgccgccttcctcgagatgctccagtggaccgccggctccgaagccgccgccctcgccgctgctgctggatttgggccaacggacaatccatcaagtactagcctattccctccggacattacattctacgtggatggaaaaccaattgaagctcatcgggtcattctttgtgcccggtcatccttctttcggaggaaattcaatacagactggaaagacaggaaggaagtgagattttctagccagaagttatcttttggtgccttgtacagccttgtccatttcttctattctgatagactcgaagtggatgtggatgatatggaaaatttggcgcgggcgtgcaaagtttgtaagtgtgagggtttgcaaaagatattgattaaagaagctactctccagagatatgcagaacacaagtcaccgagagatttggacagttcacagaagaggttcattttacatgggcaatccttgccagaggaggatcgccttccatcagccctgcggcatatttttgaggaatgtctagctaactcaagagaacaagaatgttataacgatgaatcaaatgaaatgagcagagactctggtgtagatgctgctgctgatctttatataaaagtgattttagcctcaagatcagagtactttaaagctaggctatctagaaacatggattttcttgaagtcaagagtgggcttcaatcaactcagagccttccttttcttgaagagcatgacatgagtacagaagcatttgaaaag

SEQ ID NO: 35590 - DNA, 111 bp, Oryza sativa
  Clone ID: PAT_MRT4530_39496C.1
ccatttttaattttgaatctgacaagaggcgtgatgacggatggggttactttaaaattccactagcttataagcataagaagcgtgtaatgcctgatctcacaaatgctc

SEQ ID NO: 35591 - DNA, 350 bp, Oryza sativa
  Clone ID: PAT_MRT4530_39497C.1
atgcaggtcccgcaacaccgccggaagaaaacgtttaacccgaccgtactgctcaaccatttcgtcatggaaattattgttctgtggacgagcaagttcattaaccttgcttacagattctgccagtctgtttttgggtacgcacttgaagataacctgcctgagatctgggacatctgtattatcatccagcaacaatgcacatgcccgcgccataagtacagcaagctttctctgctgtggcattcgagcgatatattttaccgacgccatgccagcataacgagccagattacgcagttgaatggcaggcagaccggaaaagttcagtcgggaaaactcaagacttc

SEQ ID NO: 35592 - DNA, 507 bp, Oryza sativa
  Clone ID: PAT_MRT4530_39498C.1
atggcgtcggtaaaatatatcgctcgaatgccacagcagagaaagcttgctgtacttactgcattcgttaaagcacaggaaataacggcattagacgatgccgttgatgtgcttgatatgctaattctggacattatccgcgaagcaaagaaaaccgggcaaaaaaaaagactcaggacactgaaagatcttgatcaggccgcattgttactggcgcgggcatgtgcattgttgctggatgataatacagatgtcccagatctcaggcaggttatcttcaagtgcgtacccaaaaacagactggcagaatctgtaagcaaggttaatgaacttgctcgtccacagaacaataatttccatgacgaaatggttgagcagtacggtcgggttaaacgttttcttccggcggtgttgcgggacctgcatttccgtgcggacccgcaagtggacatgtcctggctggattcatattctgcaaaactgattggtcgaaaaacgccatcttga

SEQ ID NO: 35593 - DNA, 521 bp, Oryza sativa
  Clone ID: PAT_MRT4530_39499C.1
agctagttccaaaaattactactaagatgtgacatatcctaattcaacgaatctagacatactattccttctatcccaaaatataagcatatttggactatgttacggtctccaagatattactttgatcaacaatatatataaaagtaagatataaaagtaagatgttttaaataaaaagagttgcatattatgatagttatttatttatttatttattttattaatggtcaaagttaaaaatgtttgacttgtcactatgctaaaaatgcttttattttgggacagagggagtatatttattatactagtatgtctagatttattgaactatgatgtgttatcttcgagtatgaggttggttcttttggacggagggagtagttagctaagttgttacttcattgctttaatttttaggagatggcttgtctttttctcctgaaaagatagatttgtagttatttttctctctatttataaaattgagatttatctttggatccaaaaaaaaaaaaaaa

SEQ ID NO: 35594 - DNA, 1587 bp, Oryza sativa
  Clone ID: PAT_MRT4530_3949C.1
atgcgacaggatgcggacgaaggagtgggcggcgaggagatgagcgcacgggtgcacgcgaattttctctcttctccgatcggtacgactgcttctcccgccaaatacgaagcatccggagggcccaggcaagcccaggagaacctccttgatgctaagtcgggtgatgaagaagatgtcgcactgctaacgttgggaccgtcgcccctgcactctggtcatgttaccagctaagggaggccctgctgttctgctatgatttggcatggcgatagtaccgcacctccttttcagggagcctataacacgcaatacaatgctagtaacatccttgcggttgatgaattctctcaattcgtgaaagagcctacagcatacctaaggtgaccgattcaaaccgcttgaaatcccaaaggtatgctgctcgtcatgggcgcgtactttcccaagggacggtagtcgagcagcttagaaagttgcgaccaagtctatttagaacaattatcacaacgaaacatggagaacagaaagagatattgactagaagttttgaaagaggactttccggagccatcatcttcgtgtgtgaaaccaatttcattgcgatggatgcacttcaaaatggataagataagttttcctttccggtattatcagcagtgtactgcgccaatatattggggtgcatgctgaccgaccaaatgtaatgctcttgtacatgcccattcattgatcatgttgcatgtggatagcgtggacatccaagattttgccttaaccagaaaagaaccagattattcaaggtacacaagagcaagatacatgaaggaatactctgagagagtcattctaaattgtggtgatgctcttttcataccagaaggatggtatcatcaagttgacagtgatgatttgacaatagcaattaacttttggtggaagtcaagaataatgaatgaaatgttagaacatatggatgcctactatctgcgacgaatcctgagcaggtgtcctgagcaattgaagcagaagcaggttaattctgattcatctgacaaaaaagattcaccactgcaaactctggaaccgtccaccctccaagcactttatgaactcatctcactggttcacaacagtgctgaaatggttagccaaaacgaaataacagaacctacatctcaggatgcatattgcaagcaaagcaatggaagtaagaagattgctgcagatgattcatctctcttggagaaagatcctattgcaaaaataattttaccactcaaaccgcttgaattgcagagtatgctgcttgccatggcgcgtactttcccaaggactctagaagctcttgtcctcaacatgcttggaccaataggagcagagatactgacaaggaagtttgacgagatggaccaacaagcgacaaaagagcaacagagtgagttttacaagacattctacagcgtgtttgatgaccagtatgctgcgatggatgcacttcttaatggaaaagaaatgttttcctttcaggtattccagagtgtgctgcgccaatatattggggtgcatgctgaccgaccaaagtaa

SEQ ID NO: 35595 - DNA, 1353 bp, Oryza sativa
  Clone ID: PAT_MRT4530_394C.1
atggaggcggcggcgaagctgaagaggagcatatcgcggcagctgtcgtcgggggcggcgagggtgtggcggcagctgtcgctggagccggtgtacactccgcggcgggcgggggcggtgggcggtggtggtggaggaggtggaggagggggagggggagggggaggggcgaggccgacgaggttcgggctcgcgaggcagtcgtcgctcgacccgacgccgcgggaggggggcggggcggcggaggatgggtcgggggcggcggcgatgctggccgtgccggagaacctggacgcgacgatgcggctgctgttcgcggcgtgccagggggacgtggccggggtggaggagctgctcagggacggggtggacgtcgacagcattgacctcgacgggcgcacggcgatgcacatcgccgcctgcgaggggcagggggaggtggtgcgcctgctgctcagctggaaggccaacatgaacgcccgcgaccgctggggcagcacgccagcggcagacgcgaagcattacgggcactttgaagtttacaaccttctgagagcaagaggagcaaaaactccgggtcactatgttgccaggtggtatggatccaaagtgtttgttaagatacttgacaaagacagcttctcagacgccaatagcataaatgaatttaaacacgagcttactttactggagaaggcccgccatccaaatttggtccaatttgtgggagctgttacacaaaatgtaccaatgatgattgtttcagagtatcatcaaaagggtgatttagccagttatcttgaaacaaaaggtcgcttgcagccttacaaagctatcagattttcccttgacattgcgaggggattaaattatctccacgagtgcaagccagagccaatcatccatggcaatctgtcaacaaaaagcattgtgcgggatgatgaagggaaacttaaagtggcaggctttggctcacgtagtctgattaaagtctcagaagataatccacaaatggatcagacgacatcaaaatttaacagtgtatacaccgctcctgagatgtacagaaatggaacgtttgacagaagtgtagatgtatttgcatttggtctcattctttatgagatgattgaaggaactcatgctttccacccaaaaccaccggaggaggcggcgaaaatgatttgtttggagggtatgagaccaccgttcaagaacaaacccaaatactatcctgatgatttgagagagcttatacaggagtgctgggatccaacaccttcggtcaggccgacgttcgaagagataatcgagggcaagcagataatgaagtacatgaggaatataccttag

SEQ ID NO: 35596 - DNA, 644 bp, Oryza sativa
  Clone ID: PAT_MRT4530_39500C.1
atggtgaagtcaatagttgatggttcaatagctgagtatcaggccacaggaccagtctatttaccaggggttattttcccaaactatcggcccttggtcccaaacagtcagccgagtacctccaatatgccaccagctcagccgacagcaccgcctactgtcgacctagtacaacaacagccgattcagcagacgccactaaggcagcagattagtcagccgattcagcagcaaagttcgctaaatgcatcggctaggttcaggacgcctgataatcagccgaggcagcacgtcgtaactcaagttcttcataatgtgcaaccagatcaatcggtgatagctcaagttattcccgaacatttgaggtttgcagaagccaagaaaaacttcaaaaagatcaatcatgtctatccttacatgtatggatccgatgatgatgatgattccgaagtagcagctgccgagtggatcagaagcaagaaggttataccataccagtgggtaaagagttctggaaaagaagagatgtatgactttgatattaccaaggctgataagatttttgatccgttacttcgggaaaaacagattaaacttcctgctggtcacatcataccatcgtctgaagaattgggcaagagaag

SEQ ID NO: 35597 - DNA, 773 bp, Oryza sativa
  Clone ID: PAT_MRT4530_39501C.1
gagttcgcccgcgacctcctcccccaagtacttcaagcgcaataacttctccagcttcgtccgccagctcaacacctacggatttgggaatattgtcccggacaggtgggagttcgccaacgacgcttccggcgaggggaacggcggctgctctgcgagatacaccgatggaaggtgacgccaccgacgccagcaacgacgacgacgggggcggtcacggtcgcggccacgatcccgatggcgttgccagtgacgacgcgggatggttcccaggttctgtccggtgaggagcagatcatatcgtccagctcgtcccccgagcccctgctcatgctgtcgcagacgccatccggctccggctccggctccggcggcgtcgcgtccagcgggggatgagaacgagcggctgcggcgagagaacgcgcagctcgcgcgggagcacagccagatgatggcaacaacatcctcctcctcatgtccaagtacacctccacgcagaagctcaacgccgccaactcctcctccaccgccgggaacaacaactgcttcggcgaatccgccgaggcggccacgccgctctcgctccctgccgtcctcgacctcatgccttcctgccccggcggtgccgcccgtatcaaacaacgaagaggaaatgatgagcgcgagaagctcttcggcgtctccatcggccggaagcgaacgcggcacgaaggcggcgccggcggcgaagacgaacaccagcaagccaaccataccgacgccaacacacatgc

SEQ ID NO: 35598 - DNA, 128 bp, Oryza sativa
  Clone ID: PAT_MRT4530_39502C.1
gtctgacgtacgtacaggagtaatggccatcgccaccgagtctgagcaggctcaggtgcaagccgccgccaccgactccgtttcggcagagtcggtcgggcgcatggaggtggacaaggtgtccggct

SEQ ID NO: 35599 - DNA, 377 bp, Oryza sativa
  Clone ID: PAT_MRT4530_39503C.1
tttttgttggattagaagccaaccgtgagagcttgttcaaaacttcagttttctacaatgttgactaccctaattaaaagttgagactccataaaaactcggctacaccgagaaaactgttattacaacagatactgcgtacccaattaacgcaatgggcacccatacgggtacagtatggttaatttaacgacctgatagacgatgcttttaaggagctgccgcagggggagacaaatactgtatacagcgaggtaagacaataaagaaagaacattggaaatcctcttcatcggcatcccaaggctgtaacagatcataatcactcgaggtaccctgcatcgcaaatttgtacccgggttgcgatcgggctgctc

SEQ ID NO: 35600 - DNA, 372 bp, Oryza sativa
  Clone ID: PAT_MRT4530_39504C.1
ctatatgccctctgccgcctcatcctcctcctttgcggacaacgcgtggtggccgtagatccgagccacgagctcttcccgctggctaccgaaggtgcgaccaggagatccgcgcgccttcctcaccggccaccacagccataaccttgaggttgacggctgggaacgaggatggatggacatggaagcatcaccttcctccgtcgcaacctcgaggtcgataactgggaacgaggaaaggttgacgtggaagaggtcggggtgaagctcggccatgcacgcgacaggcgcggaggggtaaaggaggaagacgaggccaataaggagtgcgaggaagaggagaagcaggagcgacggggcggagacagatga

SEQ ID NO: 35601 - DNA, 414 bp, Oryza sativa
  Clone ID: PAT_MRT4530_39505C.1
atggggcgaaacgggtataaattcgcaattgtagctgtggaatatttctctcgatggattgaagtcgaaccccttggggcaatcacttcggcagcagtacagaagtttgtatggaaaaacattgtttgctatttcagagtgccaaaagagttcattactgacaacggagcgaagagggtcgaagcgctcgagcacatgcacaagtacgccacaagcactttgacaacttataacaaaaaagttcgacccacagagctgatgtctagccatcttgtcctaaggaagaaggcgaaccgcgtagcggttggtaagcttgaatcaaagtgggaaggaccatacctcatcaaacacaagtccaggataggatcttttcgcctagcaacactcgaaggcgaggagttcgaccattcctag

SEQ ID NO: 35602 - DNA, 197 bp, Oryza sativa
  Clone ID: PAT_MRT4530_39506C.1
tgtgtgtgatgtctgtcatgtctggtggtgacatgagtgagtatggggtggtttgtcttccgggatcttgcgaacatccttgtgtgaaagttcgataacagtggagccttgtgcgtggcgaaaacctggacgtgcttgctgtgacatctggccgagtgtggaatgtgtcttgagcccagagcgtgatgccaacctgt

SEQ ID NO: 35603 - DNA, 6438 bp, Oryza sativa
  Clone ID: PAT_MRT4530_39507C.1
atggccgatcgcctcgagctccagggcaggcacggcaagtcccgcgtccgcgtctcccgcgtctggcgccgccccgcggccgcgggaggccacgtcatcgtcgagtggaacgtggccgtcagcgtcgtctccgactgcctcccctcctacacctccgacgacaactccgccatcgtcgccaccgattccatcaagaacaccgtgtatgtgaaggccaaggaatgcacggagattgtctccatggaggaattcgcggtgattcttggaaggcatttcacctcgctgtacccgcaggtctcagaggcaacggtgaccatcgccgagcgtccatgggagcgtgtggttgtcgatgggaagcctcattcccacgggttcaaacttggtgttgagaagcacgtcacagaggtcattgtgaagaagtctggaaacttgctcataaattctggaatccaaggatactccctgctaaagacaactcagtccgggttcgaaaaatttgtgagggatcgctacacacttcttcctgatacaagagaaaggattgtagcaacagaagtaactgcctggtggaggtatccttttgagcatgtttcccagattccatcaaagtcattctgcttcacacaaaggtatcaggacgtaaagaaagttcttgcagatacgttctttggtcctcctgatgttggagtgtatagtccatcagtgcagaatacactatacctgatggctaaggaagttctcaacaggttcccggatatagcatctgttcagctaaggatgccgaacctccactttatccctgttaacttagggaacaaagaaaatccaggattagtgaagtttgctgatgatgtgtacctgccgaccgatgaaccacacgggaccattgaagcaacagttgtcgtttcgacaacagctggcgccgaccgtggggaactccgagcgaaaccactgagagcgaatgccactgaagaaggtcgtgaaggagaaggttacaaggcggaaggaaagcgacgccggagcagacatggccgccgaggagggagcagagccttcggcgcccgcagccgaagatggaggaggaccatctgcttccacatatgcgccatcactaccgccttcggccccagccacctctgtgcaagtgccgagcgcggccgatgtggcgaaggcgactgcggcggcaagggcactccagaccagggcggagatcctgccgacaagccaactgttggtgccccaagccgcaccgtcgcagccggcagcggccccaaccgccttgccgcagtgcaggcccaagtcagccctgaccctgaaacacaagccgaagcaaacatggaagccatgcgacagaacatgacatggctccaagacatgcttcgccaaatgcaagaacaacaacaagcatacgaggggaatgcaagtcaaggtacgcctaattggttgccgtcgaatcaaccaggcctgggagcttcgccgtggaatcaaggaccgcagttcgacttcgtcaacgctgctcaggcgccaaccgttcggcagcaagcaccaaccccaggcttcggggcaaaccaagcaccaatccaagccgccatgacatggtcacagccaaccttcgacccatccatggcggctcagcaagtacctccgatcggagctgggcagccgaatgctatagcccaaccccacgcacaagccgtgatttcgcccttcgccacgccatacccgcagcaaggtgcggtaaacagggcgggaggtgaaaaggggctaccgctgagtgggggaatcaagactcgtccaatcccccctcagatcaaattcccacccgtcccacgctattcaggcgaaactgacccgaaggagttcctctccatctacgagtcagcgatcgaagcggctcatggggacgaaaataccaaggcaaaggccgggagagtcgataagggagtacatgcgtcgcttctcgcaagcccggtgccaagttcaagaataactgaggcgtcggtcataaacgctgcttcggctggtctgctcgagggcgaactcacaagaaaaatcgccaacaaggagccacagacgcttgagcacctacttcgcatcattgacaggttcgcaaggggcgaggaggattccaaacgacggcaagctatacaagctgaatacgataaagcctccgtcgccgctgctcaagctcaagcacaagttcaagttgccgaaccacctcccctctccgttcgccagtctcagccaacgatccaaggacagccgccgaggcaaggccaagcccccatgacctggaggaagttcagaaccgaccgtgcgggcaaggctgtgatgactgtcgaagaagtgcaagccctccgcaaggagttcgacgcccagcaagcgagtaaccatcagcagccagcccgcaagaaagtccgaaaagacctctactgcaccttccatggacactcttcgcacaccacggagcaatgccgaaacattaagcaacgtggcaatgcacaagatccaaggccgcaacagggagcaactgtcgaagcacctcgtgaagtagtccaggagcaaacacccccagccgaacaacaccaagatgcacagcgaagggtaatccaagtgattacaagggctgacccgccaggtcagttatccaaacggcaggagaagatgcagatccgaatggtccataacatcacttcggcgggtgaaggggcgccgcaatatctgaaccaactaatttgttttgggccggaagatgccgaaggagttatgttcccgcatcaagatcctctggtgatctcagccgagatagctggcttcgaagtccaacgaatcctggttgacggagggagttcggccgacgttatcttcgccgaagcatatgccaagttggggttgcccatccaggcccttaccccagcaccagcatcgctccgcggtttcggcggagaagcagtacaagttctcggccaagcacttttgctgatagcttttggctcgggggaaaacagacgcgaagagcacgtactgttcgacgtcgtcgacatcccgtacaactacaacgccatattcggccgtgcaaccctgaacaagttcgaagccgtttcccaccacaattatctcaagctcaagatgcccggcccgacaggagtaatagtggtcaaggggcttcaaccttcggccgcttcaaaaggcgatctagccataatcaacagagcagtgcacaatgttgaggctgagctgcatgatcggccgaagcacgcaccaaagcacacccctcacggcaagataacaaaggtgcagattgatgatgccgaccccacaaagctcgtatcactagggggcgacatgggcaaagaagaagttgagagcatcctagaggtgctcaagaagaacattgatatcttcgcctggagccccgacgaggtgggaggtgttccggcagatctcatcatgcatcacctagcagtcaagccggataccaagctaagaaaacagaagttgcgcaagatgtctgccaatcgccaagaagcggcgaaagccgaagtccaaaaactgctcagggcgagggttattcaagagattgaccatccagagtggctggcaaatccagtgctagtgcagaagtcaaacggcaaatggcgcatgtgtatcgatttcacagacctgaacaaagcatgcccgaaagacgatttccccttgccacggatcgaccagcttgtggattcaacagctggaaacagattcatgagtttcctggatgcatattccggctaccaccagatccacatgaacccgctcgacatccccaaaacatctttcatcactacatttggcacattttgtcacctcaggatgcctttcggcctgaggaatgcaggagcaaccttcgccaggctggtgtacaaagtcctttgcaagcagttggggtggaacgtggaagcttatgtcgacgacatcgtcgtaaaaagccgcaagactttcgaccatgcgtccaacctacaggagaccttcgacaatttgcgcgcagtgggcataaaactaaatccagaaaagtgcgttttcggcgttcgcgcaggcaagttgttgggcttccttgtttccgaaagaggcatcgaggcgaatcccgagaaaatcgatgccattcagcaagtgaagcctccgtcgagcgtacatgaagtacaaaagctcgcgggccgaattgcggcactcagtcgattcctctcaaaggcagccgaaagaggtttgcccttcttcaagaccctccggggtgcgggaaagtttaattggacaccagagtgccaagcagcgttcgacgagctaaagcaatacctgcaaagcccgccggccctgataagcccagcaccaggaagtgaactgctactatacttagcagcttcgccggtggcagtcaatgctgccctcgtccaagaaacagatttcggccagaaaccggtctatttcgtcttcgaagcattgcaaggagcgaagacaagatacattgaaatggaaaagctcgcttacgccctggtaatggcttcgcgcaagcttaagcactacttccaggcccacaaagtcatagtaccatcacagtaccccttgggtgaaatactccgaggcaaggaagtcattggccggctcagcaagtgggcggcagagctatccccgttcgatttgcattttgttgcacgcactgctatcaagtctcaagtgctagctgacttcatagctgaatggacaccggtattcgctcccgagcctgaggccgtcgaacaattctgggtggtgtcctccgacgggtcgtggtcgcacaagggggcaggcattgcggcagtcctcattacgccgaatggtatgccgattcggtacgctgcaaggctgcagttcgacacaaccaacaacgcagcagaatacgaagccattcttctgggcctaagaaaggcgaaagcactgggagtacggcgcttgctgatccgaaccgactccaagttggtggcaggccatgttgacaaatccttcgaggcaaaagaagaagggatgaagaggtatttggaggccgttcggtccatggaaaagtgtttcgccggcgtaacggtcgaacacttacctagaggactgaacgaggaagcagacgccttggcgaaatctgttgcttgtggtggcccacattcgcctggcatctttttcgaagtcctacacgcaccaagtgtgcccatggacagctcggaggtgatggaaatcgaccaggtgaaattggacgaagacccatgcgactggcgaaccccgtttgtgaaacaccttgaaactggctggcttccggaggacgaagaagaagcaaagcgcttgcaactcagagccacgaagtataagatggtctcgggccagctctattgctccggggtacttcaacccttacttcgttgcatctcttttgctgaaggcgaggaaatggcaaaggagatacaccaggggctatgtggcgcgcaccaggccgcaagaacagtggcctccaaagtgtttagacaaggagtttattggcccattgtgttgaaagtctgtgttgagcaaatcaagaaatgcgaaagttgccagcgtcatggccgaagccaaaccgcgccccagtatgatttgcagcccattgcgccaatatggcccttcgccaggtgggaactggacatcattgggacgttcccggtggcgcgaaacgggtataagttcgcaattgtggctgtggaatacttctctcgatgggttgaagccgaacccctcggagcaatcacttcggcagtagtacaaaagtttgtatggaaaaacattgtttgccgttttggagtgccaaaagagttcatcactgacaacggcaagcagtttgactctgacaagttcagagaaatgtgcgaaggacttaacctggaaatcaggttctcgtcggtcgcgcacccgcagtcaaatggggcggccgaacgtacaaatggcaagatcctagaagcactaaagaaaaggctcaagggggcagcgaagggaaaatggccagaggaaatgctgtcggttctctgggcccttcggacgacccccacaagaccaaccaagtttagcccgttcatacttctttatggcgatgaggggcgaaaaagggcgcgaagtgtcgctcgaactcttggaggggatcagagtcgacgcactcgagcacatgcgcaagtatgccacaagcacttcggcaacttacaacagataagttcaaccgacgagctgatgcctggtcatctcgtcctaaggaagaaggcaaacccagtagcggttggcaagcttgaatcaaagtgggaaggaccatacctcatcaaaaacaagtccaggacgggatccttttgcctggcaacactcgaaggcgaagagttcgaccattcctggaacgccgcctctctcaagtgcttctatgtctag

SEQ ID NO: 35604 - DNA, 322 bp, Oryza sativa
  Clone ID: PAT_MRT4530_39508C.1
aacaaaaacaaaacggccctcaaatggaccataggaggcaaaaaccatcatcaaaaattttacaagttacaacatcgattcttccccccaaaaaaggcaccccccccaaaaaaaaaacaaaggcccaaaaagccctgaaccccatgggcagggcggcaaagccccaaagccccccaagggtgacggccccccccccaaaaagcccgccaatgttctcgaacaaattgccctgaacaagctggaaacccaactgcatggacctcggatcggcgtaaaacgcgaattcttcagggacagccgcttttaccttgggaaacggggg

SEQ ID NO: 35605 - DNA, 2133 bp, Oryza sativa
  Clone ID: PAT_MRT4530_39509C.1
atggaagcttacatcgacgacatcgtcgtaaaaagtcgcaaggctttcgaccatgcgatcgacctgcagaagacattcgacagcttgcgcacagcaggcataaggctgaatccggagaagtgcgttttcggcgtccgcgcagacaagttgttgggtttccttgtttttgaaagaggcatcgaggcgaatcccgagaaaatcgatgccatccagcaaatgaagcctccgtcaagcgtacatgaagcagccgaaagaggtttgcccttcttgaagaccctccggggcgcaggaaagtttaattggacaccagagtgccaagcagcattcgacgagctaaagcaacacttgcaaagcccgccagctctgataagcccacccctaggaagcgaactgctattatacttagcagcttcgccggtggcagtcagtgctgccctcgtccaagaaacaaagttcggacaaaaaccggtctacttcgtctccgaagcactgcaaggagcgaagacaaggtacattgaaatggaaaagctcgcttacgccctagtgatggcttcgcgcaagcttaagcactacttccaggcccacaaagtcatagtgccatcacagtaccccttgggcgaaatactccgaggcaaggaagtcactggccggctcagcaagtgggcggcagagctatccctgttcgacttacattttgttgcacgctccgccatcaagtctcaagtgctagtcgacttcgtagctgaatggacaccggtacttgcccccgaccccgagcccgccgaacaattctgggtgatgtgctctgacggctcgtggtcgcacaagggagcaggcattgcggcagttctattttcgccgaatggtgtgccgattcggtacgtagcaagactgcagttcgacacaaccaacaatgcagcagaatacgaagccgttctcctgggcctaagaaaggcgaaagcactgggagtccggcgcctgctaattcgaactgactccaagttggtagcaggccatgttgacaaatcctttgaggcaaaagaagagggaatgaagaggtatctggaggctgttcggtccatggaaaaatgcttcaccggcataacggtcgaacacttgcctagagaccagaacgaggaagcagacgccttggcgaaatccgctgcttgtggtggcccacattcacctggcatctttttcgaagtcctacatgctccaagtgtgcccatggacagctccgaagtcatggcaatcgaccaggagaaactgggcgaagacccatatgactggcgaaccctatttgtgaaacaccttgaaactggctggcttccggtagacgaagcagaagcgaagcgtttgcaactcagagccatgaagtataagatggtctcgggtcagctttaccgctccggggtatttcaacccttacttcattgcatctcttttgccgaaggcgaagaaatggcaaaagagatacaccagggactatgtggtgcgcaccaggttgcaagaacagtggcctccaaagtatttagacaaggagtttattggcccactgtgttgaaagtctatgttgagcaaataaagaagtgcgaaagttgccagcatcatggccgaagccaagccgcgccccagtatgatttgcagcccattgcgccaatatggcccttcgccagatggggactggacatcatcgggccattcccggtggcgcgaaacgggtataaattcacaattgtagctgtggaatatttctctcgatggattgaagccgaaccccttggggcaatcacttcggcagcagtacagaagtttgtatggaaaaacattgtttgccgtttcagagtgccaaaagagttcattactgacaacggcaagcagtttgactctgataagttcagagaaatgtgcgaagggcttaacctggaaatcaggtttgcgtcgatcgcacacccgcagtcaaatagggcagccgaacgtacaaatggcaagatcctagaagcactaaagaaaagactcgagggggcagcaaaaggcaaatggccagaggaattgctattggttctctgggccttcggacgacccccacaagaccaaccaagtttagtccgtttatgcttctttatgggatga

SEQ ID NO: 35606 - DNA, 373 bp, Oryza sativa
  Clone ID: PAT_MRT4530_3950C.1
tttaagacttgtcttaatattaaattataacgtgtaacttaaatacaaccatgagtaatactactataaatcggtaattaatcatttgaataaataataaataataataataataataataataataataataataataattaataataataataaataagtaaagattggaattaataataataattttgttgccttaaagtagtaatttaataattgtagatcaaactctaaagtaaatactgttcgaaacttttgaggaatagagcagccattttaaacagtattgctaatcttcttaaattatagaataaatgatatctttaagaaatcagactttatttcttaaagtccgtttcttgactagtgatta

SEQ ID NO: 35607 - DNA, 4725 bp, Oryza sativa
  Clone ID: PAT_MRT4530_39510C.1
ctagagaacagatagcatctcatccggccatttgcccttcgctgcccccttaagccttttctttagtgcttctaggatcttaccatttgcgcgttcggccgccccgtttgactgcgggtgcgcgaccgacgtgaacctgatttccaggttaagcccttcgcacaactctttgaacttgctagagttgaattgcttgccgttgtctgtgatgaacttttttggcactccgaaacggcaaacaaagtttttccacacaaacttctgcactgctgctgaagtgatcgctttgaggggttcggcctcaatccatcgggagaagtattggatggccacaattgcgaacttgtacccgtttcgcaccaccgggaacggcccaatgatgtccaacccccatctggcgaagggccagattggtgcgataggttgcagctcgtattggggcgcagtttggcttcggccatggcgctgacagctttcgcacttcttgacttgctcaacacagactttcagcacggtgggccagtatactccttgtcgaaacactttggaggcaactgttcttgtggcctggtgtgcgccacatagcccctggtgtatttccttggccatttcctcgccttcggcaaaagagatacagcgaagtaaaggttggagtacgccagagcgatatagttggcctgagactattttgtatttcgcggctctgagctgtaagcactttgcttctgcttcatcttccgggaaccagccgctcttgaagtattttacgaatggggttcgccagtctactggatcttcgcccagttctgcctggtcgattgccaagacatccaggccctctgcgggcacatttggtgcgtataggacttcgaaaaagatgcccggtgaatgtgggcccccataagcagcagatttcgccaaggcgtctgcttcctcattctggcctctaggtaaatgttggaccgttatgtcggcgaagcacttttccattgaccgaatagcctccaaatacctcttcattccttcttcctttgcctcaaaggacttatcgacatgacctgccaccaacttggagtcggttcggatgagcaagcgccgaacccccaatgctttcgccttttttaggcccaaaagaatagcatcgtattctgctgcgttgttggttgtgtcgaactgcagccttgcggcatagcaaatcggcaggccccctggcgaagtgagtaccgccgcaacgctcgcccccttgtgcgaccacgagccgtcggagtacatcacccagggttgttcaacgggctcgggctcagaggcgaatgccagtgtccattcggccacgaagtcagctagcacttgagattcgcccaaagggtactgcgatggcaccgtgactttgtgggcctgaaagtagtgtttaagcttgcgcaaagccatcaccagggcgtaagcaagcgtttccatttcaatgtatcttttcttcgctccttgcaatgcttcggagacgaaatagaccggtttctggcctgactttgtttcttgaaagagggcagcactgactgccactggcgaagctgctaggtatagtagcagttcgcttcctggtgctgggctgattagggcgggcgggctttgcagatattgctttagctcctcgaacgctgattggcattcgggtgtccaggagaattttcccgcgccccggagggtcttgaagaagggtaaacctctttcggctgcctttgagaggaatcgacttagtgccacaattcggcctgcgagcttttgaacttcacgtacgctcgacggaggcttcatttgctggatggcatcgattttctcgggattcgcctcaatgcctctttcggaaacaaggaaacccaacaacttgcctgcgcggacgctgaaaacgcacttctccggattcagccttatgcctgctgtgcgcacctgcaggttgatcgcatggtcgaaagccttgcggctttttctgacgatgtcgtcgacataagcttccacattccaccccaactgcttgccgaggaccttgtacaccagcctggcgaaagttgctcctgcgttccttaagccgaaaggcatcctgaggtgacaaaatgtgccgattggagtgatgaaggatgttttggggatgtcgagcgggttcatgtggatctggtggtaaccggaatatgcatccaggaaactcatgagctcgcatccagctgttgaatccacgagctggtcgattcgtggcaaggggaagtcgtctttcggacacgctttgttcaggtctgtgaaattgacacacatgcgccatttgccgtttgacttccgcactagcactggattcgccaaccactccagatggtcaatctcttggataacccccgccctgagtaatttttgtacttcggctttcgccgcttcttggcgatcggcagacatcttgtgcaacttttgttttcttggcttaatgtccggcttgactgctaggtgatgcatgatgagatccgccgggacaccccccacctcgtcagggctccaggcgaagatatcgatgttctttttgagcacctctaggatactctcaacttcttcttcgcccatgtcggcccctagtgatacgagctttgtggggtcggcatcatcaatctgcatttttgttatcttgccatgaggggtgggctttggcatgtgcttcggccgttcatgcggttcggtctcaacactgtgcgctgctctgttgattatggctagatcgccttttgaagcggccgaatgctgaagccccttgactactatcacccctgtcgggccggacatcttgagcttgagataattgtagtgggaaatggcttcgaacttgttcagggttgcacggctgatgatggcgttgtagttatatgggatgtcgacgacgtcgaacagtatttgctcttcacgtctgttctcccccgagccaaaggctatcagcaaaagtgcttggtcgagaacttgaactgcttcgccgccgaaaccgcggagcgatgctggtgctggggtaagggcttgggtaggcaaccccatcttggcatatgcttcggcgaagataacatcggccgaactccctccgtcgaccaggattcgtcggacttcgaaaccagctatctcagctgagattaccaggggatcttgatgcgggaacataactccttctgcgtctttcggcccaaaagaaattagctggttcaaatactgcggcgccccttcacccgccgaagtgatgctatggaccatacgaatctgcatcttcttgtgccgtttggacaactggcttggcgggtcagccctcgtaatcacttggattacccttcgctgtacatcttggcgttgtttggctgggggtgtttgcttcctaactgcttcgtggggtgcttcgacagttgttccctgctgcggccttgggtcttgcgcgttaccacattgcctaatgtttcggcattgctccgtggtgtgcgaagagcgttcgtgaaaggcgcagtagaggtcttttcggaccttcttgcgggctggctgctgatggttgctcgcttgctgggcatcgaactccttgcggagggcttgcacttcttcgaccgccatcacagctttgaccgcacggtctgttcttcgggtcagtttcgcccccttttcgcctcccgccctgtttgccgcaccttgcggcgggtacggtgtggcgaaaggcaaaatcgcagcttgtgcgtctggttgggccgtggcattcgactgcccggttccaactggaggtacttgctgagccgccatggatgggtcaaaaattagctgcgaccacgtcatggcagcttggattggtgcttggtttgttccgaagcctggagttggagcttgctgccgaacggttggcgcctgagcagcgttgatgaagtcgaactgcggtccttgattccacggcgaaactcccaggcccggctgaatcggtggcaaccaattaggcgcaccttgacttgtattcccctccgggtgggccgatggggttgtacttgaaatgcagtggggttggttgagttgctgaaggaaagtttggagttgcgcctgaagagccgaagccccttccgccactgtttgtggcgcttggccaggtggttgatgatgtacttgggcagcgactggttgagcttgcagttgcacgtgaggggccggatgcacagctgcggccgattgctgcccggcgaagtacaccggcgcctgtgcggcttgtggcggaaagggctgggtcgtcacttgcggatggacttgaggtgggacataacctgccgaatactgaaggattggagccgacgtggccttggtccgccttgccgcctcgtatgattgttgttgttcttgcatttggcgaagcatgtcttggagccgtgtcatgttctgtcgcatggcttccatgtcggtttcggcttgtgcttcggggtcagggctgacttgggcctgcacaacggcgagcgcagttggggccgctgccggctgcgatggagcggcttggggcaccaccggttggtttgtcgaaaggatctccgccctggtctggagtgcccttgccgccgcaaccgccttcgccacgccggccgcgttcggcacttgcacagaggttgcatgggccgaaggcggttgtgatggcgcttgtcctcctccatcttcggccacgggcgccgaaggctctgctccttcctcggcggccat

SEQ ID NO: 35608 - DNA, 4320 bp, Oryza sativa
  Clone ID: PAT_MRT4530_39511C.1
atggccgccgaggaaggagcagagccttcggcatccgtggccgaagatggagaaggacaagcgccatcacagccgccttcggcccccgcgccatcacaaccgtcttcggcccccgcaacctcagtgcaagtgccgaacacggccgacgtggcgaaggcggctgcgacggcaagggcactccagaccagggcggagaacctttcaacaaaccaactggtggtgcctcaagccgccccatcacagccggcggcgccgactgcgcccgccgttgtacaggcccaaatcagcctggaccccgaagcgcaagccgaagccgacatggaagccatgcggcagaacatgacacggctccaagacatgcttcgccaaatgcaagaacaacaacaagcatacgaggcgacaaggcggaccaaggccacgtcggctgcaatccttcagtattcggcaggctatgccccacctcaagtccggccgcaagtggtgacccagccttctccgccactagccgcacagccgccggtgtacttcgccgggcagcatcaaccacctggccaagcgacacaaacagtggcggaaggggcttcggctctgcaggcgcaactccaagctttccttcagcaactcaaccaaccccactacatttcaagtacaaccccatcggctcacccggtgggggatacaagtcaaggtgcgcctaattggttgccaccgattcagccaggctcgggaccttcgccatggagtcaaggacagcagttcgacttcggcaacactgctcagccaatctttgacccatccatggcggcccagcaagtaccaccagttggagccgggcagtcgaatgccgcggcccaactccacgcacaagctgcgatttcgcccttcgccacaccgtacccgcagcaagccaatagcatttactcatgggagcaattgcgcgatgtttttgtccttaactttcgaggcacctataaggagccgaagacgcagcaacaccttcttggcattcgccaaaggccgggggagtcgataagggagtacatgcgtcgcttctcgcaagcccggtgccaagttcaagacataaccgaggcgtcggttataaacgccgcttcggccggtctgcttgagggcgaactaacaagaaaaatcaccaacaaggaaccgcagacgctcgagcacctacttcgcatcattgacgggttcgcaaggggcgaggaggattctaagcgacgctcaagcacaagttcaaattgccgatccacctcccctctttgttcgccagtctcagccggcgatccagggacagccgccaaggagaccgaaccgcatgagcggcccaagcacacgccgaagcccacccctcacggcaagataacaaaagtgcagatggatgatgccgaccccacaaagctcgtatcactggggggcgacatgggcgaagaagaagttgagagcatccaagaggtgctcaaaaagaacatcgatatcttcgcctggagccctaacgaggtggggggcgtcccggcggatctcatcatgcatcacttagcagtcaagccgaatattaagccaagaaagcaaaagttgcgcaagatgtctgccgatcgccaagaagcggcgaagaccgaagtacaaaaattactctgggcgggggttattcaagagattgaccaaccggagtggttggcgaatccagtgctggtgcggaagtcaaatggcaaatggcgcatgtgtgtcgatttcacagacctgaacaagatccacatgaacccgctcgacatccccaaaacatccttcatcactccattcggcacattttgtcacctcaggatgcctttcggcttaaggaacgcaggagcaaccttcgccaggctggtgtacaaggtccttggcaagcagctggggcgaaaagtggaagcttacgtcgacgacatcgtcgtaaaaagccgcaaggctttcgaccatgcgttcgacctgcaagagacgttcgacagcttgcgcgcggcaggcataaagcagaatccggagaagtgcgttttcagcgtccgcgtaggcaagttgttagatttccttgtttccgaaaggggcatcgaggcgaatcccgagaaaatcaatgccatccagcaaatgaagcctccgtcaagcgtacatgaagtacaaaagcttacaggccgaattgcagcactcagtcgattcctctcaaaggcggccgaaagaggtttgcccttcttcaagaccctccggggtgcgggaaagtttaattggacaccagagtgcaaagcagcattcgatgagctaaagcaatacttgcaaagcccgccagctttgataagcccatccccaggaagcgaactgctattatacttggtagcttcgccggtggcagtcagtgctgcactcgtccaagaaacagagtccggacagaaaccggtctacttcgtctccgaagcactgcaaggagcgaagacaaggtacattgaaatgaaaaagcttgcttacgctctagtaatggcttcgcgcaagcttaagcactacttccaggcccacaaagtcatagtcccatcacagtaccccttgggcgaaatactccgagggaaggaagtcactggccggctcagcaagtgggcggcagagctatccccgttcgacttgcattttgttgcacgctctgctatcaagtctcaagtgctagctgacttcgtagctgaatggacactagtacttgcccccgaccccgagcccaacgaccagttctgggtgatgtgctctgacggttcgtggtcgcacaagggggcaggcgttgcggcagtcctcttttcgccgaatggtgtgccgatttggtacgcagcgagattgcagttcgacacaaccaacaatgcagcagaatacgaagccgttctaactgactccaagttggtagtaggccatgttgacaaatccttcgaggcaaaagaagagggaatgaagaggtatctggaggctgttcggtccatggaaaaaagcttcaccggcataacggtcgaacacttgcctagagaccaaaacgtggaagcagacgccttggcgaaatccgctgcttgtggtggcccacattcgcctggcatctttttcgaagtcctacatgctccaagtgtgcccatggacagctcggaagtcatgacaatcgaccaagagaaactgggcgaagacctatatgactggcgaaccccatttgtgaaacaccttgaaactggttggcttctggtagacgaagcagaagcgaagcgtttgcaactcagagccacgaagtataggatggtctcgggtcagctttaccgctccggggtacttcaacccttacttcgttgcatctcttttgccgaaggcgaagaaatggcaaaggaaatacatcaggggctatgtggcgcgcaccaggctgcaagaagagtggcctccaaagtatttagacaaggagtttattggcccactgtgttgaaagtctgtgttgagcaaatcaagaagtgcgaaagttgccagcgtcatggccgaagccatgccgcgccccagtatgatctgcagcccattgcaccaatatggcccttcgccagatggggaccggacattattgggccattcccgctgtggaatatttctctcgatggatcgaagtcgaacccccttggggcaatcacttcggcagcagtacagaagtttgtatggaaaaacattgtttgccgtttcggggtgccaaaagagttcattactgacaacggcaagcagtttgactccgacaagttcagagaaatgtgcgaagggcttaacctagaaatcaggttcgcgtcggtcgcgcacccacagtcaaatggggcggccgaacgtacaaatagcaagatcctagaagcactaaagaaaagacttgagggggcggcgaaaggcaaatggccagaagaattgttatcggttctttgggcccttcggacgacccccacaagaccaaccaagtttagcccatttatgcttctttatggcgatgaggcaatgaccccagcggagctaggggctaactcaccaagggttatgttctccgggggcaaagaggggcgcgaggtatcactcgaactcttggaaggtgtaagggtcgaagcgctcgagcacttgcacaagtacgccacaagcacttcggcaacttacaacaaaaaagtccgacccacggagctaatgcctggtcatctcgtcctaaggaaaaaggcgaacccagtagcggttggcaagcttgaatcaaagtgggaaggaccatatacatcatcaaacacaagtccaggatgggatcttttcgcctag

SEQ ID NO: 35609 - DNA, 363 bp, Oryza sativa
  Clone ID: PAT_MRT4530_39512C.1
atgtcgtcagcagacagccacgtttcccacgtcgcacctgcctccggcggaagtggaggttctacggttcccggcaagaggagtgtaaaacatgcaagacctatatgccttaagaggataaactatggtctgcctcgggcccggccaagtcctgggcctcaggctcaccttaatccttacaagtcacgcattactcaaggaagaggggtgacggggcttgccaagcataaaggcgtaaaccaagataagtactgtggccttgtttcgggcaagtcgggcctcgtcgagcccaccacgcaccacgtggtgagcacactggcgaaagctcaactatttcagacgaagcccgggagcccggggtaa

SEQ ID NO: 35610 - DNA, 3147 bp, Oryza sativa
  Clone ID: PAT_MRT4530_39513C.1
atggcggctcagcaagtgcctccagttggagccgggcagccgaacgccatggcccaacctcacgcacaagctgcgatttcgcccttcgccacaccgtacccgcagcaaggtgcggtaaacagggcgggaggcgaaaaggggctaccgctgagtgggggaatcaagactcgtccaatccagccccagttcaagttcccacctgtcccgcgttactcgggcgaaactaaaccgaaggagttcctctccatctacgagtcagcgatcgaagcggctcatggtgacgaaaacaccaaggcgaaggtaatacatctcgctctagacggcatcgcccgttcttggtatttcaatttaccagctaatagcatttactcatgggagcaattgcgcaatgtttttgtccttaactttcgaggcacctatgaggagccgaagacgcagcaacaccttcttggcattcgccaaaggccgggggagtcgataagggagtggttggcgaatccagtgctggtgcggaagtcaaatggcaaatggcgcatgtgtgtcgatttcacagacctgaacaaggcatgtccgaaagacgatttccccttgccgcgaatcgaccagcttgtggattcaacggctggatgcgagctcatgagtttcctggatgcatattccggttaccaccagatccacatgaacccgctcgacatccccaaaacatccttcatcactccattcggcacattttgtcaccttaggatgcctttcggcttaaggaacgcaggaacaaccttcgccaggctggtgtacaaggtctttggcaagcagttggggcgaaacgtggaagcttacatcgacgacatcgtcgtaaaaagccgcaaggctttcgaccatgcgatcgacctgcaggagacgttcgacaacttgcgcgcggcaggcataaagctgaatccaaagaagtgcgttttcggcgtccgcgcaggcaagttgttgggtttccatgtttccgaaagaggcatcgaggcgaatccagagaaaatcgatgccatccagcaaatgaagcctccgtcaagcgtacatgaagtacaaaagcttgcaggccgaattgcggcactcagtcgattcctctcaaaggcggccgaaagaggtctgcccttcttcaagaccctccggggcgcgggaaagtttaattggacaccagagtgccaagcagcatttgacgagctaaagcgatatttgcaaagcccgccagctctgataagcccacccccaggaagcgaactgctattatacttggcagcttcgccggtggcagtcagtgctgcactcgtccaagaaatagagtccggacagaaaccggtctacttcgtctccgaagcattgcaaggagcgaagacaaggtacattgaaatggaaaagcttgcttacgctctagtaatggcttcgcgcaagcttaagcactacttccaggcccacaaagtcatagtcccatcacagtacctcttgggcgaaatactccgaggcaaggaagtcactggccggctcagcaagtgggcggcggagctatccccgttcgacttgcattttgttgcacgctctgctatcaagtctcaagtgctagctgacttcgtagccgaatggacaccagtacttgcccccgaccccgagcccgacgaccagttctgggtgatgtcctctaacgcaagattgcagttcgacacaaccaacaatgcagcagaatacgaagccgttctcctgggcctaagaaaggcgaaagcactaggagtccggcgcctgctaattcgaactgactccaagttggtagcaggccatgttgacaaatccttcgaggcaaaagaaaagggaatgaagaggtatctggaggccattcagtccatggaaaaatgcttcaccggcataacagtcgaacacttgcctagagaccagaacgaggaagtagacaccttggcgaaatccgctgcttgcggtggcccgtattcgcctggcatttttttcgaagtcctacatgctccaagtgtgcccatggacagcacggaagtcatggcaatcgaccaagagaaactgggcgaagacccatatgactggcgaaccccatttgtgaaacaccttgaaactggctggcttccggtagacgaagcagaagcgaagcgtttgcaactcaaagccacgaagtataagatggtctcgggtcagctttaccgctctggggtacttcaacccttacttcgttgcatctcttttgccgaaggcgaacaaatggcaaaggagatacaccaggggctatgtggcgcgcaccaggctgcaagaacagtggcttccaaagtatttagacaaggagtttattggcccactgtgttgaaagtctgcgttgagcaaatcaagtgcgaaaattgccagcgtcatggccgaagccaagccgcgccccagtatgatctgcagcccattgcgccagtatggcccttcgccaggtggggactggacatcattgggccattcccggtggcgcgaaacgggtataaattcacaattgtagctgtggaatatttctctcgatggattgaagccgaaccccttgggacaatcactttggcagcagtacagaaatttgtatggaaaaacattgtttgccgtttcggagtgccaaaggagttcattaccgacaatggtaagcagtttgactctgataagttcagagaaatgtgcgaagggcttaacctacaaatcagaccaaccaagtttagcccatttatgcctctttatggcgatgaggcaatgaccccaacggagttaggggctaactcaccaagggttatattctctgggggcgaagaggggcgcgaggtatcgctcgaactcttggaaggtgtaagggtcgaagcgctcgagcacatgcacaagtacgccacaagcacttcggcagcttacaacaaaaaagtccgacccagggagcttatgcctggtcagctcgtcctaaggaaaaaggcgaacccaatagaagttggcaagcttgaatcaaagtgggaaggaccatacctcatcaagcgcaagtccaggacgggatcttttcgcctagcgacactcgaaggcgaggagttcgaccattcctggaacgccgcctccctcgagcgcttctatgtctag

SEQ ID NO: 35611 - DNA, 3798 bp, Oryza sativa
  Clone ID: PAT_MRT4530_39514C.1
ctagacatagaagcgcttgagagaggtggcgttccaggaatggtcgaactcctcgcctttgagtgtcgttaggcaaaaagatcccgtcctagacttgtgtttgatgaggtatggtccttcccactttgattcaagcatgccaaccgctactgggttcgccttcttccttaggacgagatgaccaggcatcagctccatgggtcgaacttttttgttgtaagttgccgaagtgcttgtggcatacttgtgcatgtgctccagcgcttcgactcttactccttccaagagtttgagcgatacttcgcgtccctcttcgcccccagagaacatcacccttggtgagttagcccctagctctgctggggtcattgcctcatcgccataaagaagcataaacgggctaaacttggttggtcttgtgggggtcgttcgaagggcccagagaaccgatagcaattcctctggccatttgcctttcgctgccccctcgagtcttttctttagtgcttctaggatcttgccatttgtacgttcggccgccccatttgactgcgggtgtgcgaccgacgcgaacctgatttccaggttaagcccttcgcacatttctctggacttatcagagtcaaactgcttgccgttgtcagtaatgaattcttttggcactctgaaacgacaaacaatgttcttccatacaaacttctgtactattgccgaagttattgccccaaggggttcggcctcaatccatcgagagaaatattccatagctacaattgcgaatttatacccgtttcgcgccaccgggaacggctcaatgatatccagtccccatctggcgaagggccatattggcgcaatgggctgcagatcatattggggcgcggcttggcttcggccatgatgctggcaactttcgcacttcttgatttgcttaacacagactttcaacacagtgggccaataaactccttgtctaaatactttggaggccactgttcttgtagcctggtgcgcgccacatagcccctggtgtatctcatttgccatttcttcgccttcggcaaaagagatgcaacgaaataagggttgaagtaccccagagcagtaaagctgacccgagaccatcttatacttcatggctctgagttgcaaacgcttcgcttctgcttcgtctaccggaagccagctagtttcaaggtgtttcgcaaatggagttcgccagtcacacgggtcttcgcccagtttctcctggtcgattgccatgacttccgagctgtccatgggcacacttggagcatgtaggacttcgaaaaagatgccaggcgaatgtgggccaccacaagcagcagatttcgtcaaggcgtctgcttcctcgttctggtctctaggcaagtgttcgaccgttatgccggtgaaacatttttccatggaccgaacagcctctagatacctcttcatccccttttcttttgcctcgaaggatttgtcaacatggcctgctaccaacttggagtcagttcgaattagcaagcgccggactcccagtgctttcgcctttcttaggcccaagagaacggcttcgtattctgctgcattgttggttgtgtcgaactgcagtcttgctgcgtaccgaatcggcacaccattcggcgagaataggactgccgcaatgcctggtcccttgtgcgaccacgagccgtcagagcacataacccagaattgttcggcgggctcggggtcgggggcaagtaccggtgtccattcagctacgaagtcggctagcacttgagacttgatagcagagcgtgcaacaaaatgtaagtcgaacggggatagttctgccgcccacttgctgagccggccagtgacttccttgcctcggagtatttcgcccaaggggtactgtgatggcactatgactttgtgggcctggaagtagtgcttaagcttgcgcgaagccatcactagggcgtaagcgagcttttccatttcaatgtaccttgtcttcgctccttgcagtgcttcggagacgaagtagaccggtttttgtccaaactttgtttcttggacgagggcagcactgactgccaccggcgaagctgctaagtataatagcagttcgcttcctgggggtgggcttatcagagctggcgggctttgcaagtattgctttagctcgtcgaatgctgcttggcactctggtgtccaattaaactttcctgcgccccggagggtcttgaagaagggcaaacctctttcggctgcccttcgctgtacatcttggcgttgttcggctgggggtgtttgctcttgaactgcttcgcggggtgcttcgacagttgttccctgctgaggccttgagtcttgcgcgttgccacattgcctaatgtttcggcattgttccgtggtgtgcgaagagcgtccgtgaaaggcgcagtagaggtcttttcggaccttcttgcgggctggctgctgatggttgctcacttgctgggcatcgaactccttgcggagggcttgcacttcttcgaccgccatcacagctttgcccgcacggtctgttctgaactttctccaagttatgggggcttggccttgtctcggcggctgtccttggatcgccggctgagactggcgaacgaagaggggaggttgttcggcaacttgaacttgtgcttgagcttgagcagcggcgacggaggctttgtcgtactcagcttgtatagcttgccgtcgcttggaatcctcctcgccccttgcgaacccgtcaatgatgcgaagtaggtgctcgagcgtctgaggctccttcgctttggtattttcatcaccatgagccacttcgatcgctgactcgtagatggagaggaactccttcgggtcagtttcgcctgaatagcacgggacgggtgggaacttgaactgggctgggattggacgagtcttgattcccccactcagcggtagccccttttcgcctcccgccctgtttaccgcaccctgctgcgggtacggtgtggcgaagggcgaaatcgcagcttgtacgcgaggttgggccatggcattcggctgcccggctccaactggaggtacttgctgagccgccatggatgggtcaaaaattggctgtgaccacgtcatggcagcttggattggtgcttggtttgttccgaagcctggagttggagcttgctgccgaacggttggtgcctggacagcgttgacgaagtcgaactgcggtccttgattccacagcgaaactcccaggcccggctgaatcggtggcaaccaattaggcgcaccttgacttgtattcccctccgggtgggccgatggggttgtacttgaaatacagtggggttggttgagttgctgaagaaaagcttggagttgcgccttggtccgccttgccgcctcgtatgcttgttgttgttcttgcatttggcgaagcatgtcttggagccgtgtcatgttctgtcgcatggcttccatgtcggcttcggcttgtgtctcagggtcagggctgacatgggcctgcatagcggcgagcgcagtcggggctgccgccggctgcgatggagtggcttggggcaccactagttggcttgtcgaaaggatctccgccctggtctggagtgcccttgccacagcagccgccttcgccacgtcggccgcgttcggcacttgcacagaggcggcaggggccgaaggcgtttgagatggcgcagatgtggaagcagatggtcctcctccatcttcggccactggcgccgaatgctctgctccctcctcggcggccat

SEQ ID NO: 35612 - DNA, 5967 bp, Oryza sativa
  Clone ID: PAT_MRT4530_39515C.1
atgtctttcgtgattagtcttgttggcggatggcatgaggcccttcgaccaagtctgccgaaacccgtggcgaaggctatggatcaagaacggcgtgaggcgaagagtcgtgcgagtgccttgccgggccagaggcgtctcaggcgaagggtgcaaggcgaagactatgaagacgacttcgccatgacaagttcgcccccgcgagggccaaagaagcctttccggcccatcaagcctaggggctttagggccggcgatcgcctgacggcccatcaggggcccatgaacccctatagcattatgtacccctgtaaatgtccctttcgtaaggttgtcgtttcgacaacatctggcgccgaccgtggggacctccgagcgaaaccactgagagcgaatgccaccgaagagggtcgtgaaggagaaggttgccaggcggagggagagcgacgccggaccggacatggctgccgaggaaggagcagagccttccgcgcccgtggccgaagatggaggagcacaagcgccatcacaaccgccttcggcccctgcaacctcagtgcaagtgccgaatgcgaccgacatggcgaaggcggctgcggcggcaagggcactccagaccagggcggagatcctttcgacaagtcaaccggtggtgccccaagccgctccatcgcaccgcacaagggccaggtgtacttcgccgggcagcatcaaccacctggccaagcgccacaatcagtggcggaaggggctttggctctgcaggcgcaactccaagctttccttcagcaactcaaccaaccccactgcatttcaagtacaaccccatcggcccgcccggaggggaatacaagtcaaggtacgcttaattggttgccaccgattcagccgggcctgggagtttcgccgtggaatcaaggatcgcagttcgactttgtcaacgccgctcaggcgccaaccgttcggcagcaagctccgactccaggcttcggaacaaaccaagcaccaattcaagctgccatgacgtggtcacagccaatttttgacccggccatggcggctcagcaagtaccaccagttggagccgggcagccgaacgccatggcccaacctcacgcacaagctgcgatttcgcccttcgccacaccgtacccgcaacaaggtgcggtaaacagggcgggaggcgaaaaggggctaccgctgagtgggggaatcaagactcgtccaatcccaccccagttcaagttcccacccgtcccacgctattcgggcgaaaccgacccgaaggagttcctctccatctacgagtcagcgatcgaagcggctcatggtgacgaaaataccaaggcaaaggtaatacatctcgctctagacggcatcgcccgttcttggtatttcaatttaccagccaatagcatttactcatgggagcaattgcgcgatgtttttgtccttaactttcgaggcacctatgaggagccgaagacgcagcaacaccttctcggcattcgccaaaggccgggggagtcgataagggagtacgtgcgtcgcttctcgcaagcccggtgccaagttcaagacataaccgaggcgtcggttataaacgccgcttcggccggactgctcgagggcgaactcacaagaaaaatcgccaataaggaggcacagacgctcgagcacctacttcgcatcattgatgggttcgcaaggggtgaggaggattccaagcgacgacaagctatacaagatgagtacgacaaagcctccgtcgccgctgctcaagctcaagcacaagttcaagttgccgaaccacctcccctctctattcgccagtctcagccggcaatccaaggacagccgccgaggcaaggccaagcccccatgacttggagaaagttcagaacagatcgggcgggcaaggctgtgatggctgtcgaagaagtgcaagccctccgcaaggagttcgacgcccagcaagcaagcaaccatcagcagccagcctgcaagaaagtccgaaaagacctctactgcgcctttcacggacgctcttcgcataccacggaacaatgccgaaacattaggcaacgtggcaacgcgcaagacccaaggccgcagcagggagcaactatcgaagcaccccgcgaagcagttcaggagcaaacacccccagccgaacagcgccaagatgcgcagcgaaggataatccaagtgattacaagggccgacccaccaagccagttgtccaaacggcagaagaagatgcagatccgtatggtccacagcatcacttcggcgggcgaaggggcgccacagtacatgaaccagctgatctctttcgggccagaagacgccgaaggagtcctgttcccgcatcaagatccactggtaatctcagctgagatagccggttttgaagtacggcgaatcctggtcgatggagggagttcggccgacattatctttgccgaagcatatgctaagatggggttgccaacccaagcacttaccccagcaccagcatcgctccgcggttttggtggggaaccagttcaagttcttggccaagcactcttgctgatagcctttggctcgggggagaacagacgcgaagagcaaatactgttcgacgtcgttgacatcccgtacaactataacgccattttcggccgcgcaatcctgaataagttcgaagccatttcccaccataattatctcaagctcaagatgcccagcccgacaggggtgattgtattcaaggggcttcagccttcggccgctccaaaaggcgatctagccataattaacagagcagtgcacagtgttgagcccgaactgcatgaacggccaaagcacacgccaaagcccacccctcacggcaagataacaaaaatgcagattgatgatgccgaccccacaaagctcgtatcactggggggcgacatgggcgaagaagaagttgagagtatcctacaggtgctcaagaagaacatcgacatcttcgcctggagccctgacgaggtgggaggtgttccggcagatctcatcatgcatcacctggcggtcaagccggacattaagccaagaaaacaaaagttgcgcaagatgtctgccgatcgccaagaagcggcgaaggccgaagtacaaaaattactccgggcgggggttatccaagagattgaccatccggagtggctggcgaatccagtgctggtgcggaagtcaaacgtcaaatggcgcatgtgtgtcgatttcacagacctgaacaaagcgtgtccgaaagacgatttccccttgccgcgaatcgaccagctcgtggattcaacagctggatgcgagctcatgagtttcctggatgcatattccggttaccaccagatccacatgaagctgcccgacatccccaaaacatccttcatcactccattcggcacattttgtcacctcaggatgcctttcggcttgaggaacgcaggagcaactttcgtcaggctggtgtacaaggtccttggcaagcagttgggacggaatgtggaagcttacgtcgacgacatcgtcgtaaaaagccgcaaggctttcgaccatgcaatcgacctgcaggagacgttcgacagcttgcgcgcggcaggcataaagctgaatctggagaagtgcgttttcggcgtccgcgcaggcaatttgttgggtttccttgtttccgaaagaggcatcgaggcgaatcccgagaaaatcgatgccatccagcaaatgaagcctccgtcaagcgtacatgaagtacaaaagctcgcaggccgaattgcggcactcagtcgattcctctcaaaggcggccgaaagaggtttgcccttcttcaagaccgtccggggcgcgggaaagtttaattggacaccagagtgccaagcagcattcgacgagctaaagcaatacttgcaaagcccgtcagctctgataagcccacccccaggaagcgaactgctattatacttagcagcttcgccggtggtagtcagtgctgcactcgtccaagaaacagagtccggacagaaaccggtctacttcgtctccgaagcactgcaaggagcgaagacaaggtacattgaaatggaaaagctcgcttacgctctagtgatggcttcgcgcaagcttaagcactacttccaggtccacaaagtcatagtgccatcacagtaccccttgggcgaaatacttcgaggcaaggaagtcactggctggctcagcaagtgggcggcagagctatccccgttcgacttgcattttgtcgcacgctctgctatcaagtctcaagtgctagctgacttcgtagctgaatggacaccagtacttgtccccgaccccgagcccgccgaacaattctgggtgatgtgctctgacgggtcatggtcgcacaggggggcaggcattgcggcagttctcttttcgccgaatggtgtgccgattcggtacgcagcaagactgcagttcgacacaaccaacaatgtagcagaatacgaagccgttctcctgggcctaagaaaggcgaaagcactgggagtccgacgcctgctaattcgaactgactccaagttggtagcaggccatgttgacaagtccttcgaggcaaaagaagagggaatgaagaagtatctggaggctgttcggtccatggaaaaatgcttcaccggcataacggtcgaacacttgcctagagaccagaacggggaagcagacgccttggcaaaatccgctgcttgtggtggcccacattcgcctggcatctttttcgaagtcctacatgctccaaacgaagcagaagcaaagcgtttgcagctaagagccacgaagtataagatggtctcgggtcagctttaccgctccggggtttctcaacccttacttcattgcatctctttcgccaaaggcgaagaaatggcaaaggaaatacatcagggactatgtggcgcgcaccaggctgcaagaacagtggcctccaaagtatttagacaaggagtttattggcccactgtattgaaagtctatgttgagcaaataaagaagtgcgaaagttgccagcgtcatggccgaagccaagccgcgccccagtatgatctgcagcccattgcgccaatatggcccttccccagatggggactggacatcatcgggccgttcccagtggcgcgaaacgggtataaattcgcaattgtagctgtggaatatttctctcgatggattgaagccgaaccccttggggcaatcacttcggcagcagtacagaagtttgtatggaaaaacattgtttgccgtttcggagtgccaaaagagttcatcactaacaatggcaagcagtttgactctgataagttcagagaaatgtgcgaagggattaacctggaaatcaggttcgcgtcggtcgcacacccgcagtcaaatggggcggccgaacatactaatggcaagatcctagaagcactaaagaaaagagtcgagggggcggaaggcaaatggccagaggaattgctatcggttctctgggcccttcggacgacccccacaagaccaaccaagtttagcccgtttatgcttctttatggcgacgaggcgatgaccccagcagagctaggggctaactcaccaagggtgatgttctctgggggccaagagggacgcgaagtatcgctcgaactcttggaaggagtaagagtcgaagcgcttgagcacatgcacaagtacgccacaagcacttcggcaacttacaacaaaaaagttcgacccacggaactgatgcctagtcatcttgtcctaaggaagagggcgaacccagtagcggttggcaagcttgaatcaaagtggaaaggaccatacctcatcaaacacaagtccaggacgggatcttttcgcctagcgacactcgaaggcgaagagttcgaccattcctggaacgccgcctctctcaagcgcttctatgcctag

SEQ ID NO: 35613 - DNA, 300 bp, Oryza sativa
  unsure (1)..(300): unsure at all n locations
  Clone ID: PAT_MRT4530_39516C.1
ggnaagatcccccccaagggtatcctttggggggtttttttttccctccccccaaacctttgttttaaataacattcccttggagggcccccttttagacccctttcaaaatcccgggggggttttggggggaaaattaagaaggaaaggcccccgcccttttccccctttggtttttaaggcttagggtttccccctttgaaagggaatccccttttccacctccttaactggggaggggccgggatttttggttttttcccttaaagggggttacaaaaagcgttaccttttttttta

SEQ ID NO: 35614 - DNA, 5724 bp, Oryza sativa
  Clone ID: PAT_MRT4530_39517C.1
agtttgccaaccgctactgggttcgccttgttctttaggacgaaatgaccaggcatcagctccgtgggtcgaacttttttgttgtaagttgccgaagtgcttgtggcatacttgtgcatgtgctcaagcgcctcgactcttactcctttcaagagttcgagcgatacttcgcgtccttcttcgcccccagagaacatcacccttggtgagttagcccctagctctgctggggtcattgcctcatcgcaataaagaagcataaacggactaaacttggttggtcttgtgggggtcgtccgaagggcccagagaaccgatagcaattcctctggccatttgcctttcgctgccccctcgagtcttttctttagtgcttttaggatcttgccatttgtacgttcggccgccccatttgactgcgggtgtgcgaccgacgcgaacctaatttccaggttaagcccttcgcacatttttctgaacttatcagagtcaaactgcttgccatagtcagtaatgaactcttttggcactctgaaacgacaaacaatgtttttccatacaaacttctgtactgctgccgaagtgattgccccaaggggttcggcttcaatccatcgagagaaatattccacagctacaattgcgaatttatacccgtttcgcgccaccgggaacggccccatgatgtccagcccccatctggcgaagggccatattggcgcaatgggctgccgatcatactggggcgcagattggcttcggccatgacgctggcaactttcgcacttcattatttgctcaacacagactttcaacacagtgggccaataaactccttgcctaaatactttggaggccactgttcttgcagcctagtgcgcgccacatagcccctagtgtatgtcctttgccatttctttgccttcggcaaaagagatgcaatgaaataagggttgaagcaccccggagcggtaaagctgacccgagaccatcttatatttcgtggctctgagttgcaaacgcttcgcttctgcttcgtctaccggaagccagccagtttcaaggtgtttcacaaatggggttcgccagtcatatgggtcttcgcccagtttctcctggtcgattgccatgacttcggagcagtccatgggcacactcggagcatgcagaacttcgaaaaagatgcccggcgaatgtgggccaccacaagcagcggatttcgccaaggcgtctgcttccccgttctagtctctaggtaagtgttcgaccgttatgccggtgaagcatttttccatggaccgaacagcctccagatacctcttcattccctcttcttttgcctcaaaggatttgtcaacatggcctgctaccaacttggagtcagttcgaattagcaggcgctggactcccagtgctttcgcctttcttaggcccaggagaacagcttcgtattctgctgcattgttggttgtgtcgaactgcagtcttgctgcgtaccgaatcggcacaccattcggcgagaagaggactgccgcaacgcctgcccccctgtgcgaccacgaaccgtcagagcacatcacccagaattgttcggcgggctcggggtcgggggcaagtactagtgtccattcagctacgagtcagctagcacttgagacttgatagcagagcgtgcaacaaaatgcaagtcgaacggggatagctctgccgcccacttgctgagccggccagtgacttccttgcctcggagtatttcgcccaaggggtactgtgatggcactatgactttgtgggcctggaagtagtgcttaagcttgcgcgaagccatcactagagcgtaagcgagcttttccatttcaatgtaccttgtcttcgctccttgcagtgcttcggagacgaagtagaccggtttctgtccggactctgtttcttggacgagtgcagcaatgactgccaccggcgaagctgctaagtataatagcagttcgcttcctgggggtgggcttatcagagctggcgggctttgcaagtattgctttagctcgtagaatgctgcttggcactctggtgtccaattaaactttcccgcgccccggagggtcttgaagaagggcaaacctctttcggccgcaaggaaacccaacaacttgcctgcgccggatgccgaaaacgcacttctccggattcagctttatgcctgccgcgtgcaagctgtcgaacgtctcctgcaggttgatcgcatggtcgaaagccttgcggctttttacgacgatgtcatcgacgtaagcttccacattccgccccaactgcttgctaaggaccttgtacaccagtctggcgaaagttgctcctgcattccttaagccgaaaggcatcctgaggtgacaaaatgtgccgaatggagtgatgaaggatgttttggggatgtcgagcgggttcatgtggatctggtggtaaccggaatatgcatccaggaaactcatgagctcgcatccagctgttgaatccacgagctggtcgattcgcggcaaggggaaatcgtctttcggacacgctttgttcaggtctgtgaaatcgacacacatgcgccatttgccatttgacttctgcaccagcactggattcgccaaccactctggatggtcaatctcttggataacccctgcccggagtaatttttgtacttcggccttcgccgcttcttggcgatcggcagacatcttgcgcaacttttgttttcttggcttaatgtccggcttgactgctaggtgatgcatgatgagatccgccgggacgccccccacctcgtcagggctccaggcgaagatatcgatgttctttttgagcacctctaggatattctcaacttcttcttccatgtcgcccccagtgatacgagctttgtggggtcggcatcatcaatctgcatttttgttatcttgccgtgaggggtaggctttggcgtgtgcttcggccgttcatgcagttcggtctcaacactgtgcactgctctgttaattatggctagatcgccttttgaagcagccgaaaactgaacctccttgactataatcacccctgtcgggccgggcatcttgagcttgagataattatggtgggaaatggcttcgaacttgttcagggttgcgcggccgaagatggcgttgtagttgtacgggatgtcaatgacgtcgaacagtatttgctcttcacgtctgttctcccccgagccaaaggctatcagcaagagtgcttggccgagaacttgaactggttccccgccgaaaccgcggagcgatgctggtgctggggtaagggcttgggtaggcaaccccatcttggcatatgcttcggcgaagataacatcggccgaactccctccgtctaccaggattcgtcggacttcgaaaccagctatttcagctcagattaccaggggatcttgatgtgggaacataactccttctgcgtcttctggcccaaaagaaattagctggttcagatacttcttgcgggctggctgctgatagttgctcgcttgctgggtgtcgacctccttgcggagggcttgcacttcttcgacagccatcaccgccttgcctgcacggtctattctgaactttctccaagttatgggggtttggctttgccttggtggctgtccttggatcgccggctgagactggcggacagagaggggaggtggttcggcaacttgcacttgtgcttgagcttgagcagcggcgacggaggctttgtcgtactcagcttgtatagcatgccgtcgcttggaatcctcctcgccccttgcgaacccgtcaatgatccgaagtaggtgctcaagcgtctgtggttccttgttggcgatttttctcgtgagttcgccctcgagcaaaccggccgatgcggcatttataaccgacgcctcggttatgtcttgaacttggcaccgggcttgcgagaagcgacgcatgtactcccttatcgactcccccggcctttggcgaatgccgagtaagtgttgctgcgtcttcggctcctcgtaggtgcctcgaaagttaaggacaaaaacatcgcgcaattgctcccatgagtaaatgctattggctggtaaattgaaataccaagaacgggcgatgccgtctagagcgagatgtattaccttcgccttggtattttcgtcaccatgagccgcttcgatcgctgactcgtagatggagaggaactccttcgagtcagtttcgcccgaatagcgcgggacgggtgggaacttgaactagggtgggattggacgagtcttgattcccccactcagcggtagccccttttcgcctcccaccctgtttaccgcaccttgctgcgggtacggtgtggcgaaatcgcagcttgtgcgtgaggttgggccatggcgttcggctgcccggctccaactagtggtacttgctgagccgccatggacgggtcaaaaattggctgtgaccacatcatggcagcttgaattggtgcttggtttgttccgaagcctggagtcggagcttgctgccgaacggttggcgcctgagcagcgttgacgaagtcgaactgcggtccttgattccacggcgaaactcccaggcccagctgaatcggtggcaaccaattaagcgtaccttgacttgtattcccctccgggcgggccgatggggttgtacttgaaatgcagtggggttggttgagttgctgaaggaaagctaggagttgcgcctacagagccgaagccccttccgccactgattgtggcgcttggccaggtggttgatgctgcccggcgaagtacaccggcgcctgtgcggcttgtggcggagagggctgggtcgtcacttgcggacggacttgaggtgggacatagcctgccgaatactgaaggattggagccgacgtggccttggtccgccttgccgcctcgtatgcttgttgttgttcttgcatttggcgaagcatgtcttggagccgtctcatgttctgccgcatggcttccatgtcgccttcggcttgtgcttcggggtcaaggctgacttgggcctgtacaacggcgagcgcagttggggccgctgccggctgcgatggggtggcttggggcaccaccggttggcttgtcgaaaggatctccgccttggtctggagtgcccttgccgccgcagccgccttcgccacgtcggccgcgttcggcacttgcacagaggttgcaggggccgaaggcggttgtgatggcgcttgtgctcctccatcttcggccacgggcgccgcaggctctgctccttcctcggcagccatgtccggtccagcgtcgttctccttccgcctggcaaccttctccttcatgaccctcttcggtggcattcgctctcagtggtttcgctcggagttccccacggtcggcgccagctgttgtcgaaaggacaaatgattacccttacaaaagggacatttataggggtacataatgttataggggctcatgggcccctgatgggccgtctggcgatcgccggccctatagcccttaggcttgatgggccggaaaggcttcctcggccctcgcgggggcgaacttgccatggcgaagtcgtcttccttcggcaggtagtcttcggcttacacccttcgcctaagacgcctctgacctggcaaggcactcgtacgactcttcgcctcgtgccgttcttgcttcatagccttcgccac

SEQ ID NO: 35615 - DNA, 5497 bp, Oryza sativa
  Clone ID: PAT_MRT4530_39518C.1
ctactggttcaccttcttccttaggacgagatgaccaggcatcagctccgtgggtcgaacttttttgttgtaagttgccgaagtgcttgtggcgtacttgtgtatgtgctcgagcgcttcgactcttactccttccaagagttcgagcgatacttcgcgtccctcttcacccccagagaacatcacccttggtgagttagcccctagctttgctggggtcattgcctcatcgccataaagaagcataaacgggctaaacttggttggtcttgtgggggtcgtccgaagggcccagagaaccgatagcaattcctctggccatttgcctttcgctgccccctcgagtcttttctttagtgcttctaggatcttgccatttgtacgttcagccgccccatttgactgcgggtgtgcgaccaacgcgaacctgatttccaggttaagcccttcgcacatttctctgaacttatcagagtcaaactgcttgccgttgtcagtaatgaactcttttggcacttcgaaacggcaaacaatgtttttccatacaaacttctgtactgctgccgaagttattgccccaaggggttcggcttcaatccatcgagagaaatattccacagctacaattgcgaatttatacccgtttcgcgccaccaggaacggcccaatgatgtccagtccccatctggcgaagggccatattggcgcaatgggctgcagatcatactggggcgcggcttggcttcggccatgacgctggcaacttttgcacttattgatttgctcaacacagactttcaacacaatgggccaataaactccttgtctaaatactttggaggccactgttcttgtagcctggtgcgcgccacatagcccctggtgtatctcctttgccatttcttcgcccgagaccatcttatacttcatggctctgagttgcaaacgcttcgcttctgcttcgtctaccggaagccagccagtttcaaggtgttttacaaatggggttcgccagtcatatgggtcttcgcccagtttctcctggttgattgccatgacttccgagctgtccgtgggcacacttggagcatgtaagacttcgaaaaagatgccaggcgaatgtgggccaccacaagcagcggatttcgccaaggcgtctacttccttgttctggtctctaggcaagtgttcgaccgttatgccggtgaagcatttttccatggaccgaacagcctccagatacctcttcattccctcttcttttgcctcgaaggatttgtcaacatggcctgctaccaacttggagtcagttcgaattagtaggcgccggactcccagtgctttcgcctttcgaatcggcacaccatttggcgaaaataggactgccgcaatgcctgctcccttgtgcgaccacgagccgtcagagcacatcacccagaattgttcggcgggctcggggtcgggggcaagtactggtgtccattcagctacgaagtcggctagcacttgagacttgatagcagagcatgcaacaaaatgtaagtcgaacggggatagctctgccgcccacttgctgagccagccagtgacttccttgcctcggagtatttcgcccaaggggtactgtgatggcactatgactttgtgggcctggaagtagtgcttaagcttgcgtgaagccatcactagggcgtaagcgagcttttccatttcaatgtaccttgtcttcgctccttgcagtgcttcggagacgaagtagaccggtttttgtccgaactctgtttcttggacgagggcagcactgactgccaccggcgaagctgctaagtataatagcagtttgcttcctggggttggccttatcagagctggtgggctttgcaagtattgctttagctcgtcgaatgctacttggcactctggtgtccaattaaactttcctgcgccccggagggtcttgaagaagggcaaacctctttcggctgcctttgagaggaatcgattctccagattcagccttatgcctgctgtgcgcaagctgtcgaatgtctcctgcaggtcgatcgcatggtcgaaagccttgcggctttttacgacaatgtcgtcgacgtaagcttccacattccgccccaactgcttgccaaggaccttgtacaccagcctagcgaaagttgctcctgcgttccttaagccgaaaggcatcatgcgccatttgccgtttgacttccgcaccagcactggattcaccaaccactccggatggtcaatctcttggataacccccaccctgagcaatttttgtacttcagctttcgccgcttcttggcgatcggcagacatcttacgcaacttctgttttcttggcttaatgtccggcttgaatgctaggtgatgcataatgagatccgccgggacaccccccacctcgtcagggcaccaggcaaagatatcgatgttttttttaagcacctgtaggatactctcaacttcttcttcgcccatgtcgccccccagtgatacgagctttgtggggtcggcatcatcaatctgcacttttgttatcttgccgtgaggggtgggctttggcgtgtgcttcggccgttcatgcggttcggtctcaacactgttcactgctctgttgattatggctagatcaccttttgaagcggccgaaggctgaagccccttgactactatcacccctgtcgggccgggcatcttgagcttgagataattgtggtgggaaatggcttcaaacttgttcagggttgcacggccgaagatggcgttgtagttgtacgggatgtcgacgacgtcgaatagtatttgctcttcgcgtctgttctcccccaggggatcttgatgcgggaacataactccttctgcgtcttccggcctaaaagaaattagctggttcagatactgcggcgctccttcacccgccgaagtgatgctgtggaccatacggatctgcatcttcttctgccgtttggacaactggcttggcgggtcagcccttgtaatcacttggattacccttcgctgtacatcttggcgttgttcggctgggggtgtttgctcctgaactgcttcgcggggtgcttcaacagttgttccctgctgcggccttgggtcttgcgcgttgccacgttgcctaatgtttcggcattgctccgtggtgtgcgaagagcgtccgtgaaaggcgcagtagaggtcttttcggaccttcttgcgggctggctgctgatggttgctcgcttgctgggcatcgaactccttgcggagggcttgcacttcttcgaccgccatcacagctttgcccgcacggcctgttctaaactttctccaagttatgggggcttggccttgccttggcggctgtccttggatcgccggctgagactggcgaacgaagaggggaggtggttcggcaacttgaacttgtgcttgagcttgaacagcggcgacggaggctttgtcgtactcagcttgtatagcttgccgtcgcttggaatcctcctcgccccttgcgaacccgtcaatgatgcgaagtaggtgctcgagcgtctgaggctccatgttggcgatttttcttgtgagttcgccctcgagcagaccggccgaagcggcgtttataactgacgcctcggttatgtcttgaacttggcaccgggcttgcgagaagcgacgcatgtactcccttatcgactccccttgcctttggcgaatgccgagtaggtgttgttgcgtcttcggctcctcgtaggtgcctcgaaagttaaggaaaaaaacatcgcgcaattgctcccatgagtaaatgctattggctggtaaattgaaataccaagaacggccgatgccgtctagagcgagatgtattaccttcgctttggtagtttcgtcaccatgagccgcttcgatcgctgactcgtagatggagaggaactccttcgggtcagtttcgcctgaatagcgcgggacgggtgggaacttgaactggggtggaattggacgagtcttgattcccccacttagcggtagccccttttcgcctcccgccctgtttaccgcaccctgctgcgggtacggtgtggcgaagggcgaaatcgcagcttgtgcgcaaggttgggccatagcattcggctgcccggctccaactggaggtacttgctgagccgccatggatgggtcaaaaattggctgtgaccacgtcatggtagcttggattggtgcttggtttgttccgaagcctggagttggagcttgctgctgaacggttggcgcctgagcagcgttgacgaagtcgaactgcggtccttgattccacagcgaaactcccaggcccggctgaatcggtggcaaccaattaggcgcaccttgacttgtattcccctccgggtgggccgatggggttgtacttgaaatgcagtggggttggttgagttgctgaaggaaagcttggagttgcgcctgcagagccgaagccccttccaccattgtttgtggcgcttggccgggtggttgatggtgtacttgggcagcgactgccgaatactgaaggattggagccgacgtgaccttggtccgccttgccgcctcgtatgcttgttgttgttcttgcatttggcgaagcatgtcttggagccgtgccatgttttgtcgcatggcttctatgtcggcttcggcttgtgtttcggggtcagggctgacttgggcctgcacagcggcgagcgcagtcggggccgctgccggctgcgatggagcggcttggggcaccaccagttggcttgtcgaaaggatctccgccctggtctggagtgcccttgccaccgcagccgccttcgccacgtcggccgcgttcggcacttgcacagaggtggcgggggccgaaggcggttgtgatggcgcagatgtggaagcgaatggtcctcctccatcttcggccacgggcaccgaaggctctgctccctcctcggcggccatgtccggtgcggcgttgctttccttccgccttgcaaccttctccttcatgaccttcttcggtggcattcgctttcagtggtttcgctcggaggtccccacggtcggcgccagctgttgtcgaaatgacaaccgcatacgtcgaaagacgtggttactcaacagtggggtacatgatgatataggggttcatgggcccctgatgggccgtctggtgatcgccggccctattgcccctaggcttgatgggccggaaaggcttcttcggccctcgtatgggcgaacttgccaaggcgaagtcgtcttccttcggcagatagtctttgccttgcacccttcacctgagactcctttggcctggcaaggcactcgtacgactcttcgcctcacgccgttcttgctccatagccttcgtcatgggtttcggcagatttggtcgaagggcctcatgccatccgccaacatagataaaagccaaagaatctgtgaacaacaactagcagcagcaacatattga

SEQ ID NO: 35616 - DNA, 254 bp, Oryza sativa
  Clone ID: PAT_MRT4530_39519C.1
cccaagccttccgcaatcgaggcgtggccaacaacttttacttcttggggccaaggaggaggattgcccaaccccaagcccggccccccttggccttgccgttggccgtgcttttttttttggcctgtttttccggcgtccaagccgtggccgttcagggctttgaccggttcaaaaacaaccctcttggaaagctgaaggtgtttgtctacgacctgccccccaagtacaacaagaacattgtggcgaaagat

SEQ ID NO: 35617 - DNA, 382 bp, Oryza sativa
  Clone ID: PAT_MRT4530_3951C.1
aaaacgggtaaaaacaccctttttttttcggaacatcttattaatcatttcgttgtcttttttttttttgcaacatcgcttttagcattttaatttggagacgggaacggcccaaactttaatcccgtcaaggggaccggaatgcccaaaaaacgttgcaagggccggggtcggcggggggatgcagggggttatcaatggggccctccccggggaaaacgggctggaaccaaaaccccacgaaggggagaatggggggcccccccgcgagaaaaccttaggggcagaaaaccaggaggggttccggggaaccccgggcccagttgccccaagggaaccacaaccccccggggtagccgagctgcggcacggggttccttcg

SEQ ID NO: 35618 - DNA, 438 bp, Oryza sativa
  Clone ID: PAT_MRT4530_39520C.1
atggcgagtggtggtggcggtgcgtgtgggggaggcggcgagggccatccgagtttgtggaaggagccaaaaaaaataaaaaaaaccctagccaacccaccatgtgccggccgcacgctcccactgccgctgcccaccgctcgctcccacggccgccgctcgacgctgtcagctctcgtcgtcgttgttgcccgctgccgcccgtcgctaccacccgccgacgcgtccgcccgcccgtcgtctcgcctgcctggtctcccgaggtcgagggtggcggatcgatcggcgccgacctgccaccgcaaccaccgcgcctccctaccgctgctcccattgtcgcccacccaaccactgctcgctggccatccatcgcccgcccgtcatcagaagccgccaccactggccattgcgggcgccgagcccgctgccagctgctga

SEQ ID NO: 35619 - DNA, 642 bp, Oryza sativa
  unsure (1)..(642): unsure at all n locations
  Clone ID: PAT_MRT4530_39521C.1
ccggccgggtaaagccccccgcctttcggcgccgttcccccacccccgccgccgacgaactcccccctagccatggcgtcgcgcggtgccgcttcccgctccttcctcgccgccgtccgtggccgcgccgcctcgtcggcgccgcgcatccgcgcggctccgctcccctccgccccacgccgccgcgtcccctcctccgccttctcgccatttgccgccgcgaggccgatgtcggcgatgatggggtcgccggcggcgatggcggtgaggctgaccgggcacccgtcggcgagcgtgcgggcgtgctgtgagctctcccagggtaattaggcttgaacagtgctgtcccgactctgttaggatgcaattctttttagggttacagaagctctctggctcgtttttccccctgcctaatgggaggttgtaaggaactccctattattacttcacctgtcacctagtgaaaataacagtcaacatgatttttacattaataatcccctgttaaccagttacccgttatgttcatttggtcgtgaaatattggatgaagcatcattccttttcatgggaatgaatgttcttgttttgcaaagtataaaaaaaaaaaattaaaagttgcggccaanaaanattggg

SEQ ID NO: 35620 - DNA, 618 bp, Oryza sativa
  Clone ID: PAT_MRT4530_39522C.1
acccccgccgccgacgaactcccccctagccatggcgtcgcgcggtgccgcttcccgctccttcctcgccgccgtccgtggccgcgccgcctcgtcggcgccgcgcatccgcgcggctccgctcccctccgccccacgccgccgcgtcccctcctccgccttctcgccatttgccgccgcgaggccgatgtcggcgatgatggggtcgccggcggcgatggcggtgaggctgaccgggcacccgtcggcgagcgtgggggcgtgctgtgagctctcccagggtacccacttctgccgcacttgtcaggatcgctaacaagtaattaggcttgaacagtgctgtcccgactctgttaggatgcaattctttttagggttacagaagctctctggctcgtttttccccctgcctaatgggaggttgtaaggaactccctattattacttcacctgtcacctagtgaaaataacagtcaacatgatttttacattaataatcccctgttaaccagttacccgttatgttcatttggtcgtgaaatattggatgaagcatcattccttttcatgggaatgaatgttcttgttttgcaaagtttaatatgttcagatttctgc

SEQ ID NO: 35621 - DNA, 428 bp, Oryza sativa
  Clone ID: PAT_MRT4530_39523C.1
gcacgaggggcgtattgttacagatgtgcgtgatgtcatgtggaaatcaaactcgaaaactgttggtttgaggtctactaggaacaaaagagagagttctaactttcctggtacacatctattggagaaaaggaagcaggtatccatgaagtattcatggctgatgttgctagagcatgaagatagctaccgttatattcctcaacttggtgatgaggttatgtacttgaggcagggccatgaagaatatcttaaaggatctcggcaattggatgattgcccatggaatcggatcaaagggcttaaagatgtagaactttgcaagattcaaggtctagattacactacattcagagggtctggtgaaagctgctgtaaattaactattgaatttattgatgatacttcaagaggatttggcagaacat

SEQ ID NO: 35622 - DNA, 389 bp, Oryza sativa
  Clone ID: PAT_MRT4530_39524C.1
tttttttttttttttttttttttttttttttttttttttttttttttttttttttttttttttttttttttttttttttttttttttttttgggggggaaacaaaccgggtttaaagcccgaaccgaaacctggttaacccgggggccccaaccccaaaccaaagcccctaaggcggggaacccaagggccaaaagttttgccccccgaaaaaaagaaccagttcccccccagggaaagccagctaggacccatcccaaggcagggggggggcccaaaaaggggcccaacttggcattggccccccgggacaaaaacctggggcaaatgggccccccgccccccatgagggtcacactggcaccgaagaaacggccccccccccccccc

SEQ ID NO: 35623 - DNA, 1280 bp, Oryza sativa
  Clone ID: PAT_MRT4530_39525C.1
ttttttttttttgggggggcaactgattttactatccattcaaaggttcaggaaacagcacggattcacgtttctgaagaacacaaaattcacaaaatgacgtgaggccaatcacctcacggctaaacccgtaaaccatccatcgacagacactacccgtaaaccatccatcgacagacactaagaacgagatgaaatgtagttctccattcagcatctccaaccttctccatactgctggtcactctcgatttataagttctaagctatttttgcattggagaagtccatctccgggtgctgagccatgaatttcttgagcatgtcttgcttctgcatttcatcacttgttggaagacccatctgcttctggcgttgatcaaacatcatcttctccacagtttgtcgagtctctggatccaaatcagcgagtttgctgttctccggttccaccttctgtgtatcaacttcagggtcacccttcactacggatttccaccactccatttgattttgctttgtcagcaaaatggacagcgattttccatcctctatgctccagaagcagtcatcaactttgactggtttgaaaagctcaccatcaatgataggaggctggcccttcagcccaaccttcagatggttcttcttaatatcacagacgacaaaccttgacttcgttccttgaggaacaggtacggtgatggtaacctctggcaattgctgaatccaagagtacttctccaaatcaagaccattgccagcatttggtttcctcacgttgccctcctccttcttgtccacctccatgctatccttccccgccgagctctccggcttcggctccgcgggcgccttcgccttcctctcggcctcggccgccttcctctccgcctcctccgccttcctcttggcctccctcgccttcctctcctccgcctccaccaccgccctcgccgccgacgccatcgatgtgaccctgctcaccgcggaggggtcgcggaacaggtcggaccgccgcctcgccacgtcgattgccgcctggaggaaggggatcgcgccgcccctccgctccagctccgccgcgaggacctcgtcgccgctccccgccgccgccgccaccgaagccggttgctgctgctgccgcggcggagcctcttcctcctggaagtcggagatgatcgccatgtgcttccgccgccgccgccgccgcctcctcttctctctcgctctcctctagggttttcgagaaggaattcttggggtctcagcctgcagcc

SEQ ID NO: 35624 - DNA, 369 bp, Oryza sativa
  Clone ID: PAT_MRT4530_39526C.1
cgcccaagaggccgggagtcatcgagaccgtacatgtgttcgccaatgttcacaccgagaacccagaagggaggtcgacgagacggagaggcacttgcgcctgcttgcaacccggaccacgtgcgccggcatgactgccatgcaaatttgctgaagaagattgttgctggagaagagatgcgatgcgatggatggaattgaaacgtgcgatgcgatatgagatgatgatgacataacaccgcgtgtgccatgatgatgagtgttggggtttgaataagctttctgccggcatattgcaagctcatgcatgcatgtaacggtgcagagacaataatatgaacttgaataaagtttaccagacctattttc

SEQ ID NO: 35625 - DNA, 1095 bp, Oryza sativa
  Clone ID: PAT_MRT4530_39527C.1
gcacaggcgccgcgcgggggtgtcgggtcaagatgcccgcccccacaacccgcggttggcgccgccgccgacgccgcccaccgccgcccgcgtgcgcccaccgccacctgtcgccgccctaaaaagactcctccgttataatcccccctcaccgtcccttcccccaacctccgccccacaccaccaccaccgcctccgcctccgcctccgcctcctcctcaccaccgttgcgatggcttcttcttcccccaccaacgccgcggccgccgcccgccgcgtgccgccgccgtgctggacccccgacgagaccctcgcgctcgcccgcgcctacaccgcgcgacgcctcgcggtgggacgggcgcacctgacctccgccgactgggcggccgtcgccgacgcggccaccccgaccaagaccgcgcgccagtgccgccacaaggtcgagaagctccgccgccgcctccgatctaagcgccgccgcccctgcccgctcctcgacgcgatcgatctcctcgacgggccttccccttccgcgtccccgtcgcaatccccctccccgccgccgccagcctcgccgccgcctcttcctcccgctccctcctccccgcctcccaagaagaggaggctgcctgatggcgatgccgatgccgatgcggaggatgacggggagagcgacgtggtgaaggcgctgagggcgatcggggagggtttcctgcgggcggagcagaggcggatggaggcggcgaggaagacgcagcagatgcgcatggagatggcactccggcacctcgattcgcagcggaggctcatggaagcgctcgtcgaccgcatcattgactccctagagtaaatctcggtggcgcaaaggtgtctcctgtcaaggttttcttgcttgtcctgattgcccactggcttggcttgcgagtttaggagttaattagagttgttcatatgtactgtgatggatgtctgatgtaggcgtagcttggaaatcgtagtaacctttctatctatcttgtatggcgtatggaaaataataacttagcctgttctgtgtttgaaaaaaaaaaaaaaaaaaaggaaaaaaaaaaaaaa

SEQ ID NO: 35626 - DNA, 848 bp, Oryza sativa
  Clone ID: PAT_MRT4530_39528C.1
aaacttgagagtgcaaaacactgccctcctcttgaagcaccttgtaaagttttacaaagctgcagatttgccatgggttaaattgatttcagaatcatattatacttcaaaagtcccacatttaatcatgaataaaggatcttataaggaagattcggtcaaggatatgtgttctaggcaattggaagattctttcttactccccctatcgcctgaggcatatgctgagttcctacagctggaagaaaacttggatagcttaaaaatccaatctggaagaggtgacatctggagctttatatggaactctgatgtttacacaccaaagaggttttacaaaccaaacttcactgctttgcaaccccccagacctctcttgtggctatggaagacaaagtgtgtcatgaagataaaagtttttgcatggctcttgttctgcgatagactcaacacatgtgatatgttggacagacggcactgcgccaaagaagatgatgatcttacatgtgtcttgtgtgatactggccagagagagacaagactacatctttttttcacatgaccatttagtgcaacttgttggcaacacctagggatccaatagaaccgaaatttggaatttttttcagatggtggtcctggcaagatttcggtttgtacatcggggatttctggagatcttcttcttggctgcatggcatatctggaagcaaaggaatggacttatctttgaatatactcagcccaccttccaatcatggagattgctcttcaaaaaagttcttctgcatatgtgcaaaatgaaagatcctctcaaacaactagtttccgattggatacaaactata

SEQ ID NO: 35627 - DNA, 459 bp, Oryza sativa
  Clone ID: PAT_MRT4530_39529C.1
tataaataataaaaaaaaaaaaaaaaaaaaaaaggaaggggataattgaaaaaaaaggggggtattaaaagaaaaaagggaaagaggttctaggggttccagctttgtctcccaggtcaaaaaaaaataggggggggcccttttggggggtccatgttttggtgggggccctggccaggactgggttttttgttgggggcccctattttcattccctgggccgggtttttccccgggggggcgggggaaaccccgggggttccccaattttttggctttgggccccttcccctttttcccgggggttttataagcaggggggcccccccggttccccttcccaaactggtgcccctcctgatgggcaagggggcccccccttttggggcccctttacggggggggggggggggggtccccccctgggggccctttccctttggttggccccttagcccc

SEQ ID NO: 35628 - DNA, 111 bp, Oryza sativa
  Clone ID: PAT_MRT4530_3952C.1
atggcgtgcaggctcgcttcatcagaatccgccgtcaccagttttgccgccgaccggcgagtgaactactatgccggtgtctctccgcctcctgatgcatctcatccctag

SEQ ID NO: 35629 - DNA, 276 bp, Oryza sativa
  Clone ID: PAT_MRT4530_39530C.1
atgtctactctgaacctgagttcatctcctctgaccaagcaacagctccgatttggagccaacacactcattgcagaacaccgcgccggaaaccgggtcgtcgcgcaggccggcaactacaagttgacggcggtggcgttgggtattgctttcttcggcggcggcggcgtcagcggtggcagcagcagcggcagcaccagccgacgccctccctctgataggcgatggcggccgcagtcaccgccggcttctcgtccgcatcgccgaccgcactag

SEQ ID NO: 35630 - DNA, 918 bp, Oryza sativa
  Clone ID: PAT_MRT4530_39531C.1
atggagaaggtggacgccaaggagagggagaagatcgaggccgtccgcaagaccctccgcaagcaggctccgctcaccgccaagcaggcgatgtactgcaacgacgcgtgcgtggagcggttcctccgggcgagaggggagagcgtgaagaaggcggcgaaacacctgagaaccgtcctgtcctggagggacaccatcggagccgatcacatcatcgccgacgagttctccgccgagctggctgacggcgtcgcctacgtcgccggccacgacgacgaggcccgacctgtcgtgggaggtctttttttacaggtctttcgaatcaagcaggactacccaaagttccactcccagaaatcgttcgtgcggttactggtgttcacgctggaggtggccgtgtcatgcatgtcccgcttcgtcgaccagttcgtcctcctcttcgatgcaagctttttccggtcggcgtcggctttcctcaacctgctcatgggcacgctcaagatcgtcgccgactactaccccggccgcctccaccgcgccttcgtcatcgacccgccgtccctcttctccgtcctctggaagggcgggcagaaggcgccggcgccagcgcagcagttcccgcggacgccgcggccgtcgttcctgcagtcgccgtcgatgctgttcgcgttcaagaaggacggccaggccagccgcggcgagcgggagcgcgagtccttcctgccgttcctccgcttctaccgccgcccctacgacgagatatcgtatcgcgccaagatgcggccgccgctgggcgggctcatcgccatcgtcgacgagaagtcgaagcagcacaagacggtgcagccgccgctgcgacggcacgccgggctccaccaccagcagctgttccagctccaccaccaccagaggatctga

SEQ ID NO: 35631 - DNA, 1365 bp, Oryza sativa
  Clone ID: PAT_MRT4530_39532C.1
atggcgctgggagacctcgggactgtacttctcccgctcggcgtatcgtgtcctcttctttggaagaactcgcctccaacacaagccaatctggaagtctttggcacggtggcaccccttgttgttgggttcttgatggagctcttatctgcaattcttggcgattttgtcagcagatcaataaccttcatgatcgacaggtacccgaagcagcggccatcggtcgatgaaaatcttcagaggctgcaccatctccttgtgcggatccgcaccgtcgtcgaggaagctgagcagcggcatgtcacgaaccatgggatgatccgtcagctcgagctgctcagggagcagatgttcagaggccactgcgttcttgacgccttcagattcagagatgaggaggaggacgaggtaacaccacgttttgctctgtccaaattcaaccgggctaagcgtatccgcttctctgacagcagcagcaacactcaaattcagacaagaagcacgaacgatctgcatcagactgtcactagcctcgagagaatcatcggtgacaccaaggaattcgtcgtgttcttgatgagctatcctcctgtgtatcgccagccttacagcacgcatctgtacctggatggatgcatgttcaaccgtcaaatggagagagaaaatgccatcagcttcctgctgcagagagagcctcttgcagttgcagaagaaattgttcaggttttgccggttgttggcccggaattcgtcgggaagagcactctcgttgaacatatctgccgtgatcagagagtgcgtgaacacttctctctcatcttgtattacagtggagatgatctgagatatgagaaggcagaaactttcagtgaaatttgtcaaaccaagcatcgaaatgaatcaaacgatgccatggatggaagattgctgcttatcattgagctcttaggagatgttgatgaaagaacactcaagaaaatccactcttctttcagaaagcaaatgacacatgagatcaaaatcatgatcacaagccgatcagagaagatcatcaggttgggagccaaacaagctctgaggctgaatttcctgccattcgaagcctactggtacttcttcaaggttcttgcatttggagccacagacccagagcagcatccaaagcttgcatccatggcgatggagatcgcgacagatcatcctaagttcggttgggtaattgtgagacctaaacctgaaaattactttgtactgcgtgatagctaccagaaggctcttgttgaagatgatggtccaaagattaagctggatggcttggatcccaagtgccccggcgatatccttgatccatctacgatccgttag

SEQ ID NO: 35632 - DNA, 1813 bp, Oryza sativa
  Clone ID: PAT_MRT4530_39533C.1
gcccccctcgagtttttgtttcttttttttggctgcaaaaggggtcgattttactcacattttagggctgttattttacacgggttgaagaatatcctaggaggtaaatactggggggaaaatgtcgacaaaagatcaacttagcataattatagcattggattatgctgtaaaatgtatggagaagaacgctagcttcatcggttggattcatgcttcagcaacgggagatcatctggagttcagatcagatcctctggtggtggtggagctggaacagctgctggtggtggagcccggcgtgccgtcgcagcggcggctgcaccgtcttgtgctgcttcgacttctcgtcgacgatggcgatgagcccgcccagcggcggccgcatcttggcgcgatacgatatctcgtcgtaggggcggcggtagaagcggaggaacggcaggaaggactcgcgctcccgctcgccgcggctggcctggccgtccttcttgaacgcgaacagcatcgacggcgactgcaggaacgacggccgcggcgtccgcgggaactgctgcgctggcgccggcgccttctgcccgcccttggtcgagaacggcgtcagcggtgcgccgcggtggacgggcggcgtcgtggtggagcgcgcggcgggggaggcgaaggagaaggagcgcgccgagagcggcgacgcgccgatgagggacgggctggaggtcggcaccacggagcgaggccccaccgacgacggcgtggtggtggacaggtaccacggcttgagggtgttgtcgtgcgacacggtgacggagaaccgcgacgaggcggagccgacgccgatgcccttcgtcccggtcgccagcagggccgccgccggctcgaaccgcagcgacgccgtccgcgggtacgccgtgaacgacgcgtcctccagcgagtcctcgaagtccagcgagcacaccaccgccgtcgccggcgccagctccacgaacggcctcactcccttccagaggacggagaagagggacggcgggtcgatgacgaaggcgcggtggaggcggccggggtagtagtcggcgacgatcttgagcgtgcccatgagcaggttgaggaaagccgacgccgaccggaaaaagcttgcatcgaagaggaggacgaactggtcgacgaagcgggacatgcatgacacggccacctccagcgtgaacaccagtaaccgcacgaacgatttctgggagtggaactttgggtagtcctgcttgattcgaaagaccacgacaggtcgggcctcgtcgtcgtggccggcgacgtaggcgacgccgtcagccagctcggcggagaactcgtcggcgatgatgtgatcggctccgatggtgtccctccaggacaggacggttctcaggtgtttcgccgccttcttcacgctctcccctctcgcccggaggaaccgctccacgcacgcgtcgttgcagtacatcgcctgcttggcggtgagcggagcctgcttgcggagggtcttgcggacggcctcgatcttctccctctccttggcgtccaccttctccatggccatcgatcgcggcggagatacgagaggaagaagagcgaattaaccaggaacagaaggagagattcacagagagtgtgccagtgtggagagggcgagagagaggagagaggagaggacgaacagatgaaggagagaagaaaaaataaaggcgtaagcgacagtattataagcgtgggcgggcgggggtgtgccgttcaagccacacaggcgcacaggcgctcgctcgctctctcgctcgccgagtcgcgctga

SEQ ID NO: 35633 - DNA, 303 bp, Oryza sativa
  Clone ID: PAT_MRT4530_39534C.1
gaatacgccgccagcaaggacagcgaccaccgacggggcctaataaacaaagagctcctcttaactagcgcacgcccgcggcaaaccagacgccggggggcagaacatatctaccgaccccggcggcaccaaccaatacgcaccaacgagggcaaccgatgttcacgccgactctctactacccagtcctgcagctaggcgagccgcaccagcagatacgagggggggggcacgcggggcgaccagcgggccccgcgcctgaccgggcagggcgatgacgcgcatgagaggcacaacgccgag

SEQ ID NO: 35634 - DNA, 367 bp, Oryza sativa
  Clone ID: PAT_MRT4530_39535C.1
ttggttttttaattttttgggtttttttttttttttttttttttttttttttttttttgggggaacaaacgtacaaacacccactactcatataacaaagcgaaaggagggtagcatacaggctatacatggattgcgtccaaaaatacacgggacttcgccccataaacccagatatttttcgacaccaaataagcgcgacatcagggacactccaacacccaaaaattggggcaggacccttggcttactcaacaaaaaaaaacttatggtcttttttttttgccaggaataggcgtatttatggggggcaaggtgaatgccgtagactgggaacccaaaacccttacttgcacttgaagccctg

SEQ ID NO: 35635 - DNA, 2832 bp, Oryza sativa
  Clone ID: PAT_MRT4530_39536C.1
atgtcttcgcgcggcggcggcggcggaggccgccgcggtgggcgaggcggcggtggtgggcgggaaggaggcggaggtggaggtggaggtggcgggaggggtggccagggtaggggcgatctcggcgtcgtcggcgagcggcaaggcggtggtcgaggggcgggtgagcgcggaggccgtcacgacgcgccgcgcggccgtggcggcgtcgctgtgggcgccggggctgggcggcagcagcagcagccattccacgccccggccccgccatctggcggcggcggacgaggcggcgtgcaggtgcagcccaatgcggcggcgcgtcgacccgtaggcggcgggcgcggcggcgtcggagtgccggcgcctgcgccggcggttgcggtgggggctctgtgcggcgagatgaaggggaagatggttgtgtcgggtggagcgccgccagcaggccagggttcgtcgttggcggcggcgcagggcacggacaatgtcaagagagagccatctcaggtcgccgcaccggcgcccgcgcccccgcccgcgacgctgccgccgtcgtcgagcaaggcggtgaccttcccggcgcgtccggacgtcggcacgatcgggaggcggtgccgcgtccgcgccaaccatttcctggtgcaagtcgcggacaaggacatctaccactacgacgtggtgatcactccagaatcaacttatcgtgagagaaatagatcaataatcaacaaacttgttgcgttgcacaaacaattcttggatggtaggttacctgtctatgatggaagaaagagcatatatactgcaggtccactacctttcaaaaccaaagactttgttgtcaagcacattaatcctttgaggggtaaccaacgggaggaggaatacaaggtgaccataaagcaagcctccaaaacagatctgtacagccttaagcagtttttggttggaaggcagagggagttgccacaggacactattcaagctcttgacattgctcttagggaatgccctacctcagtatgtatctatctcaagctgaaaaaggccctaaaaggagtccaaattgtggcaactcactggaaagagaaatccatacgttacaagatcactggaataccctcagctccaatgaatgaattgatgtttgatctagatggaaacaggatatcagtcgtccaatactttaagaaacagtacaattactccttaaaacatgttaattggccatgccttcaagctggcagtgatagcagaccaaaatatttgcctatggaggtctgcagtatacttgaaggacaacggtattcgaagaagctaaatgagcatcaagttacaaacattctaaggatgacatgtgaacgacccgcacaaagggagagcagtatcatagagataaaaacattttacttgtattctcagattgttaatacgaactcttatggcaatgatgattgtgcaaaagaatttggcatcaaagtcgctaaccaacttgccgtggttgatgcccgtgtactgcctacccctaggcttaaatatcatgactctggaagagaaaaagtatgtaatccttccgttggacaatggaacatgattaacaagcaaatgaatacgagaccatgtgtggatatcatacaaggacagcaacgcaacatcgagggtgcaatcagaaatatccataggcaatcttcagaaaagcttgaccagcaagacctgacagggcagcaacttcagttattaattgtaatattgactgaaattagtggttcttatggaaggataaaacgaatttgtgaaacagaggttggtgtgataactcaatgctgtgcacccaagagtcttcagaaaggtgggaaacagtatcttgaaaatctggccctaaaaatgaatgttaaggtcggggggcgaaatacagtacttgaagatgcgttgcacaagaaaataccaattctgacagatcgtcctacgatagtgtttggagcggatgttacacatccatctcctggggaggatgcttctccatccattgcagcggttgttgcatccatggattggccagaagttacaaagtacaaatgcttggtatctacacaaagtcatagggaagaaatcatatctaatctttacacagaagtgaaagatccattgaagggaattattagaggtggaatgattagggagttgctcaggtctttctaccaagaaactggacagaaacctagccggattatattttatcgagatggtatcagcgagggacagtttagccaagtgttgctttatgaaatggatgcaattcgcaaggcatgtgctagtttgcaggagggctaccttcctccagttacatttgttgttgtccagaaaaggcatcacacccgcctatttccagaaaatcgtcgagatatgatggatagaagcggaaatatccttcctggaactgttgttgacacaatgatctgccatccgagtgagtttgacttttacctctgtagccattctggtatcaaggggacgagccgtccaacacattatcatgttcttttagatgaaaatgggttcaaggctgatacgctgcaaaccctaacctacaatcttagctacacctatgcccgatgcacccgagcagtctccatagttcctccagcatactatgcgcatctgggagccttccgagcacgctactacatggaggacgagcattctgatcagggctcttcttcctccgtaacgacgcgaacggatcgatcgacgaagccgcttcctgaaatcaaggagaatgttaagcggttcatgttctactgctgaagggtagttgatctgttgaataga

SEQ ID NO: 35636 - DNA, 178 bp, Oryza sativa
  Clone ID: PAT_MRT4530_39537C.1
aaaaagggaccaaacccccccaaaattttgaaaaatttgggggggtgcatacaaatttgactgggtttttgacaagggtccaataatcacaaatgacatggtccccccccctttttaggggttaaaccaaagggggaatcaacatgggatttacagaagatgcaattttgacaggggc

SEQ ID NO: 35637 - DNA, 436 bp, Oryza sativa
  unsure (1)..(436): unsure at all n locations
  Clone ID: PAT_MRT4530_39538C.1
gaagcgggagagggagtcggtggagcagtatgcggcggtggcgtcgtccgcggcgctgctgccgatccccgggatgatgaaggtggcggcgccggttagccggttggtggagtcggggatgacgtcgacgagtgggaggtcagcggcaggcggtgggggatgcgctggtgtcggagctgtgcgcgcagagcgcggagatcgacgcggtggtgcggatggagtgcgagcggatgcgcgccgggctggagcaggcgcggaagcggcagtgccaggcggtggtgcgcgcggcgtcggccgccgcggcgcggcggctgcgggagaaggaggccgagctcgacgccgcacggcgccgcgcggccgagctggaggagcggctccgccaggtcgccgncgagagccaggcgtggtgcggctccccgcancaacgaggccgtcg

SEQ ID NO: 35638 - DNA, 520 bp, Oryza sativa
  Clone ID: PAT_MRT4530_39539C.1
gtccattgatcttcctcccccctccaactccaagaaatcgactgacgccaacgagaacgagacgccatcgctgccatgggtttgcaggaggagtttgaggagttcgccgagaaggccaagaccttgcctgacacaatttccaacgaggacaagctgcttctctatggcctctacaagcaggcaaccgttggcccggttaccactgggcgcccaggtattttcaacctgaaagacagatacaaatgggatgcttggaaggccgttgaagggaaatccaaggaggaagctatggccgattacatcaccaaggtgaagcagctgctggaggaggcttctgcatccacttcttaggctattatgaacaacaccatcaatagtgctgcatatatgtaccaataaacataaatactataccatcatcaggcgctttgtgatcatcccttctctgtacttgtaatagtttcaagcagactcggtcctgttaattgatcatgactgttattaaaaaaaaaaaaaaaaa

SEQ ID NO: 35639 - DNA, 208 bp, Oryza sativa
  Clone ID: PAT_MRT4530_3953C.1
acagaactccagcttctacctttatctcaggttatcacaggccctaacagataaaggaaagggagtgctggctgctccaacggtcagaaacggggcacatacagaatatatgatgaactatgagtgcgacgatctatttccactaagcaatacctatgttgtgaaactgagatctgactaggtgagtacaaagctcatcatatatgat

SEQ ID NO: 35640 - DNA, 167 bp, Oryza sativa
  Clone ID: PAT_MRT4530_39540C.1
ctacacctacgaaggcgcgaggtggctgagaagccaacataccacgtggcgcaatcgattaatggggacccattgatcgtcagtctgaagacgtcaaggacatccagcccgttggtggcctgggacctttccaaccttccagcttaccgaaccgccgtaaggccggt

SEQ ID NO: 35641 - DNA, 328 bp, Oryza sativa
  Clone ID: PAT_MRT4530_39541C.1
cacattcatctagaacataaagaatcaagcggacatcaacatgatatacagtcaggaagacatcaagaacgaacacatcaagaaccgtctccacggtcggcgacattgaagggtgaagagcgctgccgagggaagccacacggcgcccgacgcagaggaggagggccgagactactctatggacacctacccatacaggcggtgggcgccaccccattcggtggggccggatatggcttaggggacgacggccccagagctgttggtccgacaaaggatcccctccctctgtatggaacggtcgtgcaaaaggcgccccttactggct

SEQ ID NO: 35642 - DNA, 3728 bp, Oryza sativa
  Clone ID: PAT_MRT4530_39542C.1
atgtgtgcacagcgaagggtaatccaagtgattacaagggctgacccgccaagccaattgtccaaacggcagaagaagatgcagatccgaacggtccacagcatcacttcggcgggtgaaggggcaccgcaatatcttaaccagctaatttcttttgggccggaagacgctgtaggatttatgttcccgcatcaagatcctctggtgatctcagccgagatagctggcttcgaagtccctcgaatcctggatgacggagggagttcggccgatgttatcttcgccgaagcatataccaagatggggttgctcacccaagccctcaccccggcaccagcatcgctccgcggtttcggcggagaagcagttcaagttcttggccaagcacttttgctggtagcttttggctctggagagaacagacacgaagagcaagtactgttcgacgtcgtcgacatcccgtacaactacaacgccatcttcggccgtgcaaccctgaacaaattcgacgccatttcccatcacaactatctcaagctcaagatgcctggcccaacaggggtgatactagtcaaggggctcagacttcggccgcttcaaaaggtgatctagccataatcaacagagcagtgcatagtgttgaggccgaaccgcatgactggccgaagcacacgccaaagcccaccccttatggcaagataataaaggtgcagattgatgatgccgaccccgcaaagctcgtatcactggggggcgacatgggcgaagaagaagctgagagcatcctagaggtgctcaagaggaacattgatatcttcgcctggagccccgatgaggtgggaggtgtttcgacatatctcatcatgcatcacctggcagttaaaccgaataccaagccaaaaaaacagaagttgcgcaagatgtccgccgatcgccaagaagcagcaaaagtcgaagtccagaaacttctcagagccggggtcattcaagagattgaccatctggagtggctggcgaatctagtgctggtgcggaagtcaaacgggaattgcgcatgtttgtcgacttcacggacctgaacaaggcatgtccgaaagacgatttccctttgccgtggatcgaccagctcgtggattcaatagctggctgcgaactcatgagtttcctggatgaatattccggctaccaccagatccacatgaacccactcgacatccccaaaacatccttcatcactccgttcggcacattttgtcacctcaggatgccttccggcctgaggaatgcaggagcaaccttcgccaggctagtgtataaggtcctttgcaagcagttggggcgaaacgtggaagcctatgtcgatgacatcgtcgtaaaaagccgcaaggctttcgaccatgtgtgcagcgggcataaaactcaatcctgacaagtgcgttttcggcgttcacgcaggtaatctgttaggcttccttgtttctgaaagaggcatcgaggcgaatcccgagaaaatcgatgccattcagcaaatgaatcatccatcgagcatacatgaagtacaaaagctcgcgggccgaattgcggcactcagtcaattcctctcaaaagcagccgaaagaggtttgcccttcttcaagaccctccggggcacgggaaagtttaattggacaccagactgccaagcagcgttcgacgagctaaagtaatacctgcaaagcccgccagctctgataagcccaacaccaggaagcgaactgctactatacttagaagcttcgccggtggaagtcagcgctacccttgtccaggaaacagagttcggccaaaaaccggtctatttcgtctccgaagcattgcaaggagcgaggacaagatacattgaaatggaaaagctcacttacgccctggtgatggcttcgcgcaagcttaagcactacttccaggcccacaaagtcatagtgccatcatagtaccctttgggcgaaatactccgaggcaaggaagtcaccggccggctcagcaagtgggcggcagagctatccctgttagacttgcattttgttgcacgcactgctatcaagtctcaagtgctagctgacttcgtagctgaatggacaccgttcaacacaaccaacaacgcagcggaatacgaagatattctcctgggtctaagaaaggcgaaagcactggggttccggcgcttgctaatccgaaccgactccaagttggtggaaggccatgtggacaaatccttcgaggcaaaagaaaaagggatgaagaggtatttggaggccgttcggtccatggaaaagtgcttcaccggcataacggttgaacacttacctagaggccagaacgaggaagcagacgccttggcgaaatctgctgcttgtggtggcccacattcgcctggcatctttttcgaagtcctgcatgcaccaagtgtgcccacggacagcttggagatcatggcaatcgaccaggtgaaactgggcgaagacccatacgactggcgaaccccgtttgtaaaacaccttgaaactggctagcttccggaagacgaagcagaagcaaagcgcttgcaacttagagccacgaagtataagatggtctcgggccagctctatcgctccggggtacttcaacccttacttcgttgcatctctttcgccgaaggcaaggaaatggcaaaggagatacaccagaggctatgtggcgctcaccaggccgcaagaacagtggcctccaaagtgtttagacacggagtttattggcccactgtgttgaaagtctgtgttgagcaaatcaagaagtgcgaaagttgccagcgtcatggtcgaagccaaaccgcgccccagtatgatttgcagcccaatgcgccagtctggcccttcgccagatggggattggacatcattgggccattcccagtggcgcgaaacgggtataagttcgcaattgtggcagtggaatatttctctcgatggattgaagccgaacccctcggggcaatcacttcggcagcagtacagaagtttgtgtggaaaaacattgtctgctgtttcggagtaccaaaagagttcatcaccgacaatggcaagcagttcaactctgacaagttcagagaaatgtgcgtagggctgaacctggaaatcaggttcgcatcggtcgtgcacccgcagtcaaatggggcggccgaacgtacaaatggcaagatcctagaagcactaaagaaaaggctcgagggggcagcgaagggcaaatggccagaggaaatgctatccgttctctgggcccttcggacgacccccacaagaccaaccaagtttagcccgttcatgcttctttatggcgacgaagcaatgaccccagcagagctaggggctaactcaccaagggtgatgttctctggaggcgaagaggggcgcgaagtgtcgctcgaactcttggagggggtaagagttgaagcacttgagcacatgcgcaagtatgccacaagcacttcggcaacttacaacaaaaaagttcgaccgacggaactgatgcctggtcattttgtcctaaggaagaaagcgaacccgattgctgttggcaagcttgaatcaaagtgggaaggaccatacctcatcaaacacaagtctaggacgggatcttttcgattggcgacactagaaggtgacgagttcgaccattcctggaacaccgcctctctcaagcgcttctatgtc

SEQ ID NO: 35643 - DNA, 1183 bp, Oryza sativa
  Clone ID: PAT_MRT4530_39543C.1
ttttttttttttttttttttgatcgaaaattttgaaatgtttcttctgttagattccaatgggaaaaaaaaagtacactctagtaagtatatcacataaattacaaatacaaatcaacaagaaattttataaccccaaaaaaaataagagaaagaataaagccgatggacatacagagcagcacaacaatatcggtacacggttcaatcgatctcgatcaattcggattcggattcggttcaccactccagttcagtcatcgtgcatacggcatgcatgggcgatgcatttgttcgtcgtcgtcgtcgtctccttagcttagagggcggcgagaatggcgccggccaagacaccggcggcggcgacgacccacctggagacggcggtggcgggcgcggcggccttcttggtggtgtcgtcggcggaggcgtcgtcggcgacgggcggctcggcgatcccggcggacttcttgtgcttcttggtcttggacttggacggcgcgggcgccggcgccggcgcgggcgtgggcggcttggggccgaacagctcgtaggggagcggcaccttgtcgacggagtagacggcgagggggaagtccttgctgacgacggtggagagcagcgcccagttgacgccggtggagatgttgacgttgttgttcgacggcttgatcttgtacttgtacgggccgtcggcgccggacgcctgcgtgttcacggggccgccgagggtggtgagcatggcgaggctgtagaaccgcgggagcacgcagtagagcatcagctggatctggtcctgcgacgacagcgagttgagcgtgcccggcttgagcgccgcgaacgcggcgtccgtgggcgcgaacatggtcagcccgttgtagctgtccatcagctggctgttgatctgggtgtccacccggctctcgtggaggagccggaggaaggtggtgtacttgccggacttctccagcactgccgtcacgttcgtcggcgcggggccgtcggccgccgccgccgcggggccgggcgacgccggcgtggccttcgtcggcgtggcggccttcggcttctgcgacgccgccagcaccgccgccgtggcgagcagcgcggcgaggaggaggaggcgggaggacgccattggtgggtgggtgggtgtggtggcgaggaatcggacgaacggtgtg

SEQ ID NO: 35644 - DNA, 645 bp, Oryza sativa
  Clone ID: PAT_MRT4530_39544C.1
atggcggctcagcaagtacctccagttggagccgggcagccgaatgccatggcccaacctcgcgcacaagctgcgatttcgcccttcgccacaccgtacctgcagcagggtgcggtaaacagggcgggaggcgaaaaggggctaccgttgagtgggggaatcaagactcgtccaatcccaccccagttcaagttcccacccgtcccgcgctattcaggcaaaactgacccgaaggagttcctctccatctacgagtcagcgatcgaagcggctcatggcacctacgaggagccgaagacgcaacaacacctactcggcattcgccaaaggcagggggagtcaataagggagtacatgcgtcgcttcttgcaagcccggtgccaagttcaagacataaccgaggcgtcggttataaacgccgcttcggccggtctgctcgagggcgaactcacaagaaaaatcgccaacaaggagcctcagatgctcgagcacctacttcgcatcattgacgggtttgcaaggggcgaggaggattccaagcgacggcaagctatacaagctgagtacgacaaagcctccgtcgccgctgctgaagctcaagcacacgttcaagttgccgaaccacctcccctcttcgttcgctag

SEQ ID NO: 35645 - DNA, 446 bp, Oryza sativa
  Clone ID: PAT_MRT4530_39545C.1
cccacgcgtacgcttaatcatccgttgacgcgagagggccttggatatgatacttggcatttattgtatcgaaaacagaaatgactatgaaaggctctggaaaaactatggcatgatcttaaagctgggttgcatggaatacaaggaaaatcacaggacaatggctgctttgctccgattatattcttctcaaaggagtgaagaattaattatcttgcatgaatacgtggaaaatatgaaacctgagaaataggacatttactacattgctgtggacattatgagtactgcaaaacatgctccttttctggataagctcattgaaaaaaagtaccaggttatatttttagttgacccaaagaatgaagtgtctgtcacaaatatgaactcctataaggataaacgctctgttgatactagcaaggaggacttggacttatgtgata

SEQ ID NO: 35646 - DNA, 4248 bp, Oryza sativa
  Clone ID: PAT_MRT4530_39546C.1
ttacacatagaaacgcgtaagtgagttagcattccaagagtggtcgaactcttcgccctccaaagtagccagccgaaaggagcccgttcgcgatctatgcttgatcagatacgtcccttcccatttggactccaattttccgattgccacgggattcgccttcttccttagcaccagatggctaggcaaaagctctgtcggtcgaacctttttgttataggttgctgaagtgcctactgcgtacttgttcatatgctctagtgcttctactcttacctcctccaggagttcgagtgacacgtctcgcccatcttcgcccccagagaataccaccctcggcgaattagcccctagttcagctagtgtcattgccttgtcgccatagaggagcatgaatgggctgattttggttggccttgtgggggtcgtccgaagggcccaaagaacagatagcatttcatccggccattttccctttgtcgcctcctcaagtctctttttgagagcttcgagaattttaccattcgcccgttcggccgccccattcgactgcgggtgcgcgaccgatgcgaacctaatttccaggtttagcccttcgcacatttctttgaatctcgcagagtcaaactgcttgccattgtcagtgatgaactctttcggtatcccgaactgacaaacgatgtttttccatacaaacttctgtactgctgccgaagtgattgccccaaggggttcggcttcaatccatccagagaaatattccacagatacaattgcgaatttatacccgtttcgcgccaccgggaacggcccgatgatgtctagaccccatctggggaagggccatattggcgcaatgggtttggaggccactgttcttgcagcctggtgcgcaccacatagcccctggtgtatctcttttgccatttcttcgccttcggcaaaagatatgcaacgaagcaagggttgaagcaccccggagcggtaaagctgacccgagaccatcttatacttcgtggctctgagttgcaaacgctttgcttctgcttcgtctctaggtaagtgttcgaccgttatgccggtgaagcatttttccatggaccgaacagcctccagatacctcttcattcgttcttcttttgcctcgaaggatttgtcaacatggcccgctaccaacttggaatcggttcgaattagcaagcgctggactcccagtgctttcgcctttcttaggcccaggagaacggcttcgtattctgtcgcgttgttggttgtgtcgaactgcagtcttgctgcgtaccgaatcggcacaccattcggcgaaaagagggctgccgcaatgcctgctctctgttcggtgggctcgcggtcggtggcaagtgccggtgtccattcagctacgaagtcagctagcacttgagacttgatagcaaagcgtgcaatgaaatgcaggtcgaacggagatagctctgccgcccacttgctaagccggccagtgacctccttgcctcggagtatttcgcccaaggggtactgtgatggcactatgactttgtgagcctgaaagtagtgcttaagcttgtgcgaaaccatcactagggcgtaagcgagcttttccatttcaatgtatcttgtcttcgctccttgcagtacttcggagatgaagtaaaccggtttctgtccgaactctgtttcttggacgagggcagcactgactgccaccggcgaagctgctaaatataatagcagttcgcttcctgggggtgggcttatcagagctggcgagctttgcaagtattgctttagctcgtcgaatgctgcttggcactctggtgtccaattaaactttcccgcgccccggagggtcttgaagaagggcaaacctctttcggctgcattctccggattcagctttatgcctgctgcacgcaagctgtcgaatgtctcctgcaagtcgatcgcatggtcgaaagccttgcggctttttacgacaatgtcgtcgatgtaagcttccacattccgccccaactgcttgccaaggaccttgtacaccagcgtggcgaaggttgctcctgcgttccttaagccgaaaggcatcctgaggtgacaaaatgtgccgaatggagtgatgaaggatgttttggggatgtcgagcgggttcatgtggatctggtggtagccggaatatgcatccaggaaactcatgagctcgcatctagctgttgaatctacgagctggtcgatccgcggcaaggggaagtcgtctttcggacatgctttgttcaggtctgtgaaatcgacgcacatgcgccatttgccgtttgacttccgcaccagcactggattcgccaaccactccggatggttaatctcttgaataacccccgccctgagcaatttttgtacttcggctttcgccgcttcttggcgatcagcagacatcttgcgcaacttctgttttcttggcttgatatccggcttgactgccaggtgatgcatgatgagatttgccggaacacctcccacctcgtctgggctccaggcgaagatatcaatgttcttcttgagcacctctaggatactctcaagttctccttcgcccatgtcgccccccagtgatacgagctttgtggggtcgacatcatcaatctgtaccgttgtcatcttgctgtgaggggtgggctttggcatgtgcttcagccgttcatgcggttcggtctcaacactatgcactgctctgtggattatggctagatcgccttttgaagtagccgaaggctgaagccccttgactactattaccgctgtcgggccgggcatcttgagcttgagataattgtggtgggaaatggcttcgaacttgttcagggttgcacggccgaagatggcgttgtagttgtacgggatgtcgacgacgtcgaacagtatttgctcttcgcgtctgttctctcccgagccaaaggctatcagcaagagtgtttggccaagaacttgaactgcttctccgccgaaaccgcggagcgatactggtgctggggtaagggcttgggtaggcaaccccatcttggcatatgcttcggcgaagataacatcggccgaactccctccgtcaaccaggattcgtcggacttcgaaaccagctatctcagctgagattaccaggggatcttgatgcgggaatataactccttctgcgtcttccggcccaaaagaaattagctggttcagatattgcggcgccccttcacccgccgaagtgatgctgtggaccatacgggtctgcatcttcttcttcttgtgggctggctgctgatggttgctcgcttgctgggcgtcgaactccttgcgaagggcttgcacttcttcgacagccatcacagccttgcccgcacggtctgttctgaactttctccaagttatgggggcttggctttgccttggcggctgtccttggatcgccggttgagactggcgaacggagaggggaggtggttcggcaacttgaacttgtgcttgagcttgagcagcggtgatggaggctttgtcgtactcagcttgtatagcttgccgtcgcttggaatcctcctcgccccttgcgaacccgtcaatgatgcaaagtaggtgctcaagcgtcagtggttccttgttggcgatttttcttgtgagttcgccctcgagcagaccggccgaagcggcgtttataaccgacgcctcggttatgtcctgaacttggcaccgggcttgcgagaagcgacgcatgtactcccttatcgactcccccggcctttggcgaatgccgagtaggtgttgttgcgtcttcggctcctcgtaggtgcctcgaaagttaaggacaaaaacatcgcgcaattgctcccatgagtaaatgctattatctggtaaattgaaataccaagaacgggcgatgccgtctagagcgagatgtattacctttgccttggtattttcgtcaccatgagccgcttcgatcgctgactcgtagatggagaggaactccttcgggtcagtttcgcctgagtagcgcgggacgggtgggaacttgaactggggtgggattggacgagtcttgattcccccactcagcggtagccccttttcgcctcccgccctgtttactgcaccttgctgcgggtacggtgtggcgaagggcgaaatcgcagcttgtacgtgaggttgggccatggcattcggctgcccgactccaactggaggtacttgctgagccgccat

SEQ ID NO: 35647 - DNA, 3735 bp, Oryza sativa
  Clone ID: PAT_MRT4530_39547C.1
tcaggcgtttgcatagaagcgcttgagggaggcggcgttccaggaatggtcgaactcctcgccttcgagtgtcgctaggcgaaaagatcccgtcctagacttgcgcttgatgaggtatggtccttcccactttgattcaagcttgccaactgctactgggttcgccttcttccttaggacgagatgaccaggtatgagctccgtgggtcgaacttttttgttgtaagttgccgaagtgcttgtggcgtacttgtgcatgtgctcgagcgctttgactcttactccttccaagagttcgagcgatacttcgcgtccttcttcgcccccggaaaacatcacccttggtgagttagcccctagctctgctggggtcattgcctcatcgccatacagaagcataaacgggctaaacttggttggtcttgtgggggtcgtccgaagagcccagagaaccgatagcaattcctctggccatttgcctttcgccgccccctcaagtcttttcttcagtgcttctaggatcttgccatttgtacgttcggccgccccatttgactgcgggtgtatgaccgacacaaacttgatttccaggctaagcccttcgcacatttctctgaacttatcagagtcaaactgcttgctgttgtcagtaatgaactcctttggcactccgaaacggcaaacaatgtttttccatacaaatttttgtactgctgccgaagtggcaaacaatgtttttccatacaaatttctgtactgctgccgaagtgattgccccaaggggttcggcttcaatccatcgatagaaatattccacagcggaagccagcctgtttcaaggtgtttcacaaatggggttcgccagtcatgtgggtcttcgccccgtttctcccggtcgattgccatgacttcggagcagtccatgggcacacttggagcatgcaggacttcgaaaaagatgcccggcgaatgtgggccaccacaagcagcggatttcgccaaggcgtctgcctccccgttctggtctctaggcaagtgttcgaccgttatgccggtgaagcatttttccatggaccggacagcctccagatacctcttcattccctctttttttacctcgaaggatttgtcaacatgacctgctaccaacttggagtcagttcgaattagcaggcgctggactcccagtgctttcgtaccagcactggattcgccaacctcgtcagggctccaggcgaagatatcgatgttctttttgagcacctttagtatgctctcaacttcttcttcgcccatgtcgccccccagtgatacgagctttgtggggtcggcatcatcaatctgcacttttgttaccttgccgtgaggggtgggcttcggtgtgtgcttcggccgctcatgcggttcggtctcaacattgtgcactgctctgttgattatggctagatcgcgttttgaagcggccgaaggctgaagccccttgactactatcacccctgttgggcctggcatcttgagcttgagataattgtggtgggaaatggcttcgaacttgttcagggttgcacggccgaagatggcgttgtagttgtatgggatgttgacgacgtcgaacagtatttgctctacgcgcctgttttctcccgagccgaaagctatcagcaaaaatgcttggccaagaacttgcactgcctctacgatgaacccccggagcgacgttggtgccggtgtaagagcttgggttggcaagcccatcttagcatatgcttcggcgaagatcacatcggccgaactccctccatcgactaggattcgtcggacttcaaaaccggctatctcagctgagattaccagtggatcttgatgcgggaacaggactccttcggcatcttctggcccgaaagagatcagctggttcacgtactgtggcgccccctcacccgccgaagtgatgctgtggaccatgcggatctgcatcttcctctgccgttttgacaactggcttggcgggtcagctcttgtaatcacttggattacccttcgttgtgtatcttggcgttgttcggctgagggtgtttgctcctgaactgcttcacggggtgcttcgacagttgttccctgctgcggccttgggtcttgcgcgttgccacgttgcctaatatttcggcattgctccgtggtgtgcgaagagcgtccgtgaaaggtgcagtagaggtcttttcggaccttcttgcgggctggctgctgatggttgcttgcttgttgggcgtcgaactccttgcggagggcttgcacttcttcgacagccatcacagccttgcccgcccgatctgttctgaactttctccaagtcatgggggcttggccttgccttggcggctgtccctggatcgccggttgcgcttgagcttgagcagcggcgacggaggctttatcgtactcagcttgtatagcttgtcgtcgcttagaatcctcctcaccccttacgaacccgtcaatgatgcgaagtaggtgctcgagcgtctgcggctccttgttggcgatttttcttattagttcgccctcaagcagactggccgaagcggcgtttataaccgacgcctcggttatgtcttgaacttggcactgggcttgcgagaagcgacgcatgtactcccttatcgactcccccggcctttggcgaatgccaagaaggtgttgctgcgtcttcggctcctcataggtgcctcgaaagttaaggacaaaaacatcacgcaattgctcccatgagtaaatgctattggctggtaaattgaaataccaagagcgggcgatgccgtctagagcgagatgtattaccttcgccttggtaatttcgtcaccatgagccgctttgatcgctgacttgtagatggagaggaactccttcgggtcagtttcgcccgaataacgcgggacaggtgggaacttgaactggggcgggattggacgagtcttgactcccccactcagcggcagccccttttcgcctcccgccctgagcagtgttgacgaagtcgaactgcggtccttgactccacggcgaaggtcccgagcctggctgaattggtggcaaccaattgggcacaccttgacttgtattccccaccgggtaagccgatggggttgtgcttgaaatgtagtggggttggttgagttgctgaaggaaagcttggagttgcgcctgcagagccgaagccccttccgccactggttgtggcgcttggccaggtggttgatgctacccggcgaagtacaccggcggctatgcggcgaatactgaaggattggagccgacgtggccttggtccgccttgtcgcctcgtatgcttgttgttgttcttgcatttggcgaagcatgtcttggagccatgtcatgttctgccgcatggcttccatgtcggcttcggcttgcgcttcggggtccaggctgatttgggcctgtacaacggtgagcgcaattggcgccgccggctgcgacggggcggcttgaggcaccaccagttggttagtcgaaaggatctccaccttggtctggagtgtccttcccgccgcagccgccttcgccacgtcggccgtgttcggcacttgcactgaggttgcgggggccgaagacggttgtggtggcgcgggggccgaaggcggctgtgatggcgcttgtgcttctccatcttcggccacgaacgccgaaggctctgctccttcctcggcggccat

SEQ ID NO: 35648 - DNA, 2829 bp, Oryza sativa
  Clone ID: PAT_MRT4530_39548C.1
tcaactgagtgctgcaattcggcctgtaagcttttgtacttcatgtacgcttgacggaggcttcatttgctggatggcatcgattttctcgggattcgcctcgatgcccctttcggaaacaaggaaacccaacaacttgcctgcgcggacgccgaatacgcacttctccggattcagctttatgcctgccgcgcgcaagctgtcgaacgtctcttgcaggtcgaacacatggtcgaaagccttgcggctttttacgacgatgtcgtcgacgtaagcttccacgtttcgccccaactgcttgccaaggaccttgtacaccagcctggcgaaggttgctcctgcgttccttaagccgaaaggcatcctaaggtgacaaaatgtgccgaatggagtgatgaaggatgttttggggatgtcgagcgggttcatgtggatctggtggtaaatgcgccatttgccatttgacttccgcaccagcactggattagccaaccactccggatggtcaatctcttgaataacccccgctcggagtaatttttgtacttcggtcttcgccgcttcttggcgatcgacagacatcttgcgcaacttttgctttcttggcttaatattcggcttgactgctaagtgatgcatgatgagatccgccgggacgccccccacctcatcagggctccaggcgaagatatcgatgttctttttgagtacctctaggatgctctcaacttcttcttcgcccatgtcgccccccagtgatacgagctttgtggggtcggcatcatcaatctgcactattgttatcttgccgtgaggggtgggcttcggcgtgtgcttgggccgctcatgcggttcggcctcaacattgtgcactgctctgttgattatggctagatcgcgttttgaagcggccgaaggctgaagccccttgactactatcactcctgttgggccaggcatcttgagcttgagataattgtggtgggaaatggcttcgaacttgttcagggttgcacggccgaagatagcgttgtagttgtatgggatgtcgacgacgtcgaacggtatttgctcttcgcgcctgttttctcccgagccgaaagctatcagcaaaagtgcttggccaagaacttgcactgcctctccgccgaacccccggagcgacgttggtgccggtgcaagagcttgggttggcaagcccatcttagcatatgcttcggcgaagatcacgtcagccgaactccctccatcgaccaggattcgtcggacttcaaaaccggctatctcagctgagattactagtggatcttgatgcgggaacaggactccttcggcgtcttctggcccgaaagggatcagctggttcacgtactgtggcgccccctcacctgccgaagtgatgatgtggaccgtacggatctgcatcttcctctgccgtttcgacaactggcttggcgggtcagctcttgtaatcacttggattatcctttgttgtgtatattggcgttgttcggctgggggtatttgctcctgaactgcttcacggggtgtttcgacagttgttccttgctgcggccttgggtcttgcgcgttgccacgttgcctaatgtttcggcattgttccgtggtgtgcgaagagcgtccgtgaaaggcgcagtagaggtcttttcggaccttctgcgggctggctgctgatggttgcttgcttgctgggcgtcgaactccttgcggagggcttgcacttcttcgacagccatcacagccttgcccgcccgatctgttctgaactttctccaagtcatgggggcttggctttgccttggcggctgtccctggatcgccggctgagatcaacttgtatagcttgtcgtcgcttagaatcctcctcgccccttgcgaacccgtcaatgatgcgaagtggtgctcgagcgtctgcggctccttgttggcgatttttcttgttagttcgccctcaagcagaccggccgaagtggcgtttataaccgacgcctcggttatgtcttgaacttggcaccaggcttgcgagaagcgacgcatgtactcccttatcgactcccccggcctttggcgaatgccaagaaggtgttgttgcgtcttcggctcctcataggtgcctcgaaagttaaggacaaaaacatcgcgcaattgctcccatgagtaaatgctattggctggtaaattgaaataccaagaacgggcgataccgtctagagcgagatgtattaccttcgccttggtattttcatcaccatgagtcgcttcgatcgttgactcgtagatggagaggaactccttcgggtcagtttcgcccgaataacgcgggacaggtgggaacttcaactggggtgggattggacgagtcttgattcccccactcagcggcagccccttttcgcctcccgccctgtttaccgcaccttgctgcgggtacggtgtggcgaagggcgaaatcgcggcttgtgcgtggagttgggccacggcattcgattgcccggctccaactggtggtacttgctgggccgctatggatgggtcaaagattggctgcgaccacatcatggcagcttggattgtgtcacgccctaaaaatcgccgccgacgccgccttgtctcgccgtcgccaccggtgatctccagccgcgccgcgccttcgatttcgccgtcgccgccgcttcctctcgccgccgttaggtgcgcacggaggtgaggaacctcggccgccctctccccgctgtcgccggtcgccggagacccgtcgccgccgtcgaccgagccgccgcgccgcctcctctcgtcgccggccaccat

SEQ ID NO: 35649 - DNA, 1602 bp, Oryza sativa
  Clone ID: PAT_MRT4530_39549C.1
atggagttgatgggagagtactgcagcaacgccccatgcaagtggttgttggatttgggcaagggtggtgctcatgacaccaacgcccacaacctgttcgatggaatgcctagccaatctgagatgtccaaggaagatcagaggacatctaagcctgtccccatcaattctaccatgaacaaagaggagaaatggctggacaaatctctagatcggatattggagaagtttgaacaaatggaggccaagcgcatgcaagaggaccatcagggcaaccactgctgttctcaaggctacatcacctacagcacccatggcaccacctactccagtgcctaccaagtgtttgacagaatgccccaacaacagcttcacttgggcaacagcgagttcaagtcacattgggagacaataaggacaagggccacgcccccctacatcgtcaccaaggactcacccgaggtcacgcccaccatgtgttcgacgaaatgctccggtcctaccatcgagcccgatctcactgtggctgtagtggttacgtccgccaccactgccgcggcctctatggagttggtagccgctgggaacgcaatcggtgccactgacatcaacaatcttgaccaccccaaggtgacgcatgctaagtgttcgatgtttggctccggcgtcaaacggggcactgaacaagttgtgcttgcgttcccgcttatggctagccctatggagttcatgacatcattgaaacccatggccacctgcctggtcaggatggaagaagtgatatatgacctggactacaatcaatcatcatgggatgagattctatttcgtcccaccctggcctccaccaagtctaaaaatgcaccagttttgggctttgattttccagtggagaaatggaatatgagaataatttgcatggtgatatcagaatctgaatcatgtttggaatcaaattacattggtttgaatgttgaaagagatttgctatatgtgattgctgaagaaaaaggttgcaaaaggatgaaaggaatggaagcagacactaattcaattcatgatgagaagtatacttttgggttagttcctacaatggtgttgatcaagcgaggttgtcactgtttgcagcatatcaaattgttgaaaatcaatgttggcaagcaattcgtaacagtgctattgtcatgcatcacccaggagtactttacatggagtaagcagttattcaagctaaagctacttgctctattcttcttcaatgatggttcattgtctaacaccaaatatttggagcaaccatgggatccgggaggtgtattccatcggcttggggacaagccgaatttcaagaagggattgtcaggatcccgagtaggccgcacacgggctggtcagcccatcgccatgaggcccaagcaaacggaagggagcagcatacgagcggcagcgtcggcaacaccagggggcatcgaaagatcatttggacttggcggagctgaagctcccggcagcggcagggacttgggtggcccggtgggcaccctcgtcgatctctctcccctacctctcctccgatctccagccttcccccctcggttctag

SEQ ID NO: 35650 - DNA, 162 bp, Oryza sativa
  Clone ID: PAT_MRT4530_3954C.1
atggtgggcatggctggtgtagactgggagtggttacacagcatggcacatgcgctagcactggacacatggatgtggccaagagaggacgttcctggcctaggatgtaagcgggcctggcctgtgggaggcgggatgacctatgaaagctatcagatgtaa

SEQ ID NO: 35651 - DNA, 649 bp, Oryza sativa
  Clone ID: PAT_MRT4530_39550C.1
aaaaccaatcaaagcacgatatttattcgtctgtctctgttctacaacgcaaacagagtactacttggtgaaacgaaaataccaagcaagcacaataccaaaatcacaattcaagatatatttttagcataaaagccataaacgatactaattaatccaacaatagactaataagaagtcactgaaacgtgcatttaactgcagactgcgataacaacttgcattttctcgacggcttcaaaaatacaattcaaccctgatttgatcacttgttcaaaccccgtccaattcaggcaatagcttcaccccgatcttcataaaatttcatcaacccaacctcccatgctatatatagtgcttgtgcttagatttcagatgtcatttcaaatcgatcctgcccacgaagttccggggcataccctggtgccgtgccaaaacattcctgtaaagatagatgaccaatctgcatgtcaatttaaacatcaaagagcatctactatattgcttattggaaagcagtgcaaagacattccgagagcactggcagactcatgtatgcgtgcaagtatgtgcatgataacgcgagccgagctgttctgctccgaaggagcttttgcacaagtagagttgccccttgcgaaagctttgt

SEQ ID NO: 35652 - DNA, 3144 bp, Oryza sativa
  Clone ID: PAT_MRT4530_39551C.1
atggggttgcctacccaagcacttaccccagcaccagcatcactccgcggtttcggcggagaagcagttcgagttctcggccaagcactcttgctgatagcctttggctcgggggagaacagacgcgaagagcaaatactgttcgacgtcgtcgacatcccgtacaactacaatgccatcttcggccgtgcaaccctgaacaagttcgaagccatttcccaccacaattacctcaagctcaagatgcccggcccggcgggggtgatagtggtcaaggggcttcagtcttcggccgcttcaaaaagcgatctagccataatcaatagggcagtgcactgcgttcagaccgaaccgcatgaacggccgaagaacacgccaaagctcacccctcacggcaagataacaaaagtgcagattgatgatgccgaccccacaaagcttgtatcactgggggacgacatgggcgaagaagaagttgagagtatgctagaggtgctcaagaagaacatcaacatcttcgcctggagccctgacgagccagacattaagccaagaaaacataagttgtgcaagatgtctgccgaccgccaagaagcggcgaaagccgaagtacaaaaattgctcagggcaggggtaatccaagagattgaccatccggagtggctggcgaatccagtgctggtgcggaagtcaaatggcaaatggcgcatgtgtgtcgatttcacagacctgaacaaagcgtgtccgaaagacgacttccccttgccacggatcgaccagctcgtggattcaacagctggatgcgagctcatgagtttcctggacgcatattccggctaccaccagatccacatgaacccacttgacatccccaaaacatccttcatcactccgttcggcacgttttgtcacctcaagatgcctttcggcttaaggaacgcaggaacaaccttcgccagactggtgtacaaagtccttggcaagcagttggggcggaatgtggaagcttatgtcgacgacatcgtcgtaaagagccgcaaggctttcgaccatgcgattgatctgcaggagacattcgacagcttgcgcgcagcaggcattaagctgaatccggagaagtgcgttttcggtgtccgcgcaggcaagttgttgggtttccttgtttccgaaagaggcatcgaggcgaatctcgagaaaatcgatgccatccagcaaatgaagcctccgttaagcgtacatgaagtacaaaagcttgtaggccgaattgcggcactcagtcgattcctctcaaaggcagccgaaagagcactgcaaggagcgaagacaagatacatcgaaatggaaaagctcgcttacgccctagtgatggcctcacgcaaccttaagcactacttccaagccaacaaagtcatagtgccatcacagtaccccttgggcgaaatactccgaggcagggaagtcacgggccggctcagcaagtgggcggcagagctatccccgttcgacttgcattttgttgcacgctctgctatcaagtctcaagtgctagctgacttcgtagctgaatggacaccggtacttgccgctgaccccgagcccgccgaacaattttgggtgatgtgctctgatggctcgtggtcgcacagtggggcgggtattgcagcagtcctcttttcgccgaatggtgtgccgattcggtacgcagcaagactgcagttcgacacaaccaacaacgcagcagaatacgaagccgttctcctgggcctaagaaaggcgaaagcactgggagtccggcgcttgctaattcggaccgactccaagttggtagcaggtcatgttgataactccttcgaagcaaaagaagaaggaatgaagaagtatctggaggctgttcggtccatggaaaaatacttcactggtataacggtcgaacacttacctagaggccagaacgaggaagcagacgccctggcgaaatccgctgcttgtggtggcccacattcgccgggcatcttttttgaagtcctacatgctccaagtgtgcccatggacagttcagaagtcatggtaatcgaccaggagaaactgggcgaagacccatatgactggcgaaccccatttgtgaaacaccttcaaactggctggcttccggtagacgaagcagaagcaaagcgtttgcagctcagagccacgaagtataagatggtctcgggtcagctttaccgctctggggtacttcagcccttacttcgttgcatctctttcgccgaaggcgaagaaatggcaaaggaagtacatcagggactatgtggctcgcaccaggctgcaagaacagtggtctccaaagtatttagacaaggagtttattggcccactgtgttgaaagtctgtgttgagcaaatcaagaagtgcgaaagctgccagcgtcatggccgaagccgaaccgcgccccagtatgatctgcagcccattgcgccaatatggccctttgccagatggggactggacatcatcgggccgttcccagtggcgcgaaacggccgaaccccttggggcaatcacttcggcagcagtacagaagtttgtatggaaaaacattgtttttgccgtttcggagtgccaaaagagttcattactgacaacggcaagcagtttgactctgataagttcagagaaatgtgcgaagggcttaacctagaaatcaggttcgcgtcggtcgcgcacccgcagtcaaatggggcggccgaacgtgcaaatggcaagatcctagaagcactaaagaaaagactcgaggaggcagcgaaaggcaaatggccagaagaattgctatcggttctctgggccctccggacgacccccacaagaccaaccaagtttagcccgtttatgcttctttatggcgatgaggcaatgaccccagcagagctaggggctaacttaccaagggttatgttctctgggggcgaagaggggcgcgaagtatcgctcgaactcttggaaggggtaagggtcgaagcgctcgagcacatgcacaagtacgtcacaagcacttcggcaacttacaacaaaaaaagtttgacccacggagctgatgcctggtcatcttgtcctaagaaagaagacgaacccagtagcggttggtaa

SEQ ID NO: 35653 - DNA, 2529 bp, Oryza sativa
  Clone ID: PAT_MRT4530_39552C.1
atgaggcccaagcaaacggaagggagcagcatacaagcagtagcatcggcaacaccagggggcatcgaaagatcatttggacttggcggagctgaagctcccggcggcagcggtgacttgggcggccgcatggagttgataggagagtactgcagcaatgccccatgcaagtggttgttggatttgggcaagggtggtgctcatgacaccaacgcccacaacctgttcgatggaatgcctagccaatctgagatacccaaggaagatcagaggacatctaagcctgtccccatcaattctaccatgaacaaagaggagaaatggctagacaaagctctagatcggatattggagaagtttgaacaaatggaggccaagcgcatgcaagaggagaagatcaatcagatatttcaaaagttggaggacatagaggttcttaggagcaaggcttccgaggaaataattgaagccatcagggcaaccaccgctgttctcaaggctaagtcacctatagcacccatcgcaccacctactccagcgcctaccaagtgtttgacagaatgccccaacaacaactttacttgggcaacgacgagttcaagtcacattggtgaggatactgctccaacagctacctgggagctaggagacaacaaggacaagggccacgccccctgcatcgtcgccaaggactcacccgaggtcacgcccaccatgtgttcaacgaaatactccggtcctaccatcaagcccgatctcactatggctgtagtggttacgtccgccaccactgctatggcctctatggagttggtagctgctgggaatgcaatcggtgccactgacatcaacaatcttgaccaccccaaggtgacgcatgctaagtgttcgatgtctagctccggcgtcaaacggggcactgaacaagttgtgcttgcgtttccgcttatggctagccctatggagttcatgacatcattggtagaaccatctccacccacagggctgaagcttggtgatgccatttgcgtgggagatcaggtgcctatgaagtgttcgatgaaatgtactgagagtgacaataagccactgatggaacaccccaagagaaacccatggccacctgcctggtcaggatggaagaagtggtatatgacctggactacaatcaatcatcaaaggatgagattatatttcgtcccaccctggcctccaccaagtctagtaagttctttggcatgggtgcatttttgtattggagctcttatatttcaaagggtggttttatcaaatgaaatggttgagttggagccctggcctccaccacatgaagcaagtttcagaattttgcctttccaaactagtagcaggaaatgttgcaattatgtcactgctttgagtataattgcatgggatgagaagaggacaaggagtagtagaattattgacactagttttgaggaagggacacaggaatgttggaatccatatctagccttgccaatcctcagctattttaggaccagattgcaatggatgccaccttggctgccattagttggtttgctggaagctagagtagggaagggttgcactactgattttgctgcaagtataattccttggaatgagcaaaagaaaatgattactattgaaacttccacttgctttgagcagaaaatgcaccaaattcgggctttgattttccacgtcagtttgacatcacttgctagcaaggaaagcaatctagttatttgtgatcctgaatcattatctatttggttatcatatgttgatctctgggggatgttgctcaactactacccaactatagtggagaaatggaatatgagaataatttgcatggtgatatcagaatctgaatcatgtttggaatcaaattacattggtttgaatgttgaaagagatttgctatatatgattgctgaagaaaaaggttgcaaaaggatgaaaggaatggaagtagacactaattcaattcatgatgagaagtatacttttgggttagttcctacagtggtgttgatcaagcgaggttgtcactgtttgcaacatatcaaattgttgggaatcaatgttggcaagcaattcgtaatagtgccattgtcatgcatcacccaggagtactttacatggagtaagaagttattcaagctaaagctacttgctctattcttcttcaatgatggtttattgtctaacaccaaatatttggagcaaccatgggatccgggaggtgtattccatcggcttggggacaagccgaatttcaagaagaggggattgtcaggatcccgggtgggccgcacacgggctggtcagcctattgccatgaggcccaagcaaacggaagggagcagcatacaagcagcaccgtcggcaacaccagggggcatcgaaagatcatttgaacttggcggagctgaagctcccggcggcggcggcgacttgggcagccggtgggcaccctcgtcgatctctctcccctacctctcctccgatctctag

SEQ ID NO: 35654 - DNA, 1821 bp, Oryza sativa
  Clone ID: PAT_MRT4530_39553C.1
atggccgccgaggaaggagcagagccttcggcgcccgtggccgaagatggaggaggacaagcgccatcacaaccgccttcggcccctgcaacctttgtgcaagagccgaacgcggccgacgtggcgaaggcggctgcggcggcaagggcactccagaccagggcggagatcctttcgacaggccaactggtggtgccccaagccgctccatcgcagccggcagcggccccaactgcgctcgccgttgtgcaggcccagaacatgacatggctccaagacatgcttcgccaaatgcaagaacaacaacaagcatacgaggcggcaaggcgggccaaggccacgtcggctccaatccttcagtattcggcaggttatgtcccacctcaagtccatccgcaagtgacgacccagccctttccgccacaagccacacaggcgccggtgtacttcgccgggcagcaatcggccgcagcagtgcatccggcccctcacgtgcaacagcaagctcaaccagtcgctgcccaagtacaccatcaaccacctggccaagcgccacaaacagtggcggaaggggcttcggctctgcaggcgcaacttcaagctttccttcagcaactcaaccaaccccactgcatttcaagtacaatcccatcggcccacccggaggggaatacaagtcaaggtgcgcctaattggttgccaccgattcagccgggcctgggagtttcgccgtggaatcaaggaccgcagctcgacttcgtcaacgctgctcaggcgccaaccgttcggcagcaagctccaactccaggcttcggaacaaaccaagcaccaatccaagctgccatgacgtggtcgcagccaatttttgacccatccatggcggctcagcaagtacctccagttggagccgggcagtcgaatgccacggcccaacctcacgcacaagctgcgattttgcccttcgccacaccgtacccgcagcaaggtgcggtaaacagggcgggaggcgaaaaggggctaccgctgagtgggggaatcaagactcgtccaatcccaccccagttcaagttcccacccgtcctgcgctattcaggcgaagttgacccgaaggagttcctctccatctacgagtcagcgatcaaagcggctcatggtgacgaaaataccaaggcaaaggtaatacatctcgctctagacggcatcgcccgttcttggtatttcaatttaccagccaatagcatttactcatgggagcaattgcgcgatgtttttgtccttaactttcgaggcacctatgaggagccgaagacgcagcaacaccttctcggcattcgccaaaggccgggggagtcgataagggagtacatgcatcgcttctcgcaagcccggtgccaagttcaagacataaccgaggcgtcggttataaacgccgcttcggccggtctgctcgagggcgaactcacaagaaaaatcgccaacaaggagccacagacgctcgagcacctacttcgcatcattgacgggttcgcaagaggcgaggaggattccaagcgacgacaagctatacaagctgagtacgacaaagcctccgtcgccgctgctcaagctcaagcaaaagttcaagttaccgaaccacctcccctctctgttcgccagcctcagccggcgatccaaggacagccgccaaggcaaggccaagctcccatgacttggagaaagttcagaatagaccgggcgggcaaggctgtgatagctgtcgaagaagtgcaagctctccgcaaggagttcgtcctattctttcgtgatgatttgtttttttaa

SEQ ID NO: 35655 - DNA, 720 bp, Oryza sativa
  Clone ID: PAT_MRT4530_39554C.1
atggctatgggcaacatcgatgtgacgaaggctagggttggtgaggagctgacgatggtttgcggcgacgtgatggggatggggataggcaggcggtggcggcggcggtgggcgagggctggagcggcgatgacggcgagcaagggccaagacgagagtgacggtagcgggcgggtgagggctagaagggagaagggagaggcggcgtcgctgagatctcactcgcccaccgccgccgagctccgcgagtgcgggagaggcaccggcggcggcggcgtcaacacgctcggcggcggcggcgggaactacgcggcggcctcacgggcggagctgcactcggccatcttctacccaaggcatagcagctcggcggccagcttctcccttgccgaagcaccgctgccgtccgaggctatcgccgagatctcgcccgctcaccgccactgctccggccgtcgtccgcccaccaccaccgccgctctcgtctccgacctcctcgaccgtggccactgcctgggacgcgccgccgctgctccggccctcgcccacggctgccgctgctctttgccgcctgctcgggcgatgcctcctccccagcggcggcggtcggtgcctcctccaaccccatcagtggcgtcggcttcggcggtgggggtggccaggtcggggtccaagacgggtgacttcttcagcggcgagggtggccgggtcagggtctaa

SEQ ID NO: 35656 - DNA, 3969 bp, Oryza sativa
  Clone ID: PAT_MRT4530_39555C.1
atgacttggagaaagttcagaacagatcgggcgggcaaggctgtgatggctgtcgaagaagtgcaagccctacgcaaggagttcgacgcccagcaagcaagcaaccatcagcagccagcccgcaagaaggtccgaaaagacctctactgcgcttttcacgaatgctcttcgcacaccacggagcaatgccgaaacattaggcaacgtggcaacgcgcaagacccaaggccgcagcaaggaacaactgtcgaagcaccccgtgaagcagttcaggagcaaatacccccagccgaacaacgccaagatacacaacgaagggtaatccaagtgattacaagagctgatccgccaagcctgttgtcgaaacggcggaggaagatgcagatccgtatggtccacaacatcacttcggcgggtgagggggcgccacagtacgtgaaccagctgatctcttttgggccagaagacgacgaaggagtcctattcccgcatcaagatccactggtaatctcagctgagatagccggttttgaagtccgacgaatcctggtcgatagggggagttcggccgacgtgatcttcgccgaagcatatgctaagatgggcttgccaacccaagctcttgcaccggcaccaacgtcgctccgggggttcggcggagaggcagtgcaagttcttggccaagcacttttgctgatagctttcggcttaggagaaaacaggcgcgaagagcaaatactgttcgacgtcgtcgacatcccatacaactacaacgccatcttcggccgtgcaaccctgaacaagttcgaagccatttcccaccataattatctcaagctcaagatgcctggcccaacaggggtgatagtagtcaaggggcttcagccttcggccgcttcaaaacgcgatctagccataatcaacagagcagtgcacaatgttgagaccgaaccgcatgagcggcccaagcacacgccgaagcccacccctcacggcaagataacaaaagtgcagattgacgatgccgaccccacaaagctcccaagaaagaaaaagttgcgcaagatgtttgccgatcaccaagaagcggcgaagaccgaagtacaaaaattactctgggcgggggttattcaagagattgaccatccggagtggttggcgaatccagtgctggtgcggaagtcaaatggcaaatggcgcatgtgtgtcgatttcacagacctgaacaaggcatgtccgaaagacgatttccccttgccgcgaatcgaccagctcgtggattcaacagctggacacgagctcatgagtttcctggatgcatattccggttaccaccagatccacatgaacccgctcgacatccccaaaacatccttcatcactccattcggcacattttgtcacctcaggatgcctttcggcttaaggaacgcaggaggaaccttcgccaggctggtgtacaaggtccttggcaagcagcttgggcgaaacgtacaagcttacgtcgacaacatcgtcgtaaaaagccgcaaggctttcgaccatgcgttcgacctgcaagagacgttcgacagcttgcgcgcggcaggcataaagctgaatccggtgaagtgcgtttttggcgtccgcgcaggcaagttgttgggtttccttgtttccgaaaggggcatcgaggcgaatcccgagaaaatcgatgccatccagcaaatgaagcctccgtcaagcgtacatgaagtacaaaagcttacaggccgaattgcagcactcagtcgattcctctcaaaggcggccgaaagaggtttgcccttcttcaagaccctccggggcgcgggaaagtttaattggacaccagagtgccaagcagcattcgacgagctaaagcaatacttgcaaagcccgccagctctgataagcccacccccaggaagcgaactgctgttatacttggcagcttcaccggtggcagtcagtgctgcactcgtccaagaaacagagtccggacagaaaccggtctacttcgtctccgaagcactgcaaggagcgaagacaagcatagtcccatcacagtaccccttgggcgaaatactccgaggcaaggaagtcactggccggctcagcaagtgggcggcagagctatccccgttcgacttgcattttgttgcacgctctgctatcaagtctcaagtgctagctgacttcgtagctgaatggacaccagtacttgcccccgagcccgagcccgatgaccagttctgggtgatgtgctctgacggttcgtggtcgcacaagggggcaggcgttgcggcagtcctctttttgccgaatggtgtgccgattcggtacgcagcgagattacagttcaacacaaccaacaatgcagcagaatatgaagccgttctcctgggcctaagaaaggcgaaagcactgggagtccggcgcctgctaattcgaactgactccaagttggtagcaggccatgttgacaaatccttcgaggcaaaagaaaagggaatgaagaggtatctggaggctgttcggtccatggaaaaatgcttcaccggcataacggtcgaacacttgcctagagaccaaaacgatgaagcagacgccttggtgaaatccgctgcttgtggtggcccgcattcgcttggcatctttttcgaagtcctacatgctccaagtgtgcccatggacagctcggaagtcatgacaatcgaccaagagaaactgggcgaagactcatatgactggcgaaccccatttgtgaaacaccttgaaactggctggcttccggtagacgaagcagaagcgaagcgtttgcaactcagagccacgaagtataagatggtctcgggtcagctttaccgctccggggtacttcaacccttagtttgttgcatctcttttgccgaaggcgaagaaatggcaaaggaaatacaccaagggctatgtggcgcgcaccaggctgcaagaacaatggcctccaaagtatttagacaaggactttattggcccactgtgatgaaagtctgtgttgagcaaatcaagaagtgcgaaagttgccagcgtcatggccgaagccaagccgcgccccagtatgatctgcagcccattgcaccaatatggcccttcgccagatggggactggacattattgggccattcccggtggcgcgaaacgggtataaattcgtaattgtagctgtggaatatttctctcgatggatcgaagccgaaccccttggggcaatcacttcggcagcagtacagaagtttgtatggaaaaatattatttgccatttcggggtgccaaaagagttcattactgacaacggcaagcagtttgactctgataagttcagagaaatgtgcgaagcgcttaacctagaaatcaggttcgcgtcggtcgcgcacccacagtcaaatggggcggccgaacgtacaaatggcaagatcttagaagcactaaagaaaagacttgagggggcggcgaaaggcaaatggccagaagaattgttatcggttctttgggcccttcggacgacccccataagaccaaccaagtttagcccatttatgcttctttatggcgatgatgcaatgatcccagcggagctaggggctaactcaccaagggttatgttctccgggggcgaagaggggcgcgaggtatcgctcgaactcttggaagctgtaagggtcgaagcgctcgagcacatgcacaagtacgccacaagcacttcggcaacttacaacaaaaaagtccgacccacggagctgatgcctggtcatcttgtcctaaggaaaaaggcgaacccattagcggttggcaagcttgaatcaaagtgggaaggaccatacattatcaaacacaagtccaggacgggatcttttcgcctagcgacactcgaaggcgaggagttcgaccattcctggaacgccgcctccctcaagcgcttttatgtctag

SEQ ID NO: 35657 - DNA, 271 bp, Oryza sativa
  Clone ID: PAT_MRT4530_39556C.1
attaaaaaatttattaaaaaccaaataattttcaaaacaacaaaaacaaaaaatttctacacaacactatctcctcccattcaacacaacaacccaatgatcctactaaccaaaatttttcggacccataccccaacccgggaaaacccgacccgttcaccacccccacccacctttcccaacccccaaaaaactaaaaccaaaatccaaacaagcacaaaaacccttccccggataaactgaaaaccaatcccaattccacacaacatac

SEQ ID NO: 35658 - DNA, 4754 bp, Oryza sativa
  Clone ID: PAT_MRT4530_39557C.1
agcttgccaaccgctactgggttcgccttcttccttaggacgagatgaccaggcatcagctccgtgggtcgaactttttgttgtaagttgccgaagtgcttgtggtgtacttgtgcatgtgctcgagtgcttcgactcttactccttccaagagttcgagcgatacttcgcatccctcttcgcccccagagaacatcacccttggtgagttagcccctagctttactggggtcattgcctcatcgccataaaaaagcataaacgggctaaacttggttggtcttgtgggggtcgttcgaagggcccagagaactgatagcaattcctctggccatttgcctttcgctgccccctcgagtcttttctttagtgcttctaggatcttgccatttgtacgttcggccgccccatttgactgcgggtgtgcgaccgacgagaacctgatttccaggttaagcccttcgcacatttctctgaacttatcatagtcaaactgcttgccgttgtcagtaataaactcttttggcactccgaaacggtaaacaatgtttttccatacaaacttctgtactgctgccgaagtgattgccccaaggggttcggcttcaatccatcgagagaaatattccacagctacaattgcgaatttatacccgtttcgcgccaccgggaatggcccaatgatgtccagtctccatctggcgaagggccatactggtgcaatgggctgcagatcatactggggcgcggcttggcttcggccatgacgctggcaactttcgcacttcttgatttgctcaacacagactttcaacacagtgggccaataaactccttgtctaaatactttggaggccattgttcttgcagcctagtgcacgccacatagaccctggtgtatctcctttgccatttcttcgccttcggcaaaagagatgcaacgaagtaaaggttgaagtaccccaaagcggtaaagctgacccgagaccatcttatacttcgtggctctgagttgcaaatgcttcgcttctgcttcgtctaccggaagccagccagtttcaaggtgtttcacaaatgaggttcgccagtcatatgggtcttcgcccagtttctcctggtcgattgccatgacttccaagctgtccatgggcacacttggagcatgtaggactttgaaaaagatgccaggcgaatgtgggccaccacaagcagcagatttcgccaaggcgtctgcttcctcgttctggtctctaggcaagtgttcgaccgttatgccggtgaagcatttttccatggaccgaacagcctccagatacctcttcattccctctttttttacctcgaaggatttgtcaacatggcctgctaccaacttggagtcagttcgaattagcaggcgccggactcccagtgctttcgcctttcttaggcccaggagaacggcttcgtattctgctgcattgttggttgtgtcgaactgcagtcttgctacgtaccgaatcggcacaccattcggcaaaaataggactgccgcaatgcctgctcccctgtgcgaccacgagccgtctgagcacatcacccagaattgttcatcgggctcggggtcgggggcaagtaccggtgtccattcagctacgaagtcggctagcatttaagacttgatagcagagcgtgcaacaaaatttaagtcgaacggggatagctctgtcgcccacttgctgagccggccagtgacttccttgcctcggagtatttcgcccaagggatactgtgatggcactatgactttgtgggcctggaagtagtgcttaagcttgcgcgatgccatcactagggcgtcagtgagcttttccatttcaatgtaccttgtcttcgctccttgcagtgcttcggagacgaactacaccggtttttgtccgaactctgtttcttggacgagggcagcactgactgccaccggcgaagctgctaagtataatagcagttcgcttcctgggggtgggcttatcagaactggcgggctttgcaagtattgctttagcacgtcgaatgctgcttggcactctggtatccaattaaactttcctgcgcctcggagggtcttgaagaagggcaaacctctttcggctgcaaggaaacccaacaacttgcctgcgcggacgccgaaaacgcacttctccggattcaaccttgtgcctgctgtgcgcaagctgtcgaatgtctcctgcaggtcgatcgcatggtcgaaagccttgcggctttttacgatgatgtcgtcgacataagcttccacattctgccccaactgcttgccaaggaccttgtacaccagcctggcaaaagttgctcctgcgttcgttaagccgaaaggcatcctgaggtgacaaaatgtgccgaatggagtgatgaaggatgttttggggatgtcgagcgggttcatgtggatctggtggtaaccggaatatgcatccaggaaactcatgagctcgcatccagctgttgaatccacgagctggtcgattcgcggcaaggggaagtcgtcatttgccgttcaggtctgtgaaatcgacacacatgcgccatttgccgtttgacttccgcaccagcactggattcaccaaccactccggatggtcaatctcttggataacccccgccctgagcaatttttgtacttcggctttcgccgcttcttggcgatcggcagacatcttgcgcaacttttgttttcttggcttaatgtccggcttgactgctaggtgatgcatgataagatccaccgggacaccccccacctcgttagggctccaggcgaagatatcgatgttctttttgagcacctctaggatactctcaacttcttcttcgcccatgtcgcccccaagtgatacgagctttgtggggtcggcatcatcaatctacacttttgttatcttgccgtgaggggtgggctttggtgtgtgcttcggccgttcatgcggttcggtctcaacactgtgcactgctctgttgattatggctagatcgcctttcgaagcggccgaaggctgaagccccttgactactatcacccctgtcgggccgggcatcttgagcttgagataattgtggtgggaaatggcttcgaacttgttcagggttgcacggccgaagatggcgttgtagttgtacgggatgtcgacgacgtcgaacagtatttgctcttcgcgtctattctcccccgagccaaaggctatcagcaaaagtgtttggccgagaacttgaactgcttctctgctgaaaccgcggagcgatgctggtgctggggtaagggcttgggtaggcaaccccatcttggcatatgcttcagcgaagataacatcggccgaactccctccgtcgaccaggattcgtcggacttcgaaaccagctatctcagctgagattaccaggggatcttgatgcgggaaaataactccttctgcgtcttccggcccaaaagaaattagctggttcagatacttcttgtgggctggctgctgatggttgctcgcttgctgggcatcgaactccttgcggagggcttgcacttcttcgaccgccatcacagctttgctcgcatggtctgttctgaactttctccaagttatgggggcttggctttgccttggcggctgtccttggatcgccggctgagactggcgaacgaagaggggaggtggttcgacaacttgaacttgtgcttgagcttgagcagcggcgatggaggctttgtcatactcagcttgtatagcttgctgtcgcttggaattctcctcgccccttgcgaacccgtcaatgatgcgaagtaggtgctcgagcgtctgaggctccttgttggtgatttttcttgtgagttcgtcctcgagcagaccggccgaagtggcatttataaccgacgcctcggttatgtcttgaacttggcaccgggcttgcaagaagcgacgcatgtactcccttatcgactccccctgcctttggcgaatgccaagtagatgttgttgcgtcttcggctcctcgttggtgcctcgaaagttaaggacaaaaacatcgtgcaattgctcccatgagtaaatgctattggctggtaaattgaaataccaagaacgggcgatgccgtctagagcgagatgtattaccttcgctttggtatttttgtcaccatgagctgcttcgatcgctgactcgtagatggagaggaactccttcgggtcagtttcgcctgaatagcgcgggacgggtgggaacttaaactggggtgggattggacgagtcttgattcccccacacagcggtagccctttttcgcctcccgccctgtttaccgcaccctactgcgggtacggtgtggcgaagggcgaaatcgcagcttgtgcgtgtggttgggccatggcattcggctgcccggctccaactggaggtacttgctgagccgccatggatgggtcaaaaattggctgtgaccacatcatggcagcttggattggtgcttggtttgttccgaagcctggagttggagcttgctgccgaacggttggcgcctgagcagcgatgatgaagtcgaactgcggtccctgattccacagcgaaactctcaggcccggctgaatcggtggcaaccaattaggcgcactttgacttgtatttccagtcgggaaacctgtcgtgccagctgcattaatgaatcggccaacgcgaaccccttgcggccgcccgggccgtcgaccaattctcat

SEQ ID NO: 35659 - DNA, 5807 bp, Oryza sativa
  Clone ID: PAT_MRT4530_39558C.1
agcttgccaaccgctactgggttcgccttcttccttaggacgagatgaccgggcatcagctccgtgggtcgaacttttttgttgtaagttgccgaagtgcttgtggcgtacttgtgcatgtgctcaagcacttcgactcttactccttccaagagttcgagcgatacttcacgtccctcttcgcccccagagaacatcacccttggtgagttagcccctagctctgctgggggtcattgcctcatcgccataaagaagcataaacggactaaacttggtaggtcttgtgggggtcgtccaaagggcccagagaaccgatagcaattcctctggccatttgcctttcgctgccccctcgagtcttttctttagtgcttctaggatcttgccatttgtacgttcggccgccccattctactgcgggtgtgcgaccgacgcgaacctgatttccaggttaagcccttcgcacatttctctgaacttatcagagtcaaactgcttgccgttgtcggtaatgaactcttttggtacttcgaaacgacaaacgatgtttttccatacaaacttctgtactgctgccgaagtgattgccccaaggggttcggcttcaatccatcgagagaaagattccacagctacaattgcgaatttatacccgtttcgcgccaccgggaacggcccgatgatgtccagtccccatctggcgaagggccatattggcgcaatgggctacagatcatactggggcgcggcttggcttcagccatgacgctggcaactttcgcacttctttacttgctcaacacagactttcaacacagtgggccaataaactccttgtgtaaatactttggaggccactgttcttgcagcctggtgcgtgccacatagcccctggtgtatctcttttgccatttcttcgccttcggcaaaagagatgcaaggaagtaaaggttgaagtaccccggagcggtaaagctgacccgagaccatcttatacttcgtggctctgagttgtaaacgcttcgcttctgcttcgtctaccggaagccagccagtttcaaggtgtttcacaaatggggttcgccagtcatatgggtctttgcccagtttctcctggtcgattgccatgacttcggagctgtccatcggcacacttggagcatgtaggacttcgaaaaagatgccaggcgaatgtgggccaccacaagcagcggatttcgccaaggcgtctacttcctcgttctggtctctaggcaagtgttcaaccgttatgccggtgaagcatttttccatggaccgaacagcctccagatacctcttcattccctcttcttttgcctcgaaggatttgtcaacatggcctgctaccaacttggagtcagttcgaattagcaggcgccggactcccagtgctttcgcctttcttaggcccaggagaatggcttcgtattctgctgcgttgttggttgtgtcgaactgcagtcttgctgcgtaccaaatcggcacaccattcggcgaaaatagaactgccgcaatgcctgctcccttgtgcgaccacgagccgtcagagcacatcacccagaattgttcggcgggctcggggtcgggggcaagtaccggtgtccattcggctacgaagtcggctagcacttgagacttgatggcagagcgtgcaacaaaatgtaagtcgaacggggatagctctgccgcccacttgctgagccggccagtgacctccttgcctcagagtatttcgcccaaggggtactgtgatggcactatgactttgtgggcctggaagtagtgcttaagcttgcgcgaagccatcactagggcgtaagcgagcttttccatttcagtgtatcttgtcttcgctccttgcagtgcttcggagacgaagtagaccggtttctgtccgaactctgtttcttggacgagtgcagcactgaccgccaccggcgaagctgctaagtataatagcagttcgcttcctgggggtgggcttatcagaactggcgggctttgcaagtattgctttagctcgtcgaatgctgcttggcactctggtgtccaattaaactttcccgcgccccggagggtcttgaagaagggcaaacctctttcggccgcaaggaaacccaacaacttgcctgcgcggacgccgaaaacgcacttctccggattcagctttatgcctgccgcgcgcaagctgtcgaatgtcttatgtaggtcgatcgcatggtcgaaagccttgcggctttttacgacgatgtcgtcgacgtaagcttccacattccgccccaacttcttgccaaggaccttgtacaccagcctggcgaaagttgctcctgcgttccttaagccgaaaggcatcctgaggtgacaaaatgtgccgaatggagtgatgaaggatgttttggggatgtcgagcgggttcatgtggatctggtggtaaccggaatatgcatccaggaaactcatgagctcgcatccagctgttgaatccacgagctggtcgattcgcggcaaggggaagtcgtcttttggacacgctttgttcaggtctgtgaaatcgacacacatgcgccatttgtcgttcgacttccgcaccagcactagattcaccaaccactccagatggtcaatctcttagataacccccgccctgagcaatttttgtacttcggctttcgccgcttcttggcgatcggcagacatcttgcgcaacttttgttttcttagcttaatgtccgggttgactgctaggtgatgcatcatgagatccgccgggacaccccccacctcgtcagggctccaggcgaagatatcgatgttctttttgagcacctctaggatactctcaacttcctcttcgcccatgtcgccccccagtgatacgagcttcgtggggtcggcatcatcaatctgcattttggtatcttgccgtgaggggtgggctttggcgtgtgcttcggccgttcatgcagttcggtctcaacactgtgcactgctctgttgattatggctagatcgccttttgaagcggccgaaggctgaagccccttgactactatcacccctgtcgggccgggcatcttgagcttgagataattgtggtgggaaatggcttcgaacttgttcagggttgcacggccgaagatggcgttgtagttatacgggatgtcgacgacgtcgaacagtatttgctcttcgcgtctgttctccctcaagccaaaggctatcagcaaaagtgcttggccgagaacttgaactgcttcgccgccgaaaccgcggagcgatgctggtgctggggtaagggcttgggtaggcaaccctatcttggcgtatgcttcggcgaagataacattggccgaactccctccgttgaccagaattcatcggacttcgaaaccagctatctcagctgagattaccaggggatcttgatgcaggaacataactccttctgcgtcttccggcccaaaagaaattagttggttcagatacttcttgcgagctggctgctgatggttgctcgcttgctgggcatcgaactccttgcggagggcttgcacttcttcgaccaccatcacagctttgcccgcacggtctgttctgaactttctccaagttatgggggcctggccttgccttggcggctatcctttgatcgccggctgagactggcgaacagagaggggaggtggtttggcaacttgaacttgtgctttagcttgagcagcgacgagggaggctttgtcgtactcagcttgtatagcttgtcgtcgcttggaatcctcctcgccccttgcgaacccgtcaatgatgcgaagtaggtgctcgagcgtctgtggctccttgttggcgatttttcttgtgagtttgccctcgagcagaccggccgatgcggcgtttataaccgacgcctcggttatgtcttgaacttggcaccgggcttgcgagaagcgacgcatgtactcccttatcgactcccccggcctttggcgaatgacgaggaggtgttgctgcgtcttcggctcctcataggtgcctcgaaagttaaggacaaaaacatcgcgcaattgctcccatgagtaaatgctattggctggtaaattgaaataccaagaacgggcgatgccgtctagagcgagatgtattaccgttgccttggtattttcgtcaccatgagccgcttcgatcgctgactcatagatggagaggaactccttcgggtcggtttcgcccgaatagcgcggtacgggtggaaacttgaactggggtgggattggacgagtcttgattcccccactcagcggtagccccttttcgcctcccgccctgtttaccgcaccttgctgcgggtacggtgtggcgaagggcgaaatcgtagcttgtgcgtgaggttgggccatggcattcggctgcccggcaccaactggaggtacttgttgagccgccatggatgggtcaaaaatcggctgtgaccacgtcatggcagcttggattggtgcttggtttgttccgaagcctggagtcggagcttgctgccgaacggttggcgcttgagcagcgttgacgaagtcgaactgcggtccttgattccacggcgaaactcccaggcccggctgaatcagtggcaaccaattaggcgtaccttgacttgtattcccctccgggtgggccgatggggttgtagttgaaatgcagtggggttggttgagtcgctgaaggaaagcttggagttgcgcctgcagagccgaagccccttccaccactgtttgtggcgcttggccaggtggttgatggtgtacttgggcagcgactagttgagcttgcagttgcacgtgaggggccagatgcacagctacggccggttgctgcccggcgaagtacaccggcgcttgagcggcttgtggcggaaagggctgggtcgtcacttgcggatggacttgaggtgggacataacctgccgaatactgaaggattggagccgacgtggccttggtccgtcttgccgcctcgtatgcttgttgttgtttttgcatttggcgaagcatgtcttggagccgtgtcatgttctgtcgcatggcttccatgtcggcttcggcttgtgcttcggggtcagggctgacttgggcctgcacaacggcgagcgcaattggggccactgccggctgcgatggagtggcttggggcaccaccggttggcttgtcgaaaggatctccgccctggtctggagtgcccttgccgccgcagccgccttcaccacgtcgaccgcgttcggcacttgcatagaggttgcaggggccgaaggcggttgtgatggcgcttgtcctcctccatcttcagccacgggcgccgaaggctctgctccttcctcggcggccatgtccggtccggcgtcgctttccttccgcctggtaaccttctccttcacgaccctcttcggtggcattcgctcttagtggtttcgctcggaggtccccacggtcggcgccagctgttgtcgaaacgacaaatgattacccttacgaaagggacatttataggggtacataatgttacaggggctcatgggcccctgatgggtcgtctagcgatcgccggccctatagcccttaggcttgatgggccggaaaggcttcctcggccctcgcgggggcgaacttgccatggcgaagtcgtcttccttcggcaggtagtcttcgccttgcacccttcgcctgaaacgcctctggcctggcaaggcactcgtacgactcttcgcctcacgccgttcttactccatagccttcgccac

SEQ ID NO: 35660 - DNA, 464 bp, Oryza sativa
  Clone ID: PAT_MRT4530_39559C.1
tagtagttgttggtctgtacgaggatgtgaaggggcgtgttgaatacttcctagaccagcctggcgatgacggcgacagggacgtccaacaacttgttggcgacaaggaggggaggtggacttggcgctgcaacgaatttacatatcttactcctagatacattcggcggaagtggttatgaatgaaggctaacacatggttcagggcgcttaataaattaacgcaggctggccgttaggatgtctggaaaaatcatctatattagtaagcactatgtttacatgagggcattggccgggtttgagtaaactatttttgagtcgcttaggaaatcgaattgcttattatcgtgattgactatgagcttgcgcactggcattgttatccctgaaatgggagaagtgccataaggggtaaatgttcggatgctatttacccagcctgctaagtatgtattggcctt

SEQ ID NO: 35661 - DNA, 174 bp, Oryza sativa
  Clone ID: PAT_MRT4530_3955C.1
atgatctttccacaggataaaataaatacgatacccttggaatactctccggtgaaatgctacaatggtatattcgtacgcttgcggatgaactctgtaaccataatataccaggagtatttctgcaccattgctgagaattatatttctagtaatgtcgttaagaaataccaa

SEQ ID NO: 35662 - DNA, 1948 bp, Oryza sativa
  unsure (1)..(1948): unsure at all n locations
  Clone ID: PAT_MRT4530_39560C.1
ttttttttttttttttttttggcactcacaacanaaccacatgggcatatctaccaaccattttggcattaagggtatgtgcagtttcgcataaacagtcgggtaggatgcacctatgcctccgaaatgatgtnnggggcaatcattaggaggatccatgggtgtaattaaattaaccaaagctagcttactttggaggaaaaatatatagaaaagggtctatcagcatccagttaaaacctcagtgcaaacatccacaagggaaatctggtacctacagctccttttcacctatatccattttcacatgtcaatctacaggaaagatcaattcagattgcacaacaatgttcagccaagccactcagccccccaaccaagttccaccaactagaccaggattctctagttatttcacgttcggcttgggtgagtagcggaacggggaagcacgggggccatcggacaggctcctcatcggttgctgcccgttccgagcaaatgaaccctgcaccttaagggcatggctcctaccattcatgctgcttgagtgcgccattctctcagcttgcattgtctgatagaagtacgaggagctagccatgtccttgaggttgagcagtggcttgagaacctctaccacttggctcatcagtggccgggctttcgggtcccggttgagacaagcacgtgctaactgtgctgccttctgggcacctttgaccgagaagttaccctccaaacgagggtcaattagcttgtagaagcgctgcctttctcctaggagggggcgtgcccactcaacaaggttgtgctcaccatttgggcggttcttgtccattgacctgcgccctgacatcatctcaagtagcaccacaccaaaactatagacatcactctttgatgtcaaatggcctgtcataacatactccggagctgcataaccatatgttcccattactcgagtagacacgtgagttttgtcacctacagggccatctttggcaagcccaaaatctgagagttttgcattgtaatcagcatctagcagtatattagatgttttaaaatcacggtaaataactggtctttctgcttcttcatgaaggaaagcaagaccctttgctgctccaagagcaaccttcattctgatggaccaagggagaggaagagaccttctgaatagatggttatctaaacttccacgaggcatgaattcataaaccagcaatctttggtcatcttcaacacaatatccaatcagcctcaccaaattgggatggtgaaggttacctaggaaatcaacctctgccacccattctttgtgcccttgaagcccatcatgattgagtgttttgacagcaactgtaaggcctgtaccaggtttcataggtgcagttccattctcttcaatccaccctttaaaaacacatccaaaacccccctctccaaggatactctcaggcctgaagttccgggtggcacattttagatcattgaatgcaaacttgcgcaactgtgaggcaacttttatttcctctccagctttagatgctgatgaactgctctcagcattactagtagttgttgagcctgagactactgatacaactggatggttcctgctaccattttcggttgacttttctgcgccgtgcgtgctggcgctgctggtggaggtgtccaccttggaccgcggcggcggtgggcagctccccatcggccacagccggatgcagcacccggtggccaccgtggcgtcctccccgccaccgccgccgccgctgcccttccgtggcagccgccgcctgctgctcccgctgccgctgccgctacggctcccgctgcggctccggctgcggcggcaccacccccacctctccctctcctcctccccggagctctcccacccgtcgaactgccccagctccggcggcgccacccccat

SEQ ID NO: 35663 - DNA, 236 bp, Oryza sativa
  unsure (1)..(236): unsure at all n locations
  Clone ID: PAT_MRT4530_39561C.1
cntcaacctctcctctntnctccgctccgctccgtcctcccgttnattcgctcgcngcgccgcgccccgcccgcgcgctgagatccgaacggccgcccttcccccccgccgagatcgatctccacccccccacgaccgctaagacggggccgacgaggcgggagccatggaggcgtcttcttgggacgcccttcgcaagcaggcaaggaggttggaagctcagttagatgatcaan

SEQ ID NO: 35664 - DNA, 137 bp, Oryza sativa
  Clone ID: PAT_MRT4530_39562C.1
tcgtttatatcctaagcgtcattttgtgctggggggtcatgtagaccatgggagggtggcgccaacctctacaagccacaagaacatgtctgcggctgagagtccctcaaagctgagacgtactttcctatctgcat

SEQ ID NO: 35665 - DNA, 222 bp, Oryza sativa
  Clone ID: PAT_MRT4530_39563C.1
cgcggcgccttcgcacgactccgattcgccagcggcgtctctcccggcatcgtctctcctccgtcgccctacttactctctcgcgttggttcgtgagcagccttctctcgccactggggctcaccaacaacctcgttcacagtcactgcccaaagcgtcaccacgctcgctagctctagtcggaactgctctctccctgtcagtccaccgtcttacgtaatg

SEQ ID NO: 35666 - DNA, 1184 bp, Oryza sativa
  Clone ID: PAT_MRT4530_39565C.1
gagctgcttcaacctttcaattcaagatcttgagaagtcactgacgaacaatgtgaacttaaaattcttgtacagaaacattccgtaatttatacacagattatccagttgcgttgctaattacactggtacaacagaacgctatgaatgtgtcatgaaatcatgatccactgattagagcacacacaatggcacatcgacagtttcagacaactggtaggcagctactccgttttgtcatcagagttgatctgctgcgccagcaacagcagcccgattgatgtgaaaacagagagggcagtagatgtgtagccaagaacaagcagtgagaccttgagtgacttggccatctgcaacgcgttgtcgtttgcgtactgcattgagccgtctggaatgttttgtataccacgtgctagttgccatgagagaaatccgaaaacaagtccaactgcagctccaatatttgccttttctgctgtcaactcaaactcaagttctaaaaacttcaatttcctttttactttcatagcctctacttcagattgaactactggacgttttgatagcagcttaccggttttgctcattgtttcagcaatcttcttcagctctcccttgccgtattgtcccatggacgtaaacctccttccagctgacatcagccgcttgccaaatgctgatttggcactgccggtcaagtagggttccattgaaggaagttgcttgacaaggttgtttgatgtcgatgtgtcagccatctcccatgcctttgcaaggttgagcagcagatcacctacctcttggccacactcgtcaagaacaggcccattggagagatcaaatgccgcatcattgagatcgaggcgaaggtcgcggggaagctgggacaggaatttgggcgggagaaccaagcaatccgcgagttcttgcaagaggggaaggacaggctcctcgtcggggttgtcaccgccggtagaagaggaggtaaccggctttggggagtcggaggagacggcgaatacagggggtgggtatctacatcgccggagatggaagcgggaggggcggaaggaggaggaggtggaggagacggcggcggcggcggcggcggcggcgaggagtgggcggcggaggacggccgtggccattcgaaaacgctctgcttttttttcacctcttttttt

SEQ ID NO: 35667 - DNA, 248 bp, Oryza sativa
  Clone ID: PAT_MRT4530_39567C.1
agaagtacactaggtttgattgtaaactccttaattcttgaacctacttttggtcacacaacacatattttgctgctaaacacttcacatttcaaccactgttgtaatatgattcaactgtgcttgtaagctgatttttgccttttgcacacattttgtctccgatggtttgaaaattgttctaagggcgatatttaatatgggccatcttaaggtgatgtccaaaaaaaaaaaaaaaaaaaaaaaaa

SEQ ID NO: 35668 - DNA, 1188 bp, Oryza sativa
  unsure (1)..(1188): unsure at all n locations
  Clone ID: PAT_MRT4530_39568C.1
catggtgcagcttcattaggaagctaaaacaggcattggctgtttatcaatctacaaagctgtgcactgaattggtgcacaaatatttttaagaatttcagggtagaacacagtcaatgcaaaccttccttgaattaactgaatagtttaattgtccaagcatctttctcctactggggctcaagatgtgttccaggatattgcaccctcatggttgnagtagttttttggtatttctgattcaaaagcaccgtttgtggggttgacatacattttgccggccgtgaatcgctctcgttccccatttcgctttggaggcggcgacggcgagaggcgagaggagatggcggcggcgcgggggcagaaggcggtggcggcgctgccgcatctggtgaaatcgctgcgcagcgagcccgtctccaacgccccgaggctccggcacctcccgtccctcaggaggaccttctctctctacgatcagatcaacctcatcgatagcgtccccgaagaccagctccgattccaatcatatgatgacaccggattcaatattaacaaagtaaagtatgaaggaagcttgttgatagtagaaaacaagataatgacatgggcacccaaatcatttgcagagataacagctgaaagtttatcaatcttcaaagtagtgcaccctatcccagagattctgattcttggttgtggtagacacatccaaccaatcagtcctgagctccgcaaattcattcggtcaactgggatgaagctggaagcagttgattcgaggaatgcggcttcaacatataacattctgaatgaagaggggaggccagtcgcggctgcacttcttccttgcggagtcacttcttgaaacacgagtgttacatttgtggtggtgagcgtcttctccttccagtcgatactcgatagagttgaaatgaagcatattgtcgcatgggaacactgaaaatctgtaacattaacaagtgccgttgccctgtccttttccttttccccacccaagaacccaaccccctaggagagatcacacctttggttttgtgggttcatctcctggtaatcgcggggggacaaggtttttgacctagtagtatacatcagaataacgagtttgaaccnaaaaaaaaaaaaaaaaaaaaaaaaaaaaaaaccaccaccctccgggttttt

SEQ ID NO: 35669 - DNA, 849 bp, Oryza sativa
  Clone ID: PAT_MRT4530_39569C.1
atggcgtccgccgagacccccaaccccgacgccgaaatccccaacaccgacgccgccgccgccgccgacccagctgccgccgccccagctgccgccgccaccgaccccgccgccgctggatcgccgtcgcccccgctcccgccacgcaaacgccgcctctcccctacgccctcccccacccgccgctcctcccgctcccgctcccgctccccgcgccgcggccgcagccgcagccgctcccggagcaggagccgcgggcggagcgccagcccgcggtaccccgatgggaagcggaggcggcacaacgacctcaacgtcgaggtgtgccgcgacttcctccgcgacaggtgcgcccgcgccgacatcgagtgcaagtacgcgcacccgcaccccaccgtcgccgtcgacagggacagcaaggtgacggcgtgcgcggactcgctgcggaacaactgcttccggggaaggacctgccgctactaccacccgccccctcatatccaggagtcattattgagatcaattggtgtggaagacccaaaggtgaagatggtttgcagagattttacacgtggacgatgttcaagatcagcaaacgagtgccgattcttgcaccattcaccccttgaggattgtgcaattgtttgccaagatttcttgcgtgggaggtgtgatcgtaaatcatgtagatactctcatgttatggcccatccaatgccacccccaatgagggatattcccatgcaataccctgatatgccttttctggtaaatgaagttttgagtgtctaccctattctgttgctattttggcaagcttttgatcgttgctcttctgcaggctactaa

SEQ ID NO: 35670 - DNA, 1201 bp, Oryza sativa
  Clone ID: PAT_MRT4530_3956C.1
atgatgccgagagacatgtggattcgccggggtggtgtcgaagaggaccccctgggcttcctggcacagtatggtctgggacctaacctgttgttggtctgggacccctctcgtcggcatatgattcttggtcccaccgcggctgcgctcctcccctgcacgctccgcggcatctttgtccagatcggcgtgccaactctcagcggcttcttcgcccgcccctcgccgtcggcagggacgaagacgacgaggccacccatccccggcgccctccacctggactacctcgacaccgacgaaatcgaaaaatcccttctcaccataatcgaccactgcaacggcctcatcctgctcgaccaccacgtcgtcaacccagccacccgccaatggacgcgccttctcccttactcgccgccggagtcgtcgccgccgggcagcgaaatcatcctcgacggctatcacgccctcgtctttgaccctcatcgtgtcgccgccgcactaccagttgttcttgatgccctacgtcctcggacgacgagccacgcggccatgcacctcttacccgacgacgtcctccgccacctgccgcgacgcagcctcgctgcctcacgctgcgtctgtcagtcctggcgcgtcatcatagacgaccgctccctgctcgccacggccgcgctcctcccctgcacgctccgcggcatcttcgtccagatcggcgtgccaactctgagcggcttcttcgcccgcccctcgccggcggggacgaggaggccacccatccccggcgtccttgacctagactacctcgacaccaatcaaatcgaaaaatcccttctcaccatagtcgaccactgcaacggcctcatcctgctcgaccaccatgtcgtcaacccagccacgcgccaatggacgcgccttctcccttactcgccgccggagtcgtcgccgccgggcagcgaaatcatcctcgacggctatcacgccctcgtctttgaccctcatcgtgtcgccgccgcactaccagttgttcttgatgccctacgtcctccgacgagccacggtttcaggccagtggccgccttcgccattgctcctccatgtcttctcctcgaggacagagccagaggggagtacatggcggtgggaggagagatcattcgtccgggaagggaacgccaccatgggcaccattgatgaggtatag

SEQ ID NO: 35671 - DNA, 117 bp, Oryza sativa
  Clone ID: PAT_MRT4530_39570C.1
ccctgaaaaatttgtacgcaatctagcgaggctctcgtctttgaatcgaatcctctcgcgtccccaagatgcaaatatttgtgaagacattgaccggaaagactatcaccctggagg

SEQ ID NO: 35672 - DNA, 1350 bp, Oryza sativa
  Clone ID: PAT_MRT4530_39571C.1
atgcccagcccgctgaaggagcgacccgccggccgactcggccgcctcctcgccgcgctccgcccggcgcgcgctggcccgctccccgtccagacaggcttccccacctccctcgctgacctcgtcgtcaagaaccatggccgcctcaagaagccctccgcctcggcgtccaggcgcaagaagcgcggcgggccggaggctcccccctcgccctcgccctcgccctcgccttcccctccgccgcagccttcctcgccaccaccaccaccaccatccccgccgcctgcggccgctgtctcggtctcgccgccaacccagccgagaccgagaccggaacttccgccggtggaggccgtcctccgccgccagcccaagggccgcgtgttcggccttgggctggggttcgtctcgctcgtcggcgtggtgtcgctcgccctcctcgtgatctggagcaagaaggtggtcgcggccgtcaccgtcgcctccttctcgctcttcctgctcgagtccgtcaggtcctccgcgctttcccggcggccgcggcggccggcggcgaacaacaagctggatttggacgggcgcggctacgtctcgccgatccgggaggtggagccggcgagggcaagcttctccgattcctccaggcgaagcgagttatccatcctcaccattgaggagagaagcgaggtaggcgacgattcgatagtcgccattgaggagagaatcgcggcaggcggcgacgactcaagcaacgccaaggtcaagaccaagaaacggtcatggaggaagctgattccccgcaagttacagaagggcatgaagggcaaggaggcggaggattcgtcgggttctttccgcagcagcgaaggcaaccgaggtgacgccacggcgacggattcctcggactctcgccgtggaatgcgcaccaaggccgcggacgccttcgtcgccagatcgatggattcttcgccgtctttccgcgggaacggaggcgacacggacgccgacgcttacagcaatgccacgcgggtagaaatcgacgcgccggccgatgtcctcgccggagacggcgacgccgtgggagggacccggtcctccgtcgcgctcctcgtcgttgccgtcgttctcgtaggcctcgtcgccggcaagctcccggccgtcgtgttcaccgtgctttgcggcgtgttcattagctcggttcagagattgccggcgggcggtgacggcaacggcgatcggagctttacatggtggtttaggatcaaacccaaagatgtaaattagtggcagaagaaaggggagagttgagtgacaaaagaaagaagcagcaaatacataaatatttgttct

SEQ ID NO: 35673 - DNA, 246 bp, Oryza sativa
  Clone ID: PAT_MRT4530_39572C.1
atggctggcaagttggaaagcttttggagaacggtgcgggtgactgggttgagtatggatggagttagtaacatgccagaagaggtgcgcacttcaaggcaagaaaagggcagggctggtatcaagtatgagcattgtatggaagtaaatggagcaggggcaccagtgacaggagaatccaaaaacccattgcagcaattatggaagctctcagcacatcagcccaacaaggcctcacaactttga

SEQ ID NO: 35674 - DNA, 592 bp, Oryza sativa
  unsure (1)..(592): unsure at all n locations
  Clone ID: PAT_MRT4530_39573C.1
tccccgggctgcaggaattcggcacgaggcgacaacactcatctctcccctcgcgactcatcgcgttggcggccgccggacctagctcgccgccggccgatttcgcagcggccaccgtcgccgccgccgcccatttcctcctcctccttccttccgccctgtgtacggttcctccgngtattagcgttgcgccaccgtcgccgcctcctgcaccgagaacatcgcgaaaccctatctcctccctcggtcgtcgagcgctcgtcctccgccgattgccctcctcgccgtgaaaagacgccgggacctcctgtgtgactgtgccctcaaacctacggtttcccccccgcagtggccttcaccgatcaatcgatccctctccctcccgcacggtcgcacggaggaggtatgtcccagcaattagacacatcttcatgttcagatgattccgaagataacatcatcgacccagccagcatatacactatagaagaattcatttctgagcaaagcatcatggacaatttgcttgaacggatcactgtgaaaattcaggccacgattgaagctcagaaggctggtacatctcaccatc

SEQ ID NO: 35675 - DNA, 254 bp, Oryza sativa
  unsure (1)..(254): unsure at all n locations
  Clone ID: PAT_MRT4530_39574C.1
ctgcccactctgcctgcccaaacctaccacttcacactgccgccacagcccgcagccacagcgatcgagcccctctccctccgcgagcngtgtgcagcgggcgacgggataactaacaaaaatggcggccgtggtggcggcggtggaggcgggggtngtcgcggtggcgcgcgggcggggcagcggcaggctgctccggggaatctactgggaggctccngagccgggatccngcggatgcagttggagctcgg

SEQ ID NO: 35676 - DNA, 5727 bp, Oryza sativa
  Clone ID: PAT_MRT4530_39575C.1
atggccgccgaggaaggagcagagccttcggcgtccgtggccgaagatagagaagcacaagtgccatcacagccgccttcggcccccgcgccaccacaaccgtcttcggcccccgcaacctcagtacaagtgctgaacatggccgacgtggtgatggcggctgcggcggcaagggcactccagaccagggcggagatcctttcgactaaccaactggtggtgcctcaagccgccccgtcgcagccggcggtgccaactgcgctcaccgttgtacaggcccaaatcagcctggaccctgaagcacaagccgaagccgacatggaagccatgcggcagaacatgacacggctccaagacatgctccgccaaatgcaagaacaacaacaagcatacgaggcgacaaggcggaccaaggccacgtcggctccaatccttcagtatccggcaggctatgcccaacctcaagtccggccacaagtggtgacccagccctctccgccactagccgcacagccgccggtgtacttcaccgggcagcatcaaccacctggccaagcgccacaatcagtggcggaaggggcttcggctctgcaggcgcaactccaagctttccttcagcaactcaaccaaccccactacatttcaagcacaaccccatcggctcacccggtggggaatacaagtcaaggtgcgcccaattggttgccaccaattcagccaggctcgggaccttcgccgtggagtcaaggaccgcagttcgacttcgtcaacactgctcaggtgccaaccgttcggcagcaagttccaaccccaggcttcggaacaaaccaagcaccaatccgagctgccatgatgtggtcgcagccaatctttgacccatccatggcggcccagcaagtaccaccagttggagccgggcagtcgaatgccacggcccaactccacgcacaagcagcgatttcgccctttgccacaccgtacccgcagcaaggtgcggtaaacagggcgggaggcaaaaaggggctgccactgagtggaggaatcaagactcgtccaatcccaccccagttcaagttcccacctgtcccgcgttattcgggcgaaactgacccgaaggagttcctctccatctacgagtcagcgattgaagcggctcatggtgacgaaaataccaaggcgaagcaattgcgcgacgtttttgtccttaactttcgaggcacctatgaggagccgaagacgcagcaacaccttcttggcattcgccaaaggctgggggagtcgataagggagtacatgcgtcgcttctcgcaagcccggtgccaagttcaagacataaccgaggcgtcagttataaacgccgcttcggccggtctgcttgagggcgaactaacaagaaaaatcgccaacaaggagccgcagacgctcgagcacctacttcgcatcattgacgggttcgcaaggggtgaggaggattctaagcaacgacaagctatacaagctgagtacgataaagcctccgtcgccgctgctcaagctcaagcgcaagttcaaattgccgaaccacctcccctctctattcgccagtctcagccggcgatccagggacagccgccaaggcaagggcaagcccccatgacttggagaaagttcagaacagatcgggcgggcaaggctgtgatggctgtcgaagaagtgcaagccctccgcaaggagttcgacgcccagcaagcaagcaaccatcagcagccagcccgcaagaaggtccgaaaagacctctactgcgcctttcacggacgctcttcgcacaccacggagcaatgccgaaacattaggcaacgtggcaacgcgcaagacccaaggccgcagcagggaacaactgtcgaagcaccccgtgaagcagttcaggagcaaacacccccagccgaacaacgccaagatacacaacgaaggatccgcatggtccgcagcatcacttcggcgggtgagggggcaccgcagtacgtgaaccagctgatctctttcgggccagaagacaccaaaggagtcctgttcccgcatcaagatccactggtaatctcagctgagatagccggttttgaagtccgacgaatcctggtcgatggagggagttcggccgacgtgatcttcgccgaagcatatgctaagatgggcttgccaacccaagctcttacactggcaccagcgtcgctccgggggttcggcggagaggcagtgcaagttcttggccaagcacttttgctgatagctttcggctcaggagaaaacaggagcgaagagcaaatactgttcgacgtcgtcaacatcccatacaactacaacgctatcttcggccgtgcaaccttgaacaagttcgaagacatttcccaccacaattatctcaagctcaagatgcctggcccaaccggggtgatagtagtcaaggggcttcagccttcggccgcttcaaaatgcgatctagccataatcaacagagcagtgcacaatgttgagaccgaaccgcatgagcggccgaagcacacgccgaagcccacccctcatggcaaggtaacaaaagtgcagattgatgatgccgaccccacaaagctcgtatcactggggggcgacatgggcgaagaagaagttgagagcatactagaggtgctcaaaaagaacatcgatatcttcccctggagccctgacgaggtggggggcatcccggcagatctcatcatgcatcacttggcagtcaagccgaatattaggccaagaaaacaaaagttgcgcaagatgtctgccgatcgccaagaagcggcgaagaccgaagtacaaaaattactccggccgggggttattcaagagattgaccatctggagtggttggcgaatccagtgctggtgcggaagtcaaatggcaaatggcgcacgtgtgtcgatttcacagacctgaacaaggcatgtccgaaagacgatttccccttgccacgaatcgaccagctcgtggattcaacagctggatgcgagctcatgagtttcctggatgcatattccggttaccaccagatccacatgaacccgctcgacatccccaaaacatccttcatcactccattcggcacattttgtcacctcaggatgcctttcggcttaaggaacgcaggagcaaccttcgctaggctggtgtacaaggtccttggcaagcagttgggccgcaaggctttcgaccatgcgatcgacctgcaagagacgttccacaacttgcgcgcggcaggcataaagctgaatccagagaagtgcgttttcggcgtccgcgcaggcaagttgttgggtttccttgtttccgaaagaggcatcgaggcgaatcccgagaaaatcgatgccatccagcaaatgaagcctccgtcaagcgtacatgaagtacaaaagctcgcaggccgaattgcagcactcagtcgattcctctcaaaggcggccgaaagaggtttgcccttcttcaagaccctccggggcgcgggaaagtttaattggacaccagagtgccaagcagcattcgacgagctaaagcaatacttgcaaagtccgccagctctgataagcccacccccaggaagcgaactgctattatacttggcagcttcgccggtggcaatcagtgcagcactcgtccaagaaacagagtccggacagaaaccggtctacttcgtctccgaagcactacaaggagcgaagacaaggtacattgaaatggaaaagctcgcttacgctctagtgatggcttcgcgcaagcttaagcactacttccaggccaacaaagtcatagtgccatcacagtaccccttgggcgaaatactccgaggcaaggaagtcactggccggctcagcaagtgggcggcagagctatctccgttcgacttgtattttgttgcacactctgctatcaagtctcaagtgctagctgacttcgtagctgaatggactccaatacttgcccccgaccccgagccggccgaacagttctgggtgatgtgctctgacggttcgtggtcgcacaagggggcaggcgttgcgacagtcctcttttcgccgaatggtgtgccaattcggtacgcagcgagattacagttcgacacaaccaacaatgtagcagaatacgaagccgttctcctgggcctaagaaaggcgaaagcactgggagtccgacgcctgctaattcgaactgactccaagttggtagcaggtcatgttgacaaatccttcgaggcaaaagaagagggcatgaagaagtatctggaggctgttcggtccatggaaaaatgcttcaccggcataacggtcaaacacttgcctagagaccagaacgaggaggcagacgccttggcgaaatccgctgcttgtggtggcccacattcgccgggcatctttttcgaagtcctgcatgctccaagtgtgcccatggactgctccgaagtcatggcaatcgaccgggagaaacggggcgaagacccacatgactggcgaaccccatttgtgaaacaccttgaaacaggctggcttccggtagacgaagcagaagcgaagcgtttgcagctcagagccacgaaatataagatggtttcgggtcagctttaccgcacaggggtacttcaacccttacttcgttgtatctcatttgccgacggcgaagaaatggcaaaagagatacaccaggggctatgcggcgcgcaccaggctgcaagaacagtggcctccaaagtatttagacaaggagtttattggcccactgtgttgaaagtctgtgttgagcaaatcaagaagtgcgaaagtagccagcgtcatagccgaagccaagccgcgccccagtatgatctgcagcccattgcaccaatatggcccttcgccagatggggactggacatcattgggccgttcccagtagcgcgaaatgggtataaattcgcaattgtagctgtggaatatttctctcgatggattgaagccgaacccctaggggcaatcacttcggcagcagtacagaaatttgtatggaaaaacattgtttgccgtttcggagtgccaaaggagttcattactgacaacggcaagcagtttgactttgttaagttcagagaaatgtgcgaagggcttaacctggaaatcaatttcgcgtcggtcgcacacccgcagtcaaatggggcggccgaacgtacaaatggcaagatcttagaagcactgaagaaaagacttgaaggggcggcgaaaggcaaatggccagaggaattgctatcggttctctgggctcttcggacgacccccacaagaccaaccaagtttagcccgtttatgcttctttatggcgatgaggcaatgaccccagcagagctaggggctaagtcaccaagggtgatgttttccgggggcgaagaaggaagcgaattatcgctcgaactcttggaaggagtaagagtcaaagcgctcgagcacatgcacaagtacgccacaagcacttcggcaacttacaacaaaaaagttcgacccacggagcacatacctggtcatctcgtcctaaggaagaaggcgaacccagtagttggcaagcttgaatcaaagtgggaaggaccatacctcatcaagcgcaagtccaggacgggatcttttcgcctagcgacactcgaaggcgaggagttcgaccattcctggaacgccgcctccctcaagcgcttctatgtctag

SEQ ID NO: 35677 - DNA, 387 bp, Oryza sativa
  Clone ID: PAT_MRT4530_39576C.1
atggcccatcgtctcctccttatcgtcctcgtggcttccattcttcatacggtgtcctcagcgacggtgtacgatgtcctccaacagaacaatctgccacgtggtctcatcccacaaggagtgacgtcgtacgtgctccaccctgatggccaccttgaggtgaccttgcctagcgagtgcaactttgccgtcaccgtcggaggctcgccgtacaagtttcgctttgacagcaaattcgtgggactcatcaagtcagggtctatcagcgagataaatggtgtgagggttcaggtcgaccatgctggtaaccagctgacgttcaaggtcggcaccagcagcatctccttccccatcagtgatttcacaagcagccctgtctgtggctga

SEQ ID NO: 35678 - DNA, 4878 bp, Oryza sativa
  Clone ID: PAT_MRT4530_39577C.1
ttttttttttttttttttttccttgccgaaaggcttacatagtgccgaagggcttacatgacggtatgtacatttttacaagttggcgattgggtgccacccattctagacatagaagcgcttgagagaggcggcgttccaggaatggtcgaactcctcgccttcgagtgtcgctaggcgaaaagatcccatcctggacttgtgtttgatgaggtacggtccttcccactttgattcaagcttgccaaccgccactgggttcgccttcttccttaggacgagatgaccaggcatcagctccgtgggtcgaacttttttgttgtaagttgccaaagtgcttgtggcgtacttgtgcatgtgctcgagcgcctcgactcttatcccttccaagagttcgagcgatacttcgcgcccctcttcgcccccagagaacatcacccttggtgagttagcccctagctctgctggggtcattgcctcatcgccataaagaagcataaacgggctaaacttggttggtcttgtgggggtcgtccgaagggcccagaggaccgatagcaattcctctggccatttgcctttcgctgccccctcgagtcttttctttagtgcttctaggatcttgccatttgtacgttcggccgccccatttgactgcgggtgcgcgaccgacgcgaacctgatttccaggttaagccctttgcacatttttctgaacttatcagagtcaaactgcttgccgttgtcagtaatgaactcttttggtattggagcatgtaggacttcgaaaaagatgccaggcgaatgtgggccaccacaagcagcggatttcaccaaggcgtctgcttcctcgttctggccgctaggtaagtgttcgaccgttatgccggtgaagcatttttccatggaccgaatagcctccagatatctcttcattccttcttcttttgcctcgaaggatttgtcaacgtggcctgctaccaacttggagtcggttcgaatcagcaagcgccggactcctagtgctttcgcctttcttaggcccaggagaacggcttcgtattctgctgcgttgttggttgtgtcgaactgcagtcttgctgcgtaccgaatcggcacaccattcggcgaaaagaggactgccgcaacgcctgcccccctgtgcgaccacgaaccgtcagagtacatcacccagaattgttcagcgggcttggtgtcgggggcaagtaccggtgtccattcagctacgaagtcagctagcacttgagacttgatagcagagcgtgcaacaaaatgcaagtcgaacagggatagctctgccgcccacttgctgagccggccagtgacttctttgtgggcctggaagtagtgcttaagcttgcgcgaagccatcactagggcgtaagcgagcttttccatttcagtgtatcttgtcttcgctccttgcagtgcttcagagacgaagtagaccggtttctgtccgaactctgtttcttggacaagtgcaacactgactgccaccggcgaagctgctaagtataatagcagttcgcttcctaggggtgggcttattagagctggcgggctttgcaagtattgctttagctcgtcgaatgctgcttggcactctggtgtccaattaaactttcccgtgccccggagggtcttgaagaagggcaaagctctttcggccgcctttgagaggaatcgactgagtgccgcaattcggcctgcaagcttttgtacttcatgtacgcttgacggaggcttcatttgctggatggcattgattttctcgggattcacctcgatgcctctttcagaaacaaggaaacccaacaacttgcctatgcagacgccgaaaacacacttctccggattcagctttatgcctgccgcgcgcaagctgtcgaatgtctcctgtaggtcgatcgcatggtcgaaagccttgcggctttttacgacaatgtcgtcgacgtaggcttccacattccgccccagctgcttgccaagtactttgtacaccagtctagcgaaggttgctcctgcgttccttaagccgaaaggcatcctgaggtgacaaaatgtgccgaacggagtgatgaaggatgttttggggatgtcaagcgggttcatgtggatctggtggtagccggaatatgcgtcctggaaactcatgagctcgcatccagctgttgaatccacgagctggtcgatccgcggcaaggagaagtcgtctttcggacacgctttgttcaggtctgtgaaatcaacacacatgcgccatttgccatttgacttccgcaccagcactggattcgccaaccactccggatggtcaatctcttggattacccctgccctgagcaatttttgtacttcggctttcgccgcttcttggcggtcggcagacatcttgcgcaacttctgttttcttggcttaatgtccggcttgaccgccaggtcatgcatgatgagatctgccggaacaccccccactctcaacttcttcttcgcccatgtcgcccccagtgatacaagctttgtggggtcggcatcatcaatctgcacttttgttatcttgccgtgaggagtgggctttggcgtgttcttcggccgttcatgcagttcggtctcaacgctgtgcactgctctgttgattatggctagatcgcttttcgaagcggccgaagactgaagccccttgactactatcacccctgccgggctgggcatcttgagcttgaggtaattgtggtgggaaacggcttcgaacttgttcagggttgcacggccgaagatggcattgtaattgtacgggatgtcgacgacgtcgaacagtatttgctcttcgcgtccgttctcccccgagccaaaggctatcagcaagagtgcttggccgagaacttgaactgcttctccgccgaaaccgcggagtgatgctggtgctggggtaagtgtttgggtaggcaactccatcttggcatatgcttcggcaaagataacgtcggccgaactccctccgtcgaccagtattcgtcggacctcgaaaccagctatctctgctgagattaccaaaggatcttgatgcgagaacataactccttctgcgtcttccggcccaaaagaaattagctggttcagatattgcggcgccccttcgcccatcgaagtgatgctgtggaccatacgggtctgcatcttcttttgccgcttggacaacttcttgcgggctggctgctgatggttgcttgcttgttgggcgtcgaactccttgcggagggcttgcacttcttcgacagccatcacagccttgcccgcccggtctgttctgaactttctccaagtcatgggggcttggccttgccttggcggctgtccttggatcgccggctgagactggcgaatagagaggggaggtggttcggcaacttgaacttgtgcttgagcttgagcagcgacgacggaggctttgtcgtactcagcttgtatagcttgtcgtcgcttggaatcctcctcgccccttgcgaacccgtcaatgatgcgaagtaggtgctcgagcgtctgtggctccttgttggcgatttttcttgtgagttcgccctcgagcaaaccggccaaagcggcgtttataaccgacgcctcggttatgtcttgaacttggcaccgggcttgcgagaagcgacgcatgtactcccttatcgactcccccggcctttggcgaatgccgagtaggtgctgctgtgtcttcggctcctcgtaggtgcctcgaaagttaaggacaaaaacatcgcgcaattgctcccatgagtaaatgctattggcttgctgcgggtacggtgtggcgaagggcgaaatcgcagcttgtgtgtgatgttgggccatggcattcgactgcccggctccaactggaggtacttgctgagccgccatgtatgggtcaaaaattggctgtgaccacgtcatggcagcttggattggtgcttggtttgttccgaagcctggagtcggagcttgctgccaaacggttggcgcctgagcagcgttgacgaagtcgaactgtggtccttgattccacggcgaaactcccaggcccggctgaatcggtggcaaccaattaggcgtaccttgacttgtattcccctccggatgggccgatggggttgtgcttgaaatgcagtggggttggttgagttgctgaaggaaagcttggagttgcgcctgcagagccgaagccccttctgccactgtttgtggcgcttggccgggtggttgatggtgtacttgggtagcgactggttgagcttgcagttgcacgtgaggggccggatgcactgctgcggccgattgctgcccagcgaagtacattggtgcttgtgcgacttgtggcgaaaagggctgggtcatcacttgcggatggacttgaggtgggacataacctgccgaatactgaaggattggagtcgacgtgaccttggtccgccttgccacctcgtaagcctgttgttgttcttgcatttggcgaagcatgtcttggagccgtgtcatgttctgtcgcatggcttccatgtcggcttcggcttgcgtttcggggtcagggctgacttgggcttgcacagcggcgagcgcagttgggaccgctgccggctgcgatggggcggcttggggtaccaccagttggcttgtcgaaaggatctccgccctggtctggagtgcccttgccgccgcatccgccttcgccacgtcggccgcattcggcacttgcacagaggcggcaggggccgaaggcggttgtgacggtgcagatgtggaagcagatggtcctcctccatcttcggccacgggtgccgaaggctctgctccctcctcggcggccat

SEQ ID NO: 35679 - DNA, 5720 bp, Oryza sativa
  Clone ID: PAT_MRT4530_39578C.1
atggcgaaggcaatggagcaagaacggcgcaaggcgaagagtcatacaagcgccaggccagaggcgtctcaggcgaagggtgcaaggcgaagactatctgccgaaggaggacgactttgccttgacaagtttgcccccgcgaaggccgaggaagcctttccggcccatcaagcctaggggcaatagggccgacgatcgccagacggcccatcaggggcccgtgagcccctatatcatcatgtacccctgtaaatgtccctttcgtaagcgtaatcatttgtcatttcgacaacagctagcgccgaccgttgggacctccgagcgaaaccactgagagcgaatgccaccgaagagggtcgtgaaggagaaggttgccaggcggagggagagcgacgccggactggacatggctgccgaggaaggagcagagccttcggcgcccgtggccgaagatggaggagcaccagcgccatcacatctgccttcggcccctgcaacctctgtggaagtgccgaacgcgactgacgtggcgaaggcgactgcggcggcaagggcactctagaccacggcggagatcctttcgacaagtcaaccggtggtgccccaagccgctccatcgcagtcggcagcggccccaactgcgctcgccattgaacaggcccaaatcagccttgaccccgaagcacaggccgaagccgacatggaagccatgcggcggaacatgacacggctccaagacatgcttcgccaaatgcaagaacaacaacaagcatacgaggcggcaaggcggaccaaggccatgtcggctccaatccttcagtattcggcaggctatgtcccacctcaagtccatccgcaagtaacggcccagccctttccgccacaagctgcacaagcgccggtgtacttcgccgggcagcatcaaccacctggccaagcgccaaaattagtggcggaaggggctttggctctgcaggcgcaactccaagctttcctccagcaactcaaccaaccccactgcatttcaagtacaaccccatcggcccgcccggaggggaatacaagtcaaggtacgcttaattggttgccaccgattcagccgggcctgggagtttcgccgtggaatcaaggaccgtagttcgattttgtcaacgccactcaggcgccaaccgttcggcagtaggctccgactccaggcttcggagcaaaccaagcaccaattcaagctgccatgacgtggtcacagctaatttttgactcgtccatggcggctcagcaagtaccaccagttggagccgggcagccgaacgccatggcccaacctcacgcacaagctgcgatttcgcccttcaccacaccgtacccgcagcaaggtgcggtaaacagggcgggaggcaaaaaggggctaccgctgagtgggggaatcaagactcgtccaatcccaccccagttcaagttcccacctgtcccacgctattcgggcgaaaccgacccgaaggagttcctctccatctacgagtcagcgatcgaagcggctcatggtgacgaaaataccaaggcgaaggtaatacatctcgctctagacggcatcacccgttcttggtatttcaatttaccagccaatagcatttactcatgggagcaattgcgcgatgtttttgtccttaactttcgaggcacctataaggagcagaagacgcagcaacaccttctcggcattcgccaaaggtcgagggagtcgataagggagtacatgcgtcgcttctcgcaagcccggtgccaagttcaagacataaccgacgccacgccgcttcggccggactgctcgaggacgaactcacaagaaaaatcgccaacaaggagccacagacgctcgagcacctacttcgcatcattgacgggttcgcaaggggtgaggaggattccaagcgacgacaagctatacaagctgagtacgacaaagcctccgtcgccgctgctcaagctcaagcacaagttcaagttaccgaaccacctcccctctctgttcgccagtctcagccggcaatccaaggacagccgccgagccaaggccaagcccccatgacttggagaaagttcaggacagatcgggcgggcaaggctgtgatggctgtcgaagaagtgcaagccctccgcaaggagttcgacgcccagcaagcaagcaaccatcaggagccagcccgcaagaaatacgtgaaccagctgatctctttcgggccagaagacgccgaaggagtcctgttcccgcatcaagatccactggtaatctcagctgagatagccggttttgaagtacggcgaatcctggtcgatgaagggagttcggctgacattatctttgccgaagcatatgctaagatggggttgccaacccaagcacttaccccagcaccagcatcgctccgcggtttcggcggggaaccagttcaagttcttggccaagcacttttgctgatagcctttggctcgggggacaacagacgcgaagagcaaatactgttcgacgtcgttgacatcccgtacaactataacgccattttcggccgcgcaaccctgaacaagttcgaagccatttcccaccataattatctcaagctcaagatgcccggcccgacaggggtgattgtagtcaaggggcttcagccttcggcttctccaaaaggcgatctagccataattaacagagcagtgcacagtgttgagaccgaactgcatgaatggtcgaagcacacgccaaagcccacccctcacgccaagataacaaaaatgcagattgatgatgccaaccccacaaagctcgtatcactgggagacgacatgggcgaagaagaagttgagagtaccctgcaggtgctcaagaagaacattgacatcttcgcctggagccctgacgaggtggggggtgttctggcagatctcatcatgcatcacctggcggtcaagccggacattaagccaagaaaacaaaagttgcacaagatgtctgccgatcgccaagaagcggcgaaggccgaagtacaaaaattactccgggtgggggttatccaagagattgaccatccggagtggctggcgaatccaattctggtgcggaagtcaaacggcaaatggcgcatgtgtgtcgatttcacagacctgaacaaagcgtgtccgaaagacgatttccccttgccgcgaatcgaccagctcgtggattcaacagctggatgcgagctcatgagtttcctggatgcgtatcccggttaccaccagatccacatgaacccgcccgacatccccaaaacatccttcatcactccattcggcacattttgtcacctcaggatgcctttcggcttgaggaacgcaggagcaactttcgccaggctggtgtacaaggtccttggcaagcagttggggcggaatgtggaagcttacgtcgacgacatcgtcgtaaaaagccgcaaggctttcgaccatgcgatcgacctgcaggagacgttcgacagcttgcgcgcggcaggcataaagctgaatccggagaagtgcgttttcggcgtcgacgcaggcaagttgttgggtttccttgcggccgaaagaggtttgcccttcttcaagaccctccggggcgcgagaaagtttaattggacaccagagtgccaagcagcattcgacgagctaaagcaatacttgcaaagcccgccagctctgataagcccacccccaggaagcgaactgctattatacttagcagctttgccggtggcagtcagtgctgcactcgtccaagaaacagagtccggatagaaaccggtctacttcgtctctgaagcactgcaaggagcgaagacaaggtacatggaaatggaaaagctcgcttacgctctagtgatggcttcgcgcaagcttaagcactacttccaggcccacaaagtcatagggccatcacagtaccccttgggcgaaatactccgaggcaaggaagtcactggccggctcagcaagtgggcggcagagctatccccgttcgacttgcattttgtcgcacgctctgctatcaagtctcaagtgctagctgacttcgtagctgaatggacaccagtgcttgtccccaaccccgagcccgccgaacaattctgggtgatgtgctctaacaggttgtggtcgcacaggggggcaggcgttgcagcagttctcttttcgccgaatggtgtgccgattcggtacgcaacaagactgcagttcgacacaaccaacaatgcagtagaatacgaagccgttctcctgggcctaagaaaggcgaaagcactgggagtccggcgcctgctaattcgaactgactccaagttggtagcaggccatgttgacaagtccttcgaggcaaaagaagagggaatgaagaagtatctggaggctgttcggtccatggaaaaatgcttcaccggcataacggtcaaacacttgcctagagaccagaatggggaaacagacgccttggcgaaatccactgcttgtggtggcccacattcgcctggcatctttttcgaagtcctacatgctccaagtgtgtccatggacagttcggaagtcatggtaatcgaccaggagaaactgggcgaagacccatgtgactggtgaaccccattcgtgaaacaccttcaaactggctggcttccggtagacgaagcagaagcaaagcatttgcaactcagagccacgaagtgtaagatggtctcgggtcagctttaccgctccgggatacttcaacccttacttcgttgcatctctttcgccaaaggagaagaaatggcaaaggaaatacaccaggggctatgtggcgcgcaccaggctgcaagaacagtggcctccaaagtatttagacaaggagtttattggcccactgtgttgaaagtctgtgttgagcaaatcaagaagtgcgaaagttgccagcgtcatggccgaagccaagccgcgccccagtatgatctgcagcccattgcaccaatatggcccttcgccagatggggactggacatcattgggccattcccggtggcgcgaaacgggtataaattcgcaattgtagctgtggaatatttctctcgatggatcgaagccgaaccccttggggcaatcacttcggcagcagtacagaagtttgtatgggaaaacattgtttgtcgtttcggggtgccaaaagagttcattactgacaacggcaagcagtttgactctgataagttcagagaaatgtgcgtagggcttaacctggaaatcaggttcgcgttggtcacacacccgcagtcaaatggggcggccgaacgtacaaatggcaagatcctagaagcactaaaaaaaagactcgagggggaagcgaaaggcaaatggccagaggaattgctatcggttctctgggcccttcggacgacacccacaagaccaaccaagtttagcccgtttatgcttctttatggcgatgaggcaatgaccccagcagagctaggggctaactcaccaagggtgatgttttccgggggcaaagaaggacgcgaagtattgctcgaactcttggaaggagtaagagtcgaagcgctcgagcacatgcacaagtacaccacaagcacttcggcaacttacattaaaaaagttcgacccacggagctcatgcctggtcatctcgtcctaaggaagaaggcgaacccagtagcggttggcaagct

SEQ ID NO: 35680 - DNA, 282 bp, Oryza sativa
  Clone ID: PAT_MRT4530_39579C.1
atgccactgagcttaggatccatcaagcgaggtacgggagaaaagatgggccaacccaggttgccgcctcctagacaacttgtggaggagtttcccggtgacctctctgggaagattgtggaggaggccctggcgccggtgttgactggtttggagttcaccaccttcggagtgaaggaagaactaccccgagtgatcgaggcttgggtagtcctctccgtgggctggctcccgccttgcccaccccttgacgaagggggcgtgcggtggctttgtggttga

SEQ ID NO: 35681 - DNA, 1269 bp, Oryza sativa
  Clone ID: PAT_MRT4530_3957C.1
atggcttccatcgctatggctgcctcgttgcgaaccttcctccgccctcaccgttgccgtctcctcctccgccagagccgcagcctctccgccagcgccgccccggccggtgccgccgccgcatccacggttatccggcgcagcgtagtggaggtgctccgggagcgggggctcgtggaggccaccacttctgagtctctggggtcggcttcagcgagccctagggagctcaaggcgtactgcggcttcgaccccacggcggagagcctccacctcgggaacctcctcgggctcgtcgtgctctcctggttccgccgctgcggtcacaacgccgtcgcgctcgtcggcggcgccaccggccgtgtcggtgacccctctggaaagagcgccgagcggcccgagctcgacctcgccgccgtcgagaccaactccaacgctatcaaatcgctcatcggccagatccttgaccgtgcacccgagccctcccaacattcgcaatccggtaaaaacttgaacttggagcaaaatgagcaggctttggtcaattcgggagaaaagatgggttcttttcagatccttgataactatgactggtggaaggacatcacgctgctggatttcctcaaggaggttgagggggcacacggcctgacattcccactactgctgaagagtgatgggacgaagtttggcaagacggaggatggagcaatctggctttcgcccaagatgttgtcaccatacaaattctatcagtacttcttctcagtgccagatattgatgtcataaggtttatgaagatactgacattcatgagcctggatgagattcaggagctggaagagtcgatgaagaagcctggctatgtgccgaacacaattcagaggaggcttgcagaagaggtcacacgttttgtgcatggtgaggagggattggaggaagcgttgaaagccacggaagccttacggcctggggcacagactcagttggattcacaaacaattgaggggatagcagatgacgtaccatcatgctttttgccatatggccaagttttgaagtctcccctggttgatctagcagtctccacaggtttgcttgctagcaaatcagcggttaggcggcttattaagcaaggggggctatacttaaataacataagaattgatagcgaggataagttggttgaggaaggtgatgtagttgatgggaaagtgctgttgctatctgctggaaagaagaacaagatggttgtgaggatatcttga

SEQ ID NO: 35682 - DNA, 1431 bp, Oryza sativa
  Clone ID: PAT_MRT4530_39580C.1
gcacgaggcaacgcatttccttcctcctcgcctccgactcaaatccaccccgcgtctccgcctcaccgcagacagagagagagaggccaagcatggcggccgccaccgccgaacccctcgccgtcgccgtcgcccacaccgccaccgccggcacggaccactcgccggccccgctgcctccccctcccccgcactgcaattacaaaagcaaattgcaagagtatcttcagcaggcaaataagcagttgccaatctactgtaccaagtgcaagggtgaacaccatcagcttaagttcaaatccactgtcatggtggatggtgaggagttttcatccactttttgtcatagacgtgtgaaggacgctgagcaggatgctgctaaagtagcctatgataccttgcttgaaaggaaagagactgagactgatgatacagatgtgtttgagctcattgatcaggatgttgtgttcagcaaatcaattcttcatgaatatactactaagacaaaaacagatcaaccagaatactctgtaaccaagacagaagggtccgtgactccatatgtttcatctgtgtcatttgctgggcatacttatactggtggagctgcaagaaacaagaaggacgcagagcagaaggcagctcgtgctgcggtcaagtcacttttagctacaaattacacttccatggcgaaaattgttagatcgaaggaaaagctcatcagggcaatctcaccttctgggtacaacaaaggaatcgacagtaatccaacaaacaagaaacttccttttgctcctataaaattcacacccccttccatattcaaactatatgatggagaaatcgacatgctttctgtcccacaagctctatttgcccctctagtcgctgctgaggaacccaaagtcagaccagcagctgagccagcttccaacccatctgagcaagctgtccatgtatcaaagaagcacaaggataacaaagtcagaggaccagaggtcaaggaagaaagagttgcacagtagcatcttgcccttcacagcctgaggagtttggattccatctttctgtgctggaggttgacaggctttggtgacaacatggtgctgtgtaggtgatatgctaagcagctagtgatcatcagtacaatgggcggtgttcaaatggcattagattggagtctgtttccttttcttctgtaattagaccaacaatatcagtcatgtggtagtagtagtagtggccgaacaaaacagtagcaacgccatgaagtatgaactacccccgtccgtccgtgctaggctggtagttttatggttgttatccactctgttcatgtgtgtttagttcaaagaaaatctgttccgagtcgggatgatcagcaaatgattttgttcttctatgcactgagaatccagatgcatttatcct

SEQ ID NO: 35683 - DNA, 5400 bp, Oryza sativa
  Clone ID: PAT_MRT4530_39581C.1
atggcaagttcgcccccgcgaggcccgaagaagcctttctggcccgtcaagccttggggctatagggccggcgatcgccagacggcccatcaggcgcccatgagcccctataacattatgtacccttgtaaatgtccctttcgtaagggtaataatttgtcatttcgacaacagctggcgccgaccgtggggacctccgagcgaaaccaccgagagcgaatgccaccgaagagggtcgtgaaggagaaggttgccaggcggaaggaaagcgatgccggaccggacatggccgccgaggaaggagcagagccttcagcgcccgcggccgaagatggaggaggacaagcgccatcacaaccgccttcagcccctgcaacctccgtgcaagtgccgaacgcggccgacgtggcgaaggcggctgcggcggcaagggcactccagattaaggcggagatcctttcgacaagccaactggtggtgccccaagccgctccatcgcagccggcagcggccccaactgcgctcgccgttgtgcaggcccaagtcagccctgaccccaaagcacaagccgaagccgacatggaatctatgcggcaaaacatgacacggctccaagacatgtttcgccaaatgcaagaacaacaacaagcatacgaggcggcaaggcggaccaaggccatgtcggctccaatccttcagtattcggcaggttatgtcccacctcaagtccatccgcaagtgacgacccagccctttcgccacaggccgcacaggcgccggtgtacttcgccgggcagcaatcggccgcagcagtgcattcggcccctcacgtgcaactgcaagctcaaccagtcgctgcccaagtacaccatcaaccaccttgccaagcgccacaaacagtggcggaaggggcttcggctctgcaggcgcaactccaagctttccttcagcaactcaaccaaccccactgcatttcaagtgcaaccccatcggcccacccggaggggaatacaagtcaagccaatttttgacccatccatggcggctcagcaagtacctccagttggagccgggcagtcgaatgccatggcccaacctcacgcacaagctgcgaatttgcccttcgccacaccgtactcgcagcaaagtgcggtaaacagggcgggaggcgaaaaggggctaccgctgagtgggggaatcaagactcgtccaatcccaccgcagttcaagttcccacccgtcccgtgctattcaggcgaaactgacccgaaggagttcctctccatctacgagtcagcgatcgaagcggctcatggtgacgaaaataccaaagcaaaggtaatacatctcactctagacggcatcgcccgttcttggtatttcaatttaccagccaatagcatttactcatgggagcaattgcgcgatgtttttgtccttaactttcgaggcacctatgaggagccgaagacgcagcaacaccttctcggtattcggcaaaggccgggggagtcgataagggagtacatgcgtcgcttctcgcaagcccggtgccaagttcaagacataaccgaggcgtcggttataaacgccgcttcggccggtctgctcgagggcgaactcacaagaaaaatcgccaacaaggagccacaaacgctcaagcagctacttcgcatcattgacgggttcgcaaggggcgaggaggattccaagcgacgacaagctatacaagctgagtacgacaaagcctccgtcgccgctgctcaagctcacgcacaagttcaagttgccgaaccatctcccctctctgttcgccagtctcagccggcgatccaaggacaaccgccaaggcaaggccaggctcccataacttggagaaagttcagaacagactgtgcgggcaaagctgtgatggcggtcgaagaagtgcaagccctccgcaaggagtttgatgcccaacaagcgagcaaccatcagcagccagcccgtaagaaggtccgaaaagacctctactgcgcctttcacggacgctcttcgcacaccacagagcaatgccgaaacattaggcaacgtggcaacgcgcaagacccaaggccgcagaagggaacaactttcgaagcatcccgcgaagcaattcaggagcaaacatccccagccgaacaatgccaagatgtacaacgaagggtaatccaagtgattacaagggctgatccgccaagccagttgtccaaacgacagaagaagatgcagatccgtatggtccacagcatcacttcggtgggtgaaggggcgccgcagtatttgaaccagctaatttcttttgggccggaagacgcaggagttatgtttccgcatcaagatctcctggtaatctcagctgagatagctggtttcgaagtccgacgaatcctggtcgacggagggagttcggccgatgttatcttcgccgaagcatatgccaagatggggttgtctacccaagcccttaccccagcaccagcatcgctccgcggtttcggcggagaagcagttcaagttctcggccaagcacttttgctgatagcctttggctcgggggagaacagacgcgaagagcaaatactgttcgacgtcatcgacatcccgtacaactacaacgccatcttcggccgtgcaagcctgaacaagttggaggccatttcccaccacaattatctcaagctcaagatgcccggcccgacaggggtgatagtagtcaaggggcttcagccttcggccgctgcaaaaggcgatctagccataatcaacagagcagtgcacagtgttgagaccgaaccacatgaacggccgaagcacacgccaaagcccacccctcacggaaagataacaaaggtgcagattgatgacgccgaccccacaaagctcgtatcactggggggcgacatgggcgaagaagaagaagttgagagtatcctagagatccacatgaacccgctcgacatccccaaaacatccttcatcactccattcggcacattttgtcacctcaggatgcctttcggcttaaggaacgcaggagcaactttcgccaggctggtgtacaaggtccttggtaagcagttggggcggaatgtggaagcttacatcgacgacatcgttgtaaaaagccgcaaggctttcgaccatgcgatcgacctgcaggagacattcgacagcttgcgcacagcaggcataaggctgaatccggagaagtgcgttttcggcgtccgcgcaggcaagttgttgggtttccttgtttccgaaagaggcatcgaggcaaatctcgagaaaatcgatgccatccagcaaatgaagcctccgtcaagcgtacatgaagtacaaaagcttgcaggccaaattgcgtcactcagtcgattcctctcaaaggcagccgaaagagttagtgccgccctcgtccaagaaacagagttcggacaaaaaccggtctacttcgtctccaaagcactgcaaggagcgaagacaaggtacattgaaatagaaaagctcgcttacgccctagtgatggctttgcgcaagcttaagcactacttccaggcccacaaagtcatagcgccatcacagtaccccttgggcgaaatactccgagacaagaaagtcactggccggctcagcaagtgggcggcagagctatccccgtttgacttacattttgttgcacgctttgctatcaagtctcaagtgctagccgacttcgtagctgaatggacatcggtacttgcccccgaccccgagcccgccgaacaatcctggctgatgtgctctgacggctcgtggtcgcacaagggggcaggcattgcggcagtcctattttcgccgaatggtgtgccgattcggtacgcagcaagactgcagttcgacacaaccaacaatgcagcagaatacgaagcctttctcctgggcctaagaaaggcgaaagcactgggagtccggcgcctgctaattcgaattgactccaagttggtagcaggccatgttgaaaaatccttcgaggcaaaagaagagggaatgaagaggtatctggaggctgttcggtccatggaaaaatgcttcaccggtataacggtcgaacacttgcctagagaccagaacgaggaagcagacgccttggcgaaatccactgcttgtggtgccccacattcgcctggcatctttttcaaagtcctacatgctccaagtatgcccatggacagctcggaagtcatggcaatcgaccaggagaaactgggcgaagacccatatgactggcgaaccccatttgtgaaacaccttgaaactggctggcttctggtagacgaagcagaagcaaagcgtttgcaactcagagccacgaagtataagatggtctcgggtcagctttaccgctccggggtacttcaacctttacttcgttgcatctcttttgtcgaaggcaaagaaatggcaaaggagatacaccaagggctatgtggcgcgcaccaggctgtaagaacagtggcctccaaagtatttagacaaggagtttattggcccattgtgttgaaagtctgtgttgagcaaatcaagaagtgcgaaagttgccagcgtcatggccgaagccaagccgcaccccagtatgatctgcagcccattgcgccaatatggcccttcgccagatggggaccggacatcattgggccgttcccggtggcgcgaaacgggtataaatttgcaattgtagctgtggaatatttctctcgatggattgaagccgaaccccttggggcaatcacttcggcagcagtacagatgtttgtatggaaaaacattgtttgtcgtttcggagtgccaaaagagttcattactgacaacggcaagcagtttgactctgataagttcagagaaatgtgcgaagggcttaacctggaaatcaggcaaatggccagaggaattgctatcggttctctgggtccttcggagacccccacaagaccaaccaagtttagtccgtttatgcttctttatggcgatgaggcaatgaccccagcagagctaggggctaactcaccaagggtgatgttctctgggggcgaagagggacgcgaagtatcgctcgaactcttggaaggagtaagagtcgaggcgcttgagcacctgcacaagtacgccacaagcacttcggcaacttacaacaaaaaagttcgacccacggagctgatgcctggtcatctcgtcctaaggaagaaggcgaacccagtagcggttggcaagtttgaatcaaagtgggaaggaccatacctcatcaaacacaagtccaggacgggatcttttcacctagcgacactcgaaggcgaggagttcgaccattcctggaacgccgcctctctcaagcgcttctatgtctag

SEQ ID NO: 35684 - DNA, 327 bp, Oryza sativa
  Clone ID: PAT_MRT4530_39582C.1
atggttgtgccgctcgccaggcgcctcgccggcggtggccgcgactgcatcacgatgctccagcgcgttggcgctggcatggcgacggcctgcctcgccacggtcgtggcggcgctcgtcgaggcgagacggctccgtgtggctcgcgacactaggaccggccagacgcgacggtgccgatggatgtgtggtgtcgccaaggtgctcagcgtgattgtgctggaggagttcttctacgagcttcacatcgtcaggctcgccgtgtccctgcgctcgctgtgtccgagggcaatttcgtctcatcaagccacattccagcgaaaataa

SEQ ID NO: 35685 - DNA, 5142 bp, Oryza sativa
  Clone ID: PAT_MRT4530_39583C.1
tcagctccgtgggtcgaactttttgttgtaagttgccgaagtgcttgtggtgtacttgtgcatgtgctcgagtgcttcgactcttactccttccaagagttcgagcgatacttcgcatccctcttcgcccccagagaacatcacccttggtgagttagcccctagctttactggggtcattgcctcatcgccataaaaaagcataaacgggctaaacttggttggtcttgtgggggtcgttcgaagggcccagagaactgatagcaattcctctggccatttgcctttcgctgccccctcgagtcttttctttagtgcttctaggatcttgccatttgtacgttcggccgccccatttgactgcgggtgtgcgaccgacgagaacctgatttccaggttaagcccttcgcacatttctctgaacttatcatagtcaaactgcttgccgttgtcagtaataaactcttttggcactccgaaacggtaaacaatgtttttccatacaaacttctgtactgctgccgaagtgattgccccaaggggttcggcttcaatccatcgagagaaatattccacagctacaattgcgaatttatacccgtttcgcgccaccgggaatggcccaatgatgtccagtctccatctggcgaagggccatactggtgcaatgggctgcagatcatactggggcgcggcttggcttcggccatgacgctggcaactttcgcacttcttgatttgctcaacacagactttcaacacagtgggccaataaactccttgtctaaatactttggaggccattgttcttgcagccccaaagcggtaaagctgacccgagaccatcttatacttcgtggctctgagttgcaaatgcttcgcttctgcttcgtctaccggaagccagccagtttcaaggtgtttcacaaatgaggttcgccagtcatatgggtcttcgcccagtttctcctggtcgattgccatgacttccaagctgtccatgggcacacttggagcatgtaggactttgaaaaagatgccaggcgaatgtgggccaccacaagcagcagatttcgccaaggcgtctgcttcctcgttctggtctctaggcaagtgttcgaccgttatgccggtgaagcatttttccatggaccgaacagcctccagatacctcttcattccctctttttttacctcgaaggatttgtcaacatggcctgctaccaacttggagtcagttcgaattagcaggcgccggactcccagtgctttcgcctttcttaggcccaggagaacggcttcgtattctgctgcattgttggttgtgtcgaactgcagtcttgctacgtaccgaatcggcacaccattcggcaaaaataggactgccgcaatgcctgctcccttgatagcagagcgtgcaacaaaatttaagtcgaacggggatagctctgtcgcccacttgctgagccggccagtgacttccttgcctcggagtatttcgcccaagggatactgtgatggcactatgactttgtgggcctggaagtagtgcttaagcttgcgcgatgccatcactagggcgtcagtgagcttttccatttcaatgtaccttgtcttcgctccttgcagtgcttcggagacgaagtacaccggtttttgtccgaactctgtttcttggacgagggcagcactgactgccaccggcgaagctgctaagtataatagcagttcgcttcctgggggtgggcttatcagaactggcgggctttgcaagtattgctttagcacgtcgaatgctgcttggcactctggtatccaattaaactttcctgcgcctcggagggtcttgaagaagggcaaacctctttcggctgcctttgagaggaatcgactgagtgccacaattcggcctgcaagcttttgtacttcatgtacgcttgacggaggcttcatttgctggatggcatcgattttctcgggatttgcctcgatgcctctttcggaaacaaggaaacccaacaacttgcctgcgcggacgccgaaaacgcacttctccggattcaaccttgtgcctgctgtgcgcaagctgtcgaatgtctcctgcaggtcgatcgcatggtcgaaagccttgcggctttttacgatgatgtcgtcgacataagcttccacattctgccccaactgcttgccaaggaccttgtacaccagcctggcaaaagttgctcctgcgttcgttaagccgaaaggcatcatgcgccatttgccgtttgacttccgcaccagcactggattcaccaaccactccggatggtcaatctcttggataacccccgccctgagcaatttttgtacttcggctttcgccgcttcttggcgatcggcagacatcttgcgcaacttttgttttcttggcttaatgtccggcttgactgctaggtgatgcatgataagatccaccgggacaccccccacctcgttagggctccaggcgaagatatcgatgttctttttgagcacctctaggatactctcaacttcttcttcgcccatgtcgccccctagtgatacgagctttatggggtcggcatcatcaatttgcatttttgttatcttgccgtgacgggtgggctttggcatgtgcttcggccgttcatgtggttcggtctcaacactgtacactgctctgttgattatggctagatcgccttttgaagcggccgaaggttgaagccccttgactactatcacccatgtcgggccgggcatcttgagcttgagataattgtggtggcaaatggcttcgaacttgttcagggttgcacggccgaagatggcgttgtagttatacgggatgtcgacgacgtcaaatagtatttgctcttcgcgtctgttctcccccgagccaaaggctatcagcaaaagtgcttggccgagaacttgaactgcttcgccgccgaaaccgtggagcgatgttggtgctggggtaagggattgggtaggcaaccccattgtggcatatgcttcggcgaagataacatcggccgaactccctccgtcgaccaggattcgtcggacttcgaaaccagctatctcagctgagattaccaggggatcttgatgcgggaacataactccttctgcgtcttccggcccaaaagaaattagctggttcagatactgcggcgccccttcacccgccgaagtgatgctgtggaccatacggatctgcatcttcttctgccgtttggacaactggcttggcgggtcagccttgtaatcacttggattgcccttcgagtagaggtcttttcggaccttcttgcgggctggctgctgatggttgctcgcttgctgggcgtcgaactccttgcggagggcttgcacttcttcgaccgccatcacagctttgcctgcacggtctgttctgaactttctccaagttatgggggcctggccttgccttggcgactgtccttggatcgccggctgagactggcgaacagagaggggaggtggttcggcaacttgaacttgtacttgagcttgagcagcgacgatggaggctttatcgtactcagcttgtatagcttgtcgtcgcttggaatcctcctcgccccttgcgaacccgtcaatgatacgaagtaggtgctcgagcgtctgtggctccttgttggcgatttttcttgtgagttcgccctcgagcagaccggccgaagtggcgtttataaccgacgcctcggttatgtcttgaacatggcaccgggcttgcgagaagcgacgcatgtactcccttatcgactcccccggcctttggcgaatgccgagtaggtgttgctgcgtcttcggctcctcataggtgcctcgaaagttaaggacaaaaacatcgcgcaattgctcccatgagtaaatgctattggctagtaaattgaaataccaagaacgggcgatgccgtctagagcgagatgtattacctttgccttggtattttcgtcaccatgagccacttcgatcgctgactcgtagatggagaggaactccttcgggtcagtttcgcctgaatagcgcgggacgggtgggaacttgaactgtggtgggattggacgagtcttgattcccccactcagcggtagccccttttctcctcccgccctgtttgccgcaccttgctgcgggtacggtgtggtgaaaggcaaaatcgcagcttgtgcgtgaggttgggccgtggcattcgactgcccggttccaactggaggtacttgctgagccaccatagatgggtcaaaaattggctgcgaccacatcatggcagctttgattggtgcttggtttgttccgaagcctggagttggagcttgctgccgaacggttggcacctgagtagcattgacgaagtcgaactgcggtccttgattccacggcgaaactcccaggcctggttgaaatgcagtgaggttggtagagttgctgaaggaaagcttggagttgcgcctgcagagccgaagccccttccgccactgtttgtggcgcttggccaggtggttgatggtgtacttgggcagtgactggttgagcttgcagttgcacgtgaggggccggacgcacagctgcggccgattgtgaaggattggagccgacgtggccttggtccgctttgccgcctcgtatgcttcttgttgttcttgcattcggcgaagcatgtcttggagccgtgtcatgttctgtcgcatggcttccatgtcggcttcggcttgtgcttcagggtcagggctgacttgggcctgcacaacggcgagcgcagttggggccgctgccgccagcgatggagcggcttggggcaccaccggttggcttgtcgaaaggatctccgccctggtctggagtgcccttgccaccgcagccgccttcgccacgtcggccgcgttcggcacttgcacagtggttgcaggggccgaaggcggttgtgatggcgcttgtcctcctccatcttcggccacgggtgccgaaggctctgctccttcctcggcggccatgtccggtccggcgtcgctttccttccgcctggcaaccttctccttcacgactctcttcggtggcattcgctctcggtggtttcgctcggaggtccccacggtcggcgccag

SEQ ID NO: 35686 - DNA, 774 bp, Oryza sativa
  Clone ID: PAT_MRT4530_39584C.1
atggccgaacagatgttcaccgtccgcgacgtgctgtacatgtacagcgacgcccgcaccgcctacgaccgcttcgtcggcatcggcagcaacccggagcaggcgcgcaacgcggtggcgctgctggtgtggctggaccagtgcaacgtccgagccatccagcacctcccagggctgagccccaccgtcgtcagcctcgtcgccgcggaggccaactcggtgttggactgcctccgcgggccggagcccgtagtgccggccatcccgctcatctccgcgctctgcaaggacggcgatgtggacccgcgctttttcacattccaccaggacctggtggtgcgtggtgtcgcagacatcctagacggtgtcggctcgctcatcttcaataaccacctcaacaagatgctccgccgctaccagaccggcctagtcggcaacccgccggagctgatggcggcctatagctgcctctccgtcgccgtgccggaggactgccgctccatgttcatcaccttctccaggggagcgccaatcgaccgtgaagagatcttcgactacttcaggcagaagtggggcgactgcgtggtgcgtgtcctgatggagaagacagcgggaggctcacagccaatgtacgggcgaatcatcttccggagcgaggcatttgtgcagctggtgctcaacggagagcgtctcgtcaagatctccatccgccatcgccagatctggctccgcaagtatgtcccaaggccggctgccacccagaaccagaattaa

SEQ ID NO: 35687 - DNA, 1188 bp, Oryza sativa
  Clone ID: PAT_MRT4530_39585C.1
atggccgggcagatgttcaccgtccgcgacgtgctgtacatgtacaccgatgcccgcaccgcctacgaccgcttcgtcggcatcggcagcaacccggagcaggcgcggaacgcggtggcgctgctggtgtggctggaccagtgcaacgtcccggccatccagcacctgcccgggctgagccccaccgccgtcagcctcgtcgccgcggaggccaactcggtgctggactgcctccgcaggccggagcccgtggtgccggccatcccgctcatctccgcgctctgccaggacggcgacgtggacccgcgcttcttcgcgttccaccaggacctggtggtgcgcggcgtcgccgacatcctcgacggcgtcggctcgctcatcttcgatgaccacctcaacaagatgctgcgccgctaccagaccggcctggtcggcaacccaccggagctgatggcgacctacagctgcctccccgtggccgtgccggaggactgccgctccatgttcatcaccttctccaggggggcgcccattgaccgtgaggagatcttcgactacttcaggcagaagtggggtgactgtgtggtgcgcgtcctgatggagaagactgcaggaggctcacagccgatgtacgggcggatcatcttccggagcgaagcgtttgtgcagctggtgctcaatggcgagcgccttgtcaaggaggagagcagtgcgctgttggttctaaatctgaaatacccagacctccctgttgatcttgtgaaatggcagtatgtgtgttatcggcatattgtagagtgggtggagctccttctattcgtagtgggtggggaagtccagcaggccaccgtatgctcccaattcagttcggctggcccatctatatcccgtgtatgtacacaaacaattggagacgcaaccgcaggagccgcagctgctcggcgacgtttcagcttcgcatcgcagaagtccatccgtgactccgccgcactggtggcaccgcggcattgccatgtgccgactacaggtgctgcatgctggcatcatcggccggcggccgcggacttgatggaggacaacatcaacaccgacaacatggctgactgctctcatgttcctgttcctcctccaaatcaaaccaatgtggatatgatcctcggagctaaatggccacctcggaaaatgtaa

SEQ ID NO: 35688 - DNA, 204 bp, Oryza sativa
  Clone ID: PAT_MRT4530_39586C.1
atgtcggaaacccaagaattgttcgtcaggccagaagcgaccgtgtacggacctcagatgcactggggcacggcgaagaggagatcaggagccaaggaagccactgagcggccatcaatccattggtcagtccagaagagcattgactctcagtcccctggcacgaagaaggtggatgcctcgaacatccacatccaaccttaa

SEQ ID NO: 35689 - DNA, 4152 bp, Oryza sativa
  Clone ID: PAT_MRT4530_39587C.1
ctagacatagaagcgcttgagagaggcggcgttccaggaatggtcgaactcctcgccttcgagtgtcgctaggcaaaaggatcccgtcctggacttgtgtttgatgaggtactgtccttcccactttgattcaagcttgccaaccgctactaggttcgccttcttccttaggatgagatgaccaggcatcagctccgtcggtcgaacttttttgttgtaagttgccgaagtgcttgtggcgtacttgtgcatgtgctcgagcgcttcgactcttaccccttccaagagttcaagcgatacttcgtggccctcttcgcccccagagaacatcacccttggtgagttagcccctagctctgctggggtcattgcctcatcgccataaagaagcataaacgggctaaacttggttggtcttgtgggggtcgtccgaagggcccagagaaccgatagcaattcctctggccatttgcctttcgctgccccctcgagtcttttctttagtgcttctagaatcttgccatttgtacgttcggccgccccatttgactgcgggtgcgcgaccgacgcgaacctgatttccaggttaagcccttcgcacatttctctgaacttatcagagtcaaactgcttgccgttgtcagtaatgaactctttcggcactccaaaccggcaaataatgtttttccaaacaaacttcgagaacgggccaatgatgtccagcccccacctggcgaagggccaaattggcgcaatgggttgcaagttataatggggcgcagattggcttcggccatgacgttggcagctttcgcactttttaatttgctcagcacaaacttttaacacagttggccagtaaaccccttctctaaataccttggaggccaccgttcttgcagcttggtgcgcgccacatagcccctggtgtatttccctcgccatttcctcaccttcggcgaaagagatgcaacggagtagaggttgaagcgtcccggagcgataaagttggcctgagaccaacttatactttgtggctctgatttgcaagcgctttgcttctgcttcgtcgtccggaagccaaccagcttcaagatatttaacaaacggggttcgccagtcatttgggtcttcgcccagtttcacttggtcgattgccaagactgtcaaactgtccacaggcaaacttggtgtgtgcagtacttcaaaaaatatgccaggcaaatgcggtccgccacaagcagcagattttgccaaggcgtctgcttcctcgttctggcccctaggcaagtgttcaactgttatgccgatgaagtacttttccatggttctgacagcctccaaatattttttcattccttcttcttttgcctcaaaggttttgtcaacttggcctgccaccaacttaggatcggttcggattagcaagcgccgaactcccagtgttttcgccttccttaggcccagaagaatggcttcgtactctgctgcgttgttggttgtattaaactgcagtcttgcggcgtaccggactggtacgccattcggcgaagtgagtattgccacaatgcctgcccctttgtgcgaccacgaaccgtcggagcacatcacccagggttgttcgacgggctcgggttcggaagcgaacacaggtgtccattcggctacgaagtcagctagtacttgagacttgacagtcgtgcgtgcaacaaaatgcaagtcgaacggggatagctctgccgcccatttgctaagcctacctgagatttccttgcctcggaggatttcgcccaaggggtactgcgaaggcactattaccttgtgggcctggaagtagtgcttgaggagggctggtgggctctgcaagtattgctttaactcggcgaatgctgcttggcattctggtgtccaactgaactttcctgcgccccggagggtcttgaagaatggcagacctctttcggccgcttttgagaggaaacggctaagtgccgcaattcggcctgcaagcttttgtacttcatgtacacttgacgttggcttcatttgctgaatggcatcgattttctcggggttcgcctctatgcctctttcggaaactaggaaacccagcaatttgcccgcgcgaacgccgaagacacacttctcaggattcagttttatgcccgctgcgcgcaagttgtcgaaggtctcctgcaggtcggacacatgatcgaaagccctacggcttttcacgacaatatcgtcgacataagcttctacatttcgccccagctggttgcaaaggactttgtataccagtctggcaaaggttgctccggcattccttaggccgaaaggcatcctgaggtgacagaaagtgccgaacggggtgatgaaggctgtcttcgggatgtcaggcggattcatatggatcagtactgggttcgccagccactctgggtggtcaatctcttgaataaccccatccctgagtagtttttggacttcggcttttgccgcctcttgacgatcggcgaacatcttatgcaacttctgctttcttggcttggcatccggcttgactgccaggtgatgcatgatgaggtctgccgaaacaccccccacttcatcggggctccaagcgaaaatatcaatgttctttttgagcaccgctaggatgccctcagcttcttgttcacccatgccgtcccccagtgatacgagctttgcggggtcggcatggtcaatctgcacttttactattttgtcatgcggggtgggctttggcacgtgtttcggccggctgtgcaattcggcttcgacattgtgcacaaccctgttgattatggctagatcgccttttgacgcggccgaagactgaagccccttgaccactatcactcccgctgggccaggcatcttgagcttgagatagttgtggtgggaaatggcttcgaacttgttcagggtcgcacggccgaggatggcattgtagttgtacgggatgtcaacgacgtcgaacagtacttgctcttcgcgtctgttttctcccaagccgaaagctatcagcaaaagtgcttggccaagaacttgaactgcctctccgccgaacccccggagcgacgctggtgctggtgtaagagcttgggttggcaaccccatcttagcatatgcttcggcgaagataacgtcggccgaactccctccatcgaccaggattcgccggacttcaaagccggctatctcagctgagaataccagcggatcttgatgcgggaacatgactccttcggcatcttccggcccgaaagagatcagctggttcacatactgtggcgccccctcacccgccgaagtgatgctgtggaccgctcggatctgcatctttttctgccttttggataattggcctggcgggtcagccctcgtaatcacttgcattacccttcgctgcgcgtcttgacgttgttcgaccgggggtgtttgttcttgggctgcttcgtgaggtgcttctatagttgctccttgctgtggtctagtatcttgcgcgttgccacgttgcctgatgtttcggcattgctctgtggtatgcgaagagcgtccgtggaaggcacagtaaaggtcttttcggacctttttacgaaccggctgttgatggttgctcgcttgctgggcgtcgaactccttgcggagggcttgcacttcttcgacggccatcacagccttgcccgcgcggtcggttctgaactttctccaggtcatgggagcttgaccttgccttggcggctgtccttggatcgccgtttgaggctggcgaaccgcgaggggaggtggttcggcaacttgaacttgtgcttgagcttgagcagcggcaatagaagctttatcgtactcagcttgtatggcttgccgtcgcttggaatcctcttcgccccttgcgaaaccgtcaatgatgcgaagcaagtgcacgagtgtttgtggttccttattggcgattttccttgtgagttcgccttcgagcagtgtcacatcccgccgccacctttgccttagcccgccgtcgtgtctagcgccgcctccgcgtagccttagtcgccgccgtcgttgccgtcggttcagccgcgctgcgccgccgttgcagccgccgtcgtcggtcgccgtcgccgccat

SEQ ID NO: 35690 - DNA, 549 bp, Oryza sativa
  Clone ID: PAT_MRT4530_39588C.1
atggcggacgcgacggctcacgggatggtgaacgcggcggcgtcgacggtgaggctcggcgcggcggctagcgacgagcaagggaggggaacttcagggcgtgacatatactatccaacatgcaacgtcttcggtagtcttcgctgtcggcaaactccgactccacggctggcgccgctgggccgctgggccgcctcctccgaaccacggccgtcgaccaggggacgagctccacgtggctgcgcccaccgccgccggcctcgacaggtcgccggttcaccgtcgatgccgcctccaccggccctgccacggctgcgcgtcgtctgcacgccgccgccaccgaggggatgggcctctccaccggtcgacctcgtcgctgacccacggacggcgtcggcgcgccaggggcctccgtcgatctgcgagctgcagccggccggactcgtcccggccgcctcccttgcaccgccggcctctctgtggttgccgccgacccaagaccaacgcccctgccgctacctctacatggctaccgacgtcgccgtctag

SEQ ID NO: 35691 - DNA, 1797 bp, Oryza sativa
  Clone ID: PAT_MRT4530_39589C.1
atggcggcgcacgactggagcgacggcggcgacggcggcgcaaggttgcacggcgctagggctcttccggcgacgagaggcgaaggcgagggtggcggcggagggcaggcgttgtggcagtcctcttttcaccgacccttgggcgaaatactccgaggcaaggaagtcactggacggctcagcaagtgggcggcagagctatccccgttcgatttgcattttgttgcacgctctgctatcaagtctcaaatgctagctgacttcgtagctgaatggacaccagtacttgcccctgaccccgagcccgacgacccgttttgggtgatgtgctctgacggctcgtggtcgcacaagggggcaagcgttgcggcagtcctcttttcgccgaatggtgtgccgattcggtacacagcgagattgcagttcaacacaaccaacaatgcagcagaatacgaagccgttctcctgggcctaagaaaggcgaaagcactaggagtccggcgcctgctaattcgaactgactccaagttggtagcaggccatgttgacaaatccttcgaggcaaaagaagacggaatgaagagctcggaagtcatgacaatcgaccaagagaaactgggcgaagacccatatgactggcgaaccccatttgtgaaacaccttgaaactggctggcttccggtagacaaagtagaagcgaagcgtttgcaactcagtgccacgaagtataagatggtctcgggcgaagaaatggcaaaggaaatacaccaggggctatgtggcgcgcaccaggctgcaagaacagtggcctccaaagtatttagacaaggagtttattggcccactgtgttgaaagtctgtgttgagcaaatcaagaagtgcgaaagttgccagcgttatgaccgaagccaagccgcgccccagtatgatctgcagcccattgcaccaatatggcccttcgccagatggggactggacatcattgggccattcccggtggcgcgaaacgggtataaattcacaattgtagctgtggaatatttctctcgatggatcgaagccgaaccccttggggcaatcacttcggcagtagtacagaagtttgtatggaaaaacattgtttgccgtttcggagtgccgaaagagttcattactgacaacggcaagcagtttgactctggtaagttcagagaaatgtgcgaagggcttaacctggaaattaggttcgcgtcggtcgcgcacccacagtcaaatggggtggccgaacgtgcaaatggcaagatcctagaagcactaaagaaaagacttgagggggcggcgaaaggcaaatggccagaagaattgttatcggttctttgggcccttcggacaacccccacaagaccaaccaagtttagcccatttatgcttctttatggcgataaggcaatgaccccagcagagctaggggctaactcaccaagggttatgttctctgggggcgaagaggggcgtgaggtatcgctcgaactcttggaaggtgtaagggtcgaagcgctcaagcacatgcacaagtacgccacaagcacttcggcaacttacaacaaaaaagttcgacccacggagctgatgcctggtcatctcgtcctaagaaaaaaggcgaacccagtagcggttggcaagcttgaatcaaagtgggaaggaccatacatcatcaaacacaagtccaggacaggatcttttcgcctagcaacactcgaaagcgaggagttcgatcattcctggaacgccgcctctctcaagcgcttctatgcctag

SEQ ID NO: 35692 - DNA, 1527 bp, Oryza sativa
  Clone ID: PAT_MRT4530_3958C.1
aaatagtggatccccgggctgcaggcttgggcgatggcttccatcgctatggctgcctcgttgcgaaccttcctccgccctcaccgttgccgtctcctcctccgccagagccgcagcctctccgccagcgccgccccggccggtgccgccgccgcatccacggttatccggcgcagcgtagtggaggtgctccgggagcgggggctcgtggaggccaccacttctgagtctctggggtcggcttcagcgagccctagggagctcaaggcgtactgcggcttcgaccccacggcggagagcctccacctcgggaacctcctcgggctcgtcgtgctctcctggttccgccgctgcggtcacaacgccgtcgcgctcgtcggcggcgccaccggccgtgtcggtgacccctctggaaagagcgccgagcggcccgagctcgacctcgccgccgtcgagaccaactccaacgctatcaaatcgctcatcggccagatccttgaccgtgcacccgagccctcccaacattcgcaatccggtaaaaacttgaacttggagcaaaatgagcaggctttggtcaattcgggagaaaagatgggttcttttcagatccttgataactatgactggtggaaggacatcacgctgctggatttcctcaaggaggtggggagattcgctcgtgttgggacgatgatagccaaggagagtgtcaagaagcggcttatgtccgaggacggaatgagctacactgagttcacctaccagctgttgcagggctatgacttcctgtacatgttccgcaatatgggtgttaatgtgcagattggaggaagtgatcagtggggaaacatcacagcggggactgagttaattcggaagattttacaggttgagggggcacacggcctgacattcccactactgctgaagagtgatgggacgaagtttggcaagacggaggatggagcaatctggctttcgcccaagatgttgtcaccatacaaattctatcagtacttcttctcagtgccagatattgatgtcataaggtttatgaagatactgacattcatgagcctggatgagattcaggagctggaagagtcgatgaagaagcctggctatgtgccgaacacaattcagaggaggcttgcagaagaggtcacacgttttgtgcatggtgaggagggattggaggaagcgttgaaagccacggaagccttacggcctggggcacagactcagttggattcacaaacaattgaggggatagcagatgacgtaccatcatgctttttgccatatggccaagttttgaagtctcccctggttgatctagcagtctccacaggtttgcttgctagcaaatcagcggttaggcggcttattaagcaaggggggctatacttaaataacataagaattgatagcgaggataagttggttgaggaaggtgatgtagttgatgggaaagtgctgttgctatctgctggaaagaagaacaagatggttgtgaggatatcttga

SEQ ID NO: 35693 - DNA, 642 bp, Oryza sativa
  Clone ID: PAT_MRT4530_39590C.1
atgcggccgttcttcgtcgagtccagtctccgtcaagcagcagcaacgtcttcggttgtctttgctgacggcaaactccgactccacgactggcgccgctgggccgcctcctctgaaccacggccgtcgaccgggggacgagctccacgtggctgcgcccaccgccgccggcctcgacaggtcgccggttcaccgtcaacaccgcctccgccggccctgccacggctgcgcgtcgtctgcacgccgccgccaccgaggggatgggcctctccaccggtcgacctcgtcgctgacccacggacggcgtcgacgcgccaggggcctccgtcgatctacacttcgctcttcttcgacaaccgcgtgctgctccagcaattctccctctatgccgttctcgcgccgcgaccgtctcgaattggccatgtcttcacgcaccattggtccacgacgccctcctgtccgtccacgaccactctatggcgccccctgcgcactatgtggctcggctacctcgacatcagcacacctgacttcggctacatcgaccacggctactctacgcacggcttcatcgaccacggctctcggctccttcgctctggctacatcgactatggcacaaagggctatcattcgtattga

SEQ ID NO: 35694 - DNA, 1056 bp, Oryza sativa
  Clone ID: PAT_MRT4530_39591C.1
atggcgaagaagaagaaggtgttcatattcaggaaggcggcggacgtcgccatggccgtgtccgccgcctacgcgccgttcgccgccgcggtgtcctaccatgccgccgccgccgcgccggcggcgctggccttcgcgctcggccacggcgcgctcctcttcatgctccccttctccgtctacgcgctcgcgttcctccgcgcgccgcgcggcctccaccagacgccctacccgatgctcgcgtgcgccgtcgccgcccccgccgcgctcctcgccgccgtcctggccgtgcccgtgctcgccgccgacgacgtcgcgctcgcctgggccgcgaacgcctccgccgccgcggcgctgtggtggtgcctcacgaacggcggctacacggcggtggcgttctcgagggtggaccagtacgccagcttcatggacgcggtggagcggacgccggagatcgcgttccccctcgtgttcgacgtccccgccaccgccaaggccgccaggcgcgacgccgtccgcttcgccgccgccctgtccgccacatgcgcggtcgccggcggcgcggcggtcggcgtcctcggcggcctctcctcggccgccgccgccattgccgccgccctgtgcatcttcgcgctgccgatgtgcctcctgtacgtgccggagaatcacatggacccctaccccaccatcgacggcgtgctccagcgcaacccggcggcagcgtggtgcacgcttctggcgccggtggcgctcgtgctgtgcggcctcgtcagggcctcggccgccacgaacgccggagacgttggcacgttcgccacggtcatcgccggcgcgttctgggccatggacgccggcgccgccgtgctgctggggcgggtgatcgcgggggagatcaccatggcgagggagacaggcaagcattcgatctaccggtcgagctcgtcggagatcatgtcggcgttgctcatggtttgggtgcggtatttcgtgtacctccatgttttccacctgattggctgcggtggacacctcacatggttcaactcatctcactag

SEQ ID NO: 35695 - DNA, 3840 bp, Oryza sativa
  Clone ID: PAT_MRT4530_39592C.1
atggcgaaggcggctgcggcggcgagggcactccagaccagggcggagatcctttcaacaagccaactggtagtgccccaagccgctccattgcagccaacagcgaccccaaccgcgctcgccgccgtgcaggcccaagtcagccctgaccccgaagcacaagccgaagccgacatggaagccatgcgacagaacatgacacggctccaagacatgcttcgccaaatgcaagaacaacaacaagcatacgaggcggcgaggtggaccaaggttacgtcggctccaatccttcagtattcggcagggtatgtcccacctcaagtccatccgcaagtgacgactcagccctttccgccacaagtcgcacaagcgccgatgtacttcgccaagcagcaattggccgtagcagcgcatccagcccctcacgtacaacagccagtcgctgctcaagtacaccatcaaccacttggccaagcgccacaaacagtggcggaaggggtttcggctctgcaggcgcaactccaagctttccttcagcaactcaaccaaccccactgcatttcaagtacaaacccatcggcccatccggaggggaatacaagtcaaggggcgcctaattggttgccaccgattcagccgagcctgggagtttcgccatggaatcaaggaccgcagttcaacttcgtcaatgctgctcaagcgctaaccgttcggcggcaagctccaactccaggctttggaacaaaccaagtatcaatccaagcggccatgacgtggtcgcagccaattttcgacccatccatggcggctcagcaagtatctccagttggagccgggcagtcgaatgccacggcccaaccccacgcacaagctgcgatttcgcccttcgccacaccgtacccgcagcaaggggcggtaaacaggacgggaggcgaaaaggggctactgctaagtgggggaatcaagactcgtccaatcccaccacagttcaagttcccacccgtcccgcgctattcaggcgaaactgacccgaaggagttcctctccatctacgagtcagcgatcgaagcggctcatggtgacgagaataccaaagcgaaggtaatacatctcgctctagacggcatcgcccgttcttggtatttcaatttaccagccaatagcatttactcatgggagcaattgcgcgatgtttttgtccttaactttcgaggcacctacgaagagccgaagacgcaacaacacctactcggcattcgccaaaggcagggggagtcgataagggaatacatgcgtcgcttctcgcaagcctggtgccaagttcaagacataaccgaggcgtcggttataaacgccgcttcggccggtctgctcgagggtgaactcacaagaaaaatcaccaacaaggagcctcagacgctcgagcacctacttcgcatcatcgacgggttcgcaaggggcgaggagaattccaagcgacggcaagctatacaagctgagtacgacaaagcctccatcgccgctgctcaagctcaagcacaagttcaagttgccgaaccacctccccccttcattcgccagtctcagccggcgatccaaggacaaccgccaaggcaaggccaagcccccttaacttggagaaagttcagaacagaccgtgcaggcaaagctgtgatggcgatcgaagaagtgcaagccctccgcaaggaattcgatgcccagcaagcgagcaaccatcaacagccagcccgcaagaagcgaagggtaatccaagtgattacaagggctgacccgccaagccagttgtccaaacggcagaagaagatgcagatccgtatgatccacagcatcactttggcgggtgagggggcgccgcagtatctgaaccagctaatttctttcgggccggaagacgcagaaggagttatgttcccgcatcaagatcccctggtaatctcagctgagatagctggtttcgaagtccgacgaatcctggtcgacggagggagttcggccgatgttatcttcgccgaagcatatgccaagatggggtttcctacccaagcacttaccccagcaccagcatcgctccgcggtttcggcggagaagcagttcaagttctcggccaagcacttttgctgatagcctttggctcaggggagaacagacgcgaagagcaaatactgttcgacgtcgtcgacatcctgtacaactacaacgccatctttagccgtgcaaccctgaacaagttcgaagccatttcccaccacaattatctcaagctcaagatgcccggcccggcaggggtgatagtagtcaaggggcttcagccttcggccgcttcaaaaggcgatctagccataatcaacagagcagtgcacagtgttgagaccgaaccgcatgaacggccgaagcacacgccaaagcccacccctcacggcaagataacaaaagtgcagattgatgatgccgaccccacaaagttcgtatcactagggggtgatataggcgaagaagaagttgagagtatcctagaggtgctcaaaaaaaacatcgatatcttcgcctggagccctgacgaggtggggggtgtcccggtggatctcatcatgcatcacctagcagtcaagccggacattaagccaagaaaacgaaagttgcgcacgatgtctgccgatcgccaagaagcggcgaaagccgaagtgcaaaaattgctcagggcaggggttatccaagagatcgaccatccggagtggttggcgaatctagtgctggtgcggaagtcaaacggcaaatggcgcataatgcctttcggcttaaggaacacaggagaaactttcgccaggctggtgtacaaggtccttggcaggcagttggggcggaatgtggaagcttacgtcgacgacatcgtcgtaaaaagccgcaaggctttcgaccatgcgatcgacctacaggagacattcgacaacttgcgcgcagcaggcataaggctgaatccggagaagaaccgaactgctattatacttagcagcttcgccggtggcagtcagtgctgccctcgtccaagaaatagagttcagacaaaaaccggtctacttcgtctccgaagcactgcaaggagcgaagacaaggcccacaaagtcatagtgccatcacagtaccccttgggcgaaatactccgaggcaaggaagtcactggccggctcagcaagtgggcggcagagctatccccgttcgacttacattttgttgcacgctctgctatcaagtctcaagtgttggccgacttcgtagctgaatggacagcggtgatgtgctctgacggctcgtggtcgcacaagggagcaggcgttgcggcagtcctattttcgccgaatggtgtgccgattcggtacgcagcaagactgcagttcgacacaaccaacaatgcagcagaatacgaagccgttctcctgggcctaagaaaggcgaaagcactaggaatccggcgcctactaatccgaactgactccaagttggtaacaagccatgttgacaaatccttcgaggcaaaagaagagggaatgaagaggtatctggaggctgttcagtccatggaaaaatgcttcaccggcataacggtcgaacacttgcctagagaccagaatgaggaagcagacgccctggcgaaatccgctgcttgtggtggcccacattcgcctggcatctttttcgaagtcctgcatgctccaagtgtgtccatggatagctcggaagtcatggcaatcgaccagaagaaactgggcgaagacccgtatgactggcgaaccccatttgtaaagcaccttgaaactggctag

SEQ ID NO: 35696 - DNA, 1302 bp, Oryza sativa
  Clone ID: PAT_MRT4530_39593C.1
ctacggggctcccttctacacctccgactacatcttttttttgagaaaaagtcaagcgtcatctattaaaaaacggaggttgtacatttgaggttccatacaataaggcagtacaagatttacaatggcgtaactatagctggccatgtacaattcatttctgaacattatttatttatttccccttcccatgtgattgttacacagttccttcttttttcctcagaaaccagaccgagagcttccccagtaccattgattgcttttacaactttgacttggggcggctcactgttgcttcaatggtcccgtgtggttcatcggtcggcaggtacacatcatcagcaaacttcactaatcctggattttctttgttccctaagttaacagggataaagtggaggttcggcatccttagctgaacagatgctatatccgggaacctgttgagaacttccttagccatcaggtatagtgtattctgcactgatggactatacactccaacatcaggaggaccaaagaacgtatctgcaagaactttctttacgtcctgatacctttgtgtgaagcagaatgactttgatggaatctgggaaacatgctcaaaaggatacctccaccaggcagttacttctgttgctacaatcctttctcttgtatcaggaagaagtgtgtagcgatccctcacaaatttttcgaacccggactgagttgtctttagcagggagtatccttggattccagaatttatgagcaagtttccagacttcttcacaatgacctctgtgacgtgcttctcaacaccaagtttgaacccgtgggaatgaggcttcccatcgacaaccacacgctcccatggacgctcggcgatggtcaccgttgcctctgagacctgcgggtacagcgaggtgaaatgccttccaagaatcaccgcgaattcctccatggagacaatctccgtgcattccttggccttcacatacacggtgttcttgatggaatcggtggcgacgatggcggagttgtcgtcggaggtgtaggaggggaggcagtcggagacgacgctgacggccacgttccactcgacgatgacgtggcctcccgcggccgcggggcggcgccagacgcgggagacgcggacgcgggacttgccgtgcctgccctggagctcgaggcgatcggccatggccaccgcaggggagggaggggtcagaggctcaaagcaacggatccgatctgtgcgagtgcgctctgcgctgtgcggggcgagctgctcccacgcgtccgcggacgcgtggg

SEQ ID NO: 35697 - DNA, 498 bp, Oryza sativa
  unsure (1)..(498): unsure at all n locations
  Clone ID: PAT_MRT4530_39594C.1
ggaaaagttgggtactcgattgcgtttgaaagctccaccgccgtggaggcgctctaaactatggatcccccgggctgcagaattcggcacgaagccataaccctaagctcgagcgctcccttcttcccccccacctctgcggcggctgcgggcggctaaaatggccaaattcctgcggtcgaaaacgggaaaagcgggctgcccaccctgcggtggaatatcgccccagccctttcctacaaaaaaaaaaggaagggggccaaaacctctcccccccccatggcccccccccccttctcaaaggggcccccccccctttttctggggttcccggggtgcccctcccggcgtggttttctctataagaaatttcccggggggggttttcccctggctcctcttcttccccatttcttggggggattttttggggcctttttgagaatattttttaaaaaatgggggggaatttaaaaaggaaatattttcngttttttt

SEQ ID NO: 35698 - DNA, 1860 bp, Oryza sativa
  Clone ID: PAT_MRT4530_39595C.1
atggacgaggacgaagttagcttggaggagatggaggagtataacatggttgctagtaagctttttagaagcgaggaagatggttacaagttttacaatgaatatgcaaggtgtaaaggttttagcattagaagggacaaagtgaagcgatttagtggtaccgagctagtgttctggaggcgattttattgctcatgtgaaggttacaggacgttgaagaactttgagagaaccaataggaaaagggagccacgtgcgttgacccgctgtgggtgtaaggcaatgcttgaaattgagctcaatggagagacaggaatgtggtttgtatcaggttttgaagctagacattcacatagacttgctaaccttgacctggtagctttcttaagatctcatcgtgaggtaaatgatgctcaaaaagctgaggccgtggagcttggagttggcgggcttcgaacatgtcaaataatggaagtaatggagaataataatggtgggtatgataaggttgggttcgtaacgcgagacttgtacaatttttttgcccggtacaagaagaagagaattgaaggtagggacgctgatctcgtggtgaaccatctgatggctcagcaagaacaagacccagattttttctttagatacagtatagatgaaaagggtcgtctgaggaatttattttgggccgacagtcaatcccagcttgactatgaagcattcagtgacgtggtaatatttgatagtacataccgtgtgaaccggtacaatcttccatttgttccttttgttggagctaaccatcatcgaagtacagttatttttgggtgtggtatattgtcaaatgagtctgtttcttcatatgtttggctgctgcaaactcttttggaggcaatgcaccaaaaacatccgaaatcattgatcactgatggggatgcatcaatggcgaaggcaattaggaaggttatgcccaatactgatcatagattgtgtagttggcacattgaggagaacatgaaacgtcacctccgtcggcaaaagcttgcagattttaagaaattcctttatgatgctatggatgttgatgactttgagagatgttgggttgagtataaagcgaagtatggattcaatgaaaataacttatggataagcatgataatgtccaagacattacaagagacagcgaggagagcaaacaatcagaatcatgcatccctactgataaggggctacaaagaagaaaccaaagaatgcgcaagcaaagaatttaatatccaatgttcacttacagatttaacttcaatggcagagttcaagtgcaccgcagaagatgaggaaaccattaaaagtataatgagtgcaccagaatcacaactagtggtgcatatcgatgatgtctcaatttcccaaaaaacaatgcaaattctgactaatccagtgactgaatcaagtacgagctatttggatgatcacattttcctccccatgaacataaaagaaaaacatcggtacctggcagtcatacacgccaaacgccgcatcatccaagtgcttgactccatggcgaattcatccacacaacgcaaggaactaagaaaagttctgttggaaccagaagaaaagcacatagcaacacaatggcctgaccatcatattacttcctgggaagtcacggtcatacagaatttgccattacaaggagatctcgtctcatgtgggctctttgtactaaaaaacatggagcactggcaaggcaataggttgtcgaaggaatacacgcatgaagatataaaatattttagaaggaagttagctgcaattttggggggtgctcagaagaaggataaaaagataaactaa

SEQ ID NO: 35699 - DNA, 850 bp, Oryza sativa
  unsure (1)..(850): unsure at all n locations
  Clone ID: PAT_MRT4530_39596C.1
gttcattagtactacaaccaacatggcatanccataaataccccccatagttttcttcacagtttgcttgttcctcttgtgcaatggctctctcacgcccacgcacgctcatccaccgccaccacgcactcacctccacatcgcgccaccacctctcctccgctcccctcgcgcacacctccccacacccaccacatcgccacgcgctctccgcantacgcggttngccaaacgccatttctggacgccccacactctccgcgcacgctcgtgcacgcggtcctccaaaagccctcggccaaccacacctcgnaagcttccctctcccgaactcgntcctcctacactcgcacgccacacttctccacactcgctaccccgcgcacctactcctcgtctcgctccccgctccccacctctcatccccacaccccccaccacccgnccctctcctaccctcaccccccccaatctaacaccctananttgcggttgccantcctcntaacgatantaatanttcaatccccacaccgcgcaccaccgctactacaccaagggggcccaaaccctttttcccccaagggcctggttccctgaaagatcccctaacccaaaccaaaccacggttttccaaaacaaaatcaaagggcccaaagcccccacaattgaacccgaaaaagatcaaaaagccccaaagttcaaaaaagttttcaaagggaatgaaaacactctaaaaaagactcccacccggttttcaagaacaaaggggagaaatgttaaatttgccatttgcccctgcctgggtgttagccntcaatttgggtgcctacaaatgaatgggtgaaaa

SEQ ID NO: 35700 - DNA, 572 bp, Oryza sativa
  Clone ID: PAT_MRT4530_39597C.1
cataatctcccccaacctcgttaagggacctgcttttgctgatgcgaaaaacacgaggcgtgagagatctgcttaactccagtgctggtccaaaaatcttgcctttaggttcgtgagcgtgccagttgatttgatcaaaatatgtcaatgtcgaacacgactcttatctctaacaaactctaagataccataagtctttgcggctgacttttactcaaacgagtcatattgtcggaatcggcttaatcggctaaccttgtccgactcgcactctgccgatcctgatcgcggccgattcggactttagccgattcttgctctgtttccgaaacgatctccatcttggattccgcttcagttttaccttaacctccgatagttgaattaccaaatttggttattaagagctttgcaccggttttagtagttgagggacgcttcttgcttttgctcgatcgatctcggctcaaactaatgtagtggattccattcctccagcgctgatccctctctccgagttccgggatccgacggcgatgcagcagtacggcgtgcactgcgacgccgaggtg

SEQ ID NO: 35701 - DNA, 1893 bp, Oryza sativa
  Clone ID: PAT_MRT4530_39598C.1
agcgatagaaaaatcacatttttctcgcgtcgtatgcccctcttgcaattctgtgcggaggcagatatacacctcctttaagtaaagttgcagtatgaccttgctgcatactactacagaacaaaagctatttacatattggtgttgatgtattcagagcattgtcaaggcaaatcatgattagagacgcctaaatcagcgaatataggggggcgacttcgataaatcctccactgaaggcagcactgcagcagaagccattctacatgcttacggctgctctccagagtggttcaaacttgtaccgacgctcgaggtagagcttatcatttcagcactcagctctcagctcaaccgagagatcattgtacaaaaccccaagcatccattatggtccaagtctgtaactagttgttcatctgttcatctcacaagctgactgaggagcttcagaataaaccacatcattcagcttaattctttgcttcggcaacgtgaaaggtactcggtggcttcattgaaatcaggaatgcggcggtagtctggttctatgccatttccatttatgtctttgtgatttggtgtcacatacttgcccactgtgacgacaatgccagaaccgtcatgaagttcaaatacggactggattaagccctttccaaaagttttttcaccgaccagaacagctttgcagttgtcatgaagtgctgaagcaactatttcactggcacttgctgtcctgttattcacaagtaccataagaggagtagtaaccaaaggttccctttcagcaacaattgtattttgtacttgacgatcacgaccagcagtataaatcaccttcattttgatgtagtatccatgaacagtaacttttagcgtgtctcctttattcaggaagagctttgcagtctctatcccagcttggactagtccaccaagattgtccctcaaatccaaaacaaaataggaggcacctgagttctgtagacgctttagtgcactaaccaaatcttttttggccactgcattgaattctttaatgtgaatatatcctatagctgaatcctcattttctcttttctccaatcgatagaaaactggtgtgcgagcaaccagttgtctctgtaccttcaatggctcaacaggaccacagttcccatgcttaaccttaattgtaacaaaagtatcttttggaccttgcaacatggatgacacatcaaatgcagatttacccataacatcaatgccattgactgacaaaagttcgtcaccctgtctaacaccagcagagtgggcaggcccatctaatatgagccctaataccatcaacttggaagagccattgccgtcaggaatttctctcaagtttaatcctattcccgtcatgtcatattttgacatcttggagaattcggagggagtcaggaaccttgtgtatgggtcacccaggttagccagcattttctgaatgatatcatgggctctggaacgggatctgattgaggtttggacaatatcttgcttctttttcatccacatctccggcgaccagggacggcttccggcgtccgggaggaacccctcgttgaccacctcccacgcctcctccacgagctgctcgttcgtcaccacttcgctcctcctcacctcctccttggtctcggcggcggccccgtcgcggcagagctcggggccccgcggccgctccgcccccacggcgtcgccggtgaggagggagagggagatggacatggcggccgccgtggccgcggcagcggcgcggagggcgtcggggaaggggagcgcgcacggcggccctggcttggtcctgcgggtggcgagcgagcgctgcggcggccgcggcgacggcgcgtaggggagtagccgcat

SEQ ID NO: 35702 - DNA, 652 bp, Oryza sativa
  Clone ID: PAT_MRT4530_39599C.1
actaatataggaaattggatccctcgaggccggccgggggcgccggcgttaattccaagaaaagaagaagagaagaatctgaaaaactttaagccgctatgggtctgcaggaggattttgagcagtacgccgagaaggcgaagaccttgccggagagcactagcaacgagaacaagcttatcctctatggactctacaagcaggccaccgttggagatgtcaatactgctcgtcctggcatattcgcccagagggacagggcgaaatgggatgcatggaaagctgttgaaggcaaatcgaaggaggaagcaatgagcgactacatcaccaaggtgaagcagctcctggaggaggctgctgctgcagcctcttaagaagttatgaactctatgctacatggcttctgtcagctgaacaactctatgctaatctggttgctgacaacttaccattctatcaattcgggatgtgaactatgtacctctttgtgtactgttgcataatttatccatctatttatgaagactattagtcctatgaatcatattatcttgtaatctttcatctctctggctgtgtactgcacaatagaaaaataatggttgtcaagccagaaacatgccccaaaaaaaaaaaaaaaaaaaaagcggcc

SEQ ID NO: 35703 - DNA, 1078 bp, Oryza sativa
  unsure (1)..(1078): unsure at all n locations
  Clone ID: PAT_MRT4530_3959C.1
ccggccgggactagggagcgaatgttcgctccattgctgttcccaaaccctccaaagtccaaacccctcctcctcctctccaacgccataaaccacagagagggggagaagaagtggaagcgtgagccgccgcagccgcacgcgatgcagcagcagccgatgccgatgcccgcgcaggcgccgccgacggccggaatcaccaccgagcagatccaaaagtatctggatgaaaacaagcagcttattttggctattttggaaaatcagaatctgggaaagttggcagaatgtgctcagtatcaagcgcagcttcagaagaatctcttgtacttggctgcaattgctgatactcaaccgcagaccactataagccgtccccagatggtgccgcatggtgcatcgccggggttaggggggcaatacatgtcgcaggtgccaatgttcccccccaggacccctctaacgccccagcagatgcaggagcagcagctgcagcaacagcaagcccagctgctctcgttcggcggtcagatggttatgaggcctggcgttgtgaatggcattcctcagcttctgcaaggcgaaatgcaccgcggagcagatcaccagaacgctggcggggccacctcggagccttccgagagccacaggagcaccggcaccgaaaatgacggtggaagcgacttcggcgatcaatcctaagggctaagttggcctttcaggtcgcgacgaaaaacaaaaaaaaaacatgtaggcaacgactgagtggagaggggatcattcctgtgcccttgaacggtgagtggccgtgatcttcgcctgatgatggtcagtggttgttacatttacctgtgtttttgagactttcagtctggtacaaacgtagattgctgcaaggatttgtgctttggttttgactcagaaaaaaaaaaaaaaaaaaaaaaaaaaaaaaaaattggcctcgtccgatactgttggctgctggaatttgttgccggctggaggaatagacggcgttagcacctggtgttttgtggctnaaaaaaaaaaaaaaaaaaaaaaaaaaaaaaaaaaaaaa

SEQ ID NO: 35704 - DNA, 1187 bp, Oryza sativa
  Clone ID: PAT_MRT4530_395C.1
atgtcggataaaactgggttcaaaaccaccgaaggatctaaaatgaacggttttgaaaaggtgttcgaagggaaagggaacgggtctgaatttgatacatctgatttttggatggagctttgcatgcaatgtatggatgagttaatatttttgttggcaccagaatcaaaatattatgataatcttaattataagctgaaacaagcatgcctaacactccgagttttctcattgcaagctaccaagaaagagaaacatgcgaggggtgggggagctgaggaggtggcgactggtgtgggggaggcggcagccgttgtggaaacagaggaggcagtggttggctgtcttccaggtgggcgtgaaggcagccggtgtcgagggcagcgtgaaggcggcggctgttgtggaggcagaggaggtggaggcaggtggtcttcgaggagagtgggaggccggaggcggttgatgatcgacgtcagggaggcatcacttggcggtgtaggaagacagtgcggtggaggctgtcaatggaagccggcagtcaagggcggggaggtggagcccggtgtcatggatatggagaggtcgagggcagggaggtgctgctcggtggaatttgatgatggcgggaggagacgcctgcggggaagccggcggacggagcagaggcggcgatgcgcgatgatgataccagcggctgtggcagtggccagcggatgaaggtggagagccgtcgaccggaggggaggccggcggcggcacaggagggggcgagcgccgtcagcaagggaggcggagggattggagggagaggaagagggggcgggggaggtgagagggagaggaggaggggggattgagggagaggtggagggggcggatcgagggagtcacctgcgagggaggtggagggagcacacagggagaggagataaggagggagggggagggcgggagcgagagagagggagggagtttcggaggagggggcggtggtgctagcgcaggcgggtggatggatggaggcagcggctccgcaggcacacagagggagagagcggcggtggcacggagggacgagtaggacgagcgtggggagaagattatggtggtgttgttctcggcttcctcttacacatatacctattgcatttatcactctttcttaaataacctttagcacaaca

SEQ ID NO: 35705 - DNA, 540 bp, Oryza sativa
  Clone ID: PAT_MRT4530_39600C.1
atggctaagtcggcgtgggccccacatgccggcccacgggcacaaggtgggagagagggagggcggccagcggtggccggcgatggccgacgcgggaaaaggcaagacgatggctcctcctaccgccggagaagacgagagggagggtggccggtggcggccgatgctagggcggctgcggccggcgatggccgatgcgcaagaaggggagacgacggctcctcctaccgccacaatgacgccgtccattcctccctcctcgccgaggccttcgcctccgatttcctccgctccctcctccgccgcatcctctcgttcgcctcctcaccttcctccctccatccaccttcccacgccggccctcccccgtgcagactggcttcccgacctcccttgctgacctcgtcatcaagaaccatgatcgcccaggcgtcgtcgcccgatgacggccaccgccccgccatctcccaccactgcgctcgttggcgttgggtcctcctcctgcctcctcccacggtggagaccggcagacgtcgctaa

SEQ ID NO: 35706 - DNA, 621 bp, Oryza sativa
  Clone ID: PAT_MRT4530_39602C.1
atgagcaagcggcagtttggagagatggacggcggcatcgacacggcccgcgtcctcatgctcctctcccggcggcggcggcagcacggcgacgtcgggcacgcgcgcgcggcccgcgtgttcgagtgcaggacgtgcgggaggcggttcccgacgttccaggcgctgggcggccaccgcgccagccacaagcgcccgcgccacggcgccgagcgcgcgccgcggccagcaggcgacgacgacgtcggcgccggcgccggcgccgcgctccgcctcgtcggcgcggcgtcgtcgttgtcgacggacgaggcgcgcgcgggaggcggcggccgcaggacgaggggcgccggcgccgcgcacgggtgccccgtctgcgggctggagttcgccgtcgggcaggcgctcggcgggcacatgcggcggcaccgcgccgccgccggcgacgtcgcggcgccgcgtgtgaagaccgacgacgttgtcgttggagacgagtgcaccggcgggatttgcttggacctgaacctgacgccgtcggagaactgcgacaagtgccggcacgcccagctcggcgtcgccgtgaactctgtgcaaagaacgatactactggaccgtcccctttga

SEQ ID NO: 35707 - DNA, 737 bp, Oryza sativa
  Clone ID: PAT_MRT4530_39603C.1
gctgcaggttctttgagtatgagacagatgaggccggtcgtttgaaaaggttgttttggtcagaccctcaatctcggattgattatgacgcgtttggggatgtttttgtatttaacagcacctatagggttaataagtataaccttcctttcatcccttttgtcggtgttaaccaccatggttcgacagtcatatttgcatgtgctatcgttgcccccgggctgctggcaacctatgaatggatcctgaagcagtttttggattgcatgtgtcaaaaacacccgaaaggactgatcacagatggagataatgcgatgcgcagagcaattgcatctgtgatgccacattcagagcatcggttgtgcacatggcatatagaacagaatattgttagacatctcagtccagccatgctttcagattttcgatcacttcactctacgtatggtccagaagagtttgagaaaaaatgggtggagttcaaggttgttcataaagtgggcgaagacaaccaatggcttatgagaatgtacaatttgaggaagaaatgggcagctgcttatactaaaggtatgttttttctaggaatgaaaagcaaccaatgtagtgaaagtctaaactctaaactccataggtgtttggatcgtaaattcagcttggtcctattggtggagcattttgaacattgtttgtcgtgtatgagacatagggaggccgagctggattcgaaagcttcg

SEQ ID NO: 35708 - DNA, 689 bp, Oryza sativa
  Clone ID: PAT_MRT4530_39604C.1
cgcacttgcgccacgagaacgtgccacgtgacgtgtgttcttttgacgcaagcatgagccaggggcagccgaggaggccgccgcccgacggcagcggggcccggccggtgatgtacggcgacgtgttcgacgtctccggcgagctggccgggcagcccgtggcgcccagggacgccgcgaagctgcagtcggccgaggaggccgtgctcggcgaggcgcagaagggcgggcccgccgccgccatgcagtccgccgcggcgatcaacgcgcgggcggggcacgtcgggcgcgcgcaggtcaccggcgccatcgccgacgagggcgtcgccgtcgccgtcgccgagaccgagctccccgggcgccgcgtcgtcaccgagtccgtcgccgggcaggtggtggcgcggctcgccaccccgccgcgggtggtggccacccagccgtccggctctctggacaaggacgccgtgacgatcggccgcgctctggagtggcggccgcgaccgccgcggcggcggggggcgaggggcaagctgccggcggacaaggcggcgacgagggaggacgcggagagggtgccgtcggccgaggtgcggaacaggccggacatggcgacgacgccgggcggcgtggcggacgcggtgaccgcggcggcgcggctcaaccaggagcgcccgacccgtagcttttag

SEQ ID NO: 35709 - DNA, 758 bp, Oryza sativa
  unsure (1)..(758): unsure at all n locations
  Clone ID: PAT_MRT4530_39605C.1
ggaccaacaaangtnngttttccctaattcatatcatcagagccatcataaatgatagaacttattactgttgtttcaaccatagttttccagtgacatggatgaaaatggatttctaacattacaatgctgaggcacatcaaatacactaggtttacaacatgcaagagcagtatatggtccttttggttcagggatgtaaatctaatctaccatatccaaactgttgcttcaatcaatcaaagtcagtataagcttcctgagcgacgtgggttcgattctggcctgatgggttcaccggtgtagggatcaaacttgtatggttcccctgtgaatggatcaaaccttacttgttggcgagcagtagagtattcagcagatgacctggagctgaattctgggactatgtttgtgttgtaccttgaagcagataagtatcctccttccctagatgaaaaagctacttgagctgatctctcaatattcgaattccgttcttgtacgtaccctagatcgagatgccttccagtatcctgtcttggttcatgtgcaaatcttggttctggatatctttcaatgcggactatttcctcttgccgtgatcttgaatctggatatcttacaagatcaggtctgtattcatcataccttctattccttgacgggaacgatgcgggatcagagcgataagatgaggaaggataatcacctaaggaactgtatctactactcccggatgctgtgtactcgtaatcttg

SEQ ID NO: 35710 - DNA, 831 bp, Oryza sativa
  Clone ID: PAT_MRT4530_39606C.1
atggccgccgccggcgaccataggggcgcgggcgccgcctcctgccggccgcgccgagtggccgccttcgggcacgccgagtggccgccgcgtggggcccggccgtcagccgcccgcgccctcggggcaaatgaaggctacacgagctgcggcccggtagtcgagatgtcatggcacagggccggtgtcctgctgctaggggctcagtcctgcctacctgtcctgggggttccggccgtaggtggggttgggtcgatggccggcagcatcaaccgtcgtgtgatcctcactggctcacccgagaggacttcgttggcagtcaccgcgggtggagattccttctccgccgcttgccagaacgccgctctcctcgccatcggcactcttcaccagcgctacccggacgagttgcagcactcgccctaccgctaccaccctcgccgcggaggagcccgcgactacgccaccttccgggatgctagctcggaggatgacgctaccatcatgcacctggcgcgcatggtggaggcgtacgacgcggctcgtatcgacttccatcatatggtgcgccgtgggatggtcgagaacaacatgaagatcctggagctgcgtcaggagaatctgcagctgaagaaggacctagacgcagtggaggcgcagctgcatcagctcaagattgcccagggagagtccctggcgtggacctgcttcgtggagacccctcgtgccgagcccgcgcccgtggttcctcaggagggggaagcctccggcgttggtagcacggaggatgcgctgttgctcaccttccgtcctggaccgtcgcagcggtag

SEQ ID NO: 35711 - DNA, 2436 bp, Oryza sativa
  Clone ID: PAT_MRT4530_39607C.1
atgtcatggcacagggccggtgtcctgctgctaggggctcagtcctgcctacctgtcccgggggttccggccgtaggtgggattgggtcggtactcttgtctatggctaggatgggttggaaactatgtcacgtcttccgtctgtataccgtggtgatggccggcagcatcagccgtcgtggtctggacctgactggcttcgtcttggagctgcggggcatgtgcgttgtcctggggtatccgcatggagtggactaccagggcaggccactcccggagcaggagggtgacgatgcagagccccacgctgcttgggagaggacttcgttggcagtcaccgcgggtggagattccttctccgccgcttgccagaacgccgctctcctcgccatcggcactcttcaccagcgctacccggacgagctgcagcactcgccctaccgctaccaccctcgccgcggaggagcccgcgactacgccaccttccgggatgctagctcggaggatgacgctaccatcatgcacctggcgcgcatggtggaggcgtacgacgcggctcgtatcgacttccatcatatggtgcgccgtgggatggtcgagaacaacatgaagatcctggagctgcgtcaggagaatctgcagctgaagaaggacctagacgcagtggaggcgcagctgcatcagctcaagatcgcccagggagaggtctgtcgccccaagcgtcgccgcgtctgccgcagccagaagatcacctcccgcaagagtacctccaggcccgagcttgttcgtcagtccctggcgtggacctgcttcgtggagacccctcgtgccgagcctgcgcccgtggttcctcaggagggggaagcctccggcgttggtagcacggaggatgcgctgttgctcaccttccgtcctggcccgtcgcagcggagaagtgctgccaccggtgatggcaaccaacctgaaggcagtaaccacaacaaccatggcagcccacctccacctcctcccccgcctccaccaccaccaccagacaccaacgccattctcacccaaatcctcgcccagcaggccaacatgatggctgctttcctccaccacatccaaaacccgccacaacataatgctccaccaccaccccgacagcactctaaactcgccgagttcctccgcatccgcccacctaccttctctagctccaataaccccgtggatgcgttggattggttgcatgccgtggggaaaaagttagacaccgtacagtgcagcgatgaggagaaagtcatcttcgccgctcaccaactgcaggggcccgcatctcaatggtgggaccatttccaggctacgcagccagaggggcagcctattacgtgggcccgcttcaccgccgctttccggaggacccatgtgcccgccggagtcatggcccttaagaaaagggaattccgagagttgaagcaaggcaaccgctccatgatggagtatttgcatgagttcaacaacctggcccggtacgccccggaggatgtacgggaagatgaggaaaagaaggagaagttcttggcaggaatggaccctgagctgtccgtgcgcctggtctccggggactattcggatttccaacgtctggtggacaagagcatccacttggaagccaagcacaaggaactggagtcgcacaagcgtcgcttggcgaatttccgcaaccaacagggtgctaaccaaagagtccgctacaccaatccctatccagggggatcctcctcacagcagcagcaacctcgctccgcgccccgacctcaattcgtggtgcgtgtcccacagccgcagcaatagcagagtcagcaagggactcgtgcgccccgtcctcctacgccagccgcgcagtctggtcaaggccgcagggacgttcaaggtccgcagcgtctgtgcttcaactgcttcgagcctgggcactttgcggataaatgcccaaagccgaggcgccagcaaggccaagcgcctccccgctccaacaacggtggtaaggatgtcattcggggtcgtgtgaaccacgtgacggccgaggacgtgctgacaactccagacgtcatcgttggtacgttcctcattcattccatccctgctaccattttgttcgactctggagcttcccactcgtttatatctgtgccattcgtggggagaaatcagttgggggtagaaaggcttaggaaccctctgctcatcaccacccctggaggggttatgacagcaaagtattatagccctgccgttcctatagaaattcagggaattccttttccctcggatctgattcttctagacaccaagaacttggatgtgatccttgggatgaattggttggctcaattccaaggagtagtggattgtgcaagacgcactgtcaccctgtaccgagggccgaaacaaccg

SEQ ID NO: 35712 - DNA, 177 bp, Oryza sativa
  Clone ID: PAT_MRT4530_39608C.1
atggcttcgcacgacggcaacggcggcagcctcggcggctttgtcccaggcgaccaggctaattccgcgcctgagttacatcaggccaggcaaggtggaaggagcctcaggtatgaagatgatgatgatctagctttcaactcgtgcaccaacagcaggcgatctggttgccggtaa

SEQ ID NO: 35713 - DNA, 1368 bp, Oryza sativa
  Clone ID: PAT_MRT4530_39609C.1
atggacatctctaggacaaatgaaggctacacgagctgcggctcggtagtcgagatgtcatggcacagggccggtgtcctgctgctaggggctcagtcctgcctacctgtcccgggggttccggccgtaggtgggattgggtcgatggccggcagcatcagccgtcgtggtctggacctgactggcttcgtcttggagctgcggggcatgtgcgttgtcctggggtatccgcatggagtggactaccagggcaggccactcccggagcaggagggtgacgatgcagagccccacgctgcttgggaggttactgcagtgatcctcactggctcacccgagaggacttcgttggcagtcaccgcgggtggagattccttctccgccgcttgccagaacgccgctctcctcgccatcggcactcttcaccagcgctacccggacgagctgcagcacttgtcgcgaccgggaaaattgccttttcccgaacgctaccgcacccgcgggcgcgggcggctgacggccgggccccacctggcagccgcggggcgcgcccgaaggcggcctcgccggcacagccgacgggaggcggcgcacccgcgccccgatggtcgccgccggcgaccaacggcgcggcggagcggcggccgagagaggggagggaagagggaagcgaagcggcggtccttggctcaccccgggacgacgaggacggcggaaacgacaaccggagcggaggaaagcggcggcgcggttcgggacggtgaggacgacggtgctccggcggtcggcgggcgaagcggaggagcggacgaggtcgacgacgacgcggcgaagccgatggaggtgacgccgagacaggaggagcactcgccctaccgctaccaccctcgccgcggaggagcccgcgactacgccaccttccgggatgctagctcggaggatgacgctaccatcatgcacctggcgcgcatggtggaggcgtacgacgcggctcgtatcgacttccatcatatggtgcgccgtgggatggtcgagaacaacatgaagatcctggagctgcgtcaggagaatctgcagctgaagaaggacctagacgcagtggaggcgcagctgcatcagctcaagatcgcccagggagaggtctgtcgccccaagcgtcgccgcgtctgccgcagccagaagatcacctcccgcaagagtacctccaggcccgagcttgttcgtcagtccctggcgtggacctgcttcgtggagacccctcgtgccgagcctgcgcccgtggttcctcaggagggggaagcctccggcgttggtagcacggaggatgcgctgttgctcaccttccgtcctggcccgtcgcagcggtag

SEQ ID NO: 35714 - DNA, 336 bp, Oryza sativa
  Clone ID: PAT_MRT4530_3960C.1
atggcgaggagacgaggtggtgccgtggtggtgggcatcggcgcggcggtgatgtgcaacgggcgggagtgcaagcgggagtccgcgttccgcgcggcgtcgctgctgcgggagcgcgacgccgccaagggcgagcagcagcagcggcagccttcggtggacgggcgcggccggcaggcgacggaggcggaggcggaggcggtgacgatgtcgagggcgagggcgagggcgagagcgagagcgtgggaggcggaggtgcggaggcggcacgcggcggagacggagatcatgaagacggagaagatcatgcacctgctgctctgggggcccaactga

SEQ ID NO: 35715 - DNA, 2832 bp, Oryza sativa
  Clone ID: PAT_MRT4530_39610C.1
atgtcgtggcacagggccggtgtcctgctgctaggggctcagtcctgcctgcctgtcccgggggttccggccatggccggcagcgtcagccgtcgtggtctggacctgactggtttcgtcttggagctgcggggcatgtgcgttgtcttggggtattcgcatggagtggactaccagggcaggacgctcccggagcaggagggtgacgatgcagagccccacgctgcttgggaggttactgtagtgatcctcactggctcacccgagaggacttcgttggcagtcaccgcgggtggagattctttctccgccgcttgccagagcgccgctctcctcgccatcggcactcttcaccagcgctacccggacgagctacagcactcgccctaccgctaccaccctcgtcgcggaggagcccgcgactacgccaccttccgggatgccagctcggaggatgacactaccatcatgcacctggcgcgcatggtggaggcgtacgacacggctcgtatcgacttccatcagatggtgcgccgtgggatggtcgaggacaacctgaagatcctggagctgcgtcaggagaatctgcagctgaagaaggacctagacgcagtggaggcgcagctgcatcagctcaagatcgcccaggaagaggtctgtcgccccaagcgtcgctgcgtctgccgcagccagaagatcaccgcccgcaagagcacctccaggcccgagcttgttcgtcagtccctggcgtggacttgcttcgtggagacccctcgtgccgagcccgcgcccgtggttcctcaggagggggaagcctccggcgtcagtagcacggaggatgcgctgttgctcaccttccgtcctggcccgtcgcagcggagaaatgctgccaccagtgatggcaaccaacctgaaggcagcaaccacaacaaccatggcagcccacctccacctcctccaccgcctccaccaccaccaccagacaccaacgccattctcacccaaatcctcgcccagcaggccaacatgatggctgctttcctccaccacatccaaaatccgccacaacataatgctccaccaccacccccacaacactctaaactcgccgagttcctacgcatccgtccacctaccttctctagctccaacaaccccgtggatgcgttggattggttgcatgccgtggggaaaaagttagacaccgtgcagtgcagcgatgaggagaaagtcatcttcgccgcccaccaactgcaggggcccgcatctctatggtgggaccatttccaggctacgcagccagtggggcaacctattacttgggcccgcttcaccgccgccttccggaggacccatgtgcccgccggagtcatggcccttaagaaaagggagttccgagagttgaagcaaggcaaccgctccgtgatggagtatttgcatgagttcaacaacctggcccagtacgccccggaggatgtacgggaagatgaggaaaagcaggagaagttcttggcaggaatggatcctgagctgtccgtctgtctagtctccggggactatccggatttccaacgtctggtggacaagagcatccgcttggaagccaagcacaaggaactggagtcgcacaagcgtcgcttggcgaattttcgcaaccaacagggtgctaaccaaaggatccgctacaccaatccctatccagggggatcttcctcgcagcagcagcaacctcgctccgcgcctcgacctcaattcgtggtgcgcgtcccacagccgcagcaacagcagagccagcaagggacccgtgcgccccgtcctcctacgccagccgcgcagtctggacaaggccgcagggacgttcaaggtccgcagcctctgtgcttcaactgcttcgagcccgggcactttgcggataaatgcccgaagccgaggcgccagcaaggccaagtgcctccccgctccaacaacggtggtaaggatgtcatttggggtcgtgtgaaccacgtgacggccgaggacgtgctgacaactccagacgtcatcgttggtacgttcctcatccattccatccctgctaccattttgttcgactctggagcttcccactcgtttatatctgtgccattcatggggagaaatcagttgggggtagaaaggcttaggaaccctctactcatcaccacccctggaggggttatgacagcaaacgtgtcaaggcagagcaccaacgaccggccggacttctccaacctctccaagtaccagaatggaaatgggatgaaattgggatggatttcatcaccggacttccaaaaacccaaggtagctcgatttattcctgtgaaggccacctatggagggaacaaactagctgagctctactttgctaggatcctccggtccgccgccgttgtcgccccggaccacctctcccctcggcgccacctccttcggcttcgccgcatccccggcgacctcgtccacccctccgtttcgctcgccgaccgccggagcaccgtcgaccccgtccacccgagccgcgccgccgccttcctccgctccggtcgccgtttccgtcttcgccgtcgacccggggtgagccgtggaccgccgcttcttttcccccttcccttcccctccctcggccgccgctccgccgtgcctatggacgccgccggcgaccataggggcgcgggcgcgccgcctcccgccgctgcgccggtgtggccgtcttcgggcgcaccgtgcggctgccgcgtggggcccggctgtcagccgcccgcgccctcgggtgcggctgacgcgtgggacccacggcgccggccggtgtga

SEQ ID NO: 35716 - DNA, 1772 bp, Oryza sativa
  Clone ID: PAT_MRT4530_39611C.1
ttacctcgcacttataaatgaggtcgcgatcacaccagccaaaacggtagatcaattcgtcgaacatctcgcgcgcgctccagtgacggcgagaacgaagcacgccggagttgggagagagagaaggggagagatgggggaggccgcggccgtgtccggcgacgctggcgcgcgcgcgcgcgtgcgcgtgctcgccgtgtcccgcgtcgcgccgtcgccggcgccggtggagcgggagcgcgtcgggctgtccttcttcgacacgccgtgggtcgtgctcccgccgatccagcgcgtgttcctgtacgagatgtcggcggcggcggcggcggacggcggcggtggggatgggttcgcggcggcggtcgagcggctcaagggctcgctcgccgccacgctggtgctttacctgcccctggcagggaagctggtctacgtggaggagacggaggacgtcgtggtggactgcgccgccgccgacgacgccgacgccggggtggcgttcgtcgaggccgaggcggaggacgccgccgccgaggacatggacgtgctcaggctcgccggcgacgaggcgcacgacgtcgcggcgttcctcgcgctcgtgccggagctcgacacccgggcgctcccggcgcccgtgctgtccgtgcaggccacgcgcctcggcggcggcgccggcctcgcgctcggcctgtccgtgcaccacgccgtcgccgacggccgcgccgtgtggcagttcatggaagcgtggtcgtcggccgcgcgcgtcggctctccggtgaccaagtcgctcggcgcgccgcactaccgccgggaggcggccatcccccaacccgacggcggcgagctcgcgcgccacatgctcaagttggtcgcgcccaagctcccggccgtggcgagcggggatcagcaggacttcagccagcgattccggctggctcgccggacgttccacctcggcgccgacgccatccgcgcgttgaagcggcgcatcgacgagctcgcctcggcggaggaggctgccgatggcggcggcgccgccaagccggtgtcgacgttcgtggcgctggcggcgatggggtgggcggcgttcgtccggtccaaggcgctcgccgacggggacgacacgtacctgatcttcctcgccgacctccgggcgcggctcgaccccgccgtcggcgaggggtacctcgggaactgcgtgaggatgtgcctggcgcgctgcgccaacgcggcggagctccgcggcgagcgcgggctgctgcgcgcggcgcgggcggttcaggcggcggtggcggagatggaggcggcgccgctcgccgggacggcggacgggtcggcgatcgcgcgggtgatgcagatccccttctcccgcatggcgaacgtggcggcgagcccgcggttcggggcgtacggcgccgccgacttcgggttcgggaggccggcgcgcgtcgagctcgtgtcgatgaaccacgacggcgagatggtgctcgtcggcggccggcgcgacggcgaggtgcagctctcggtgtccatcgacccggcgcacgtggacgccttcaaggcgcaggtcctcggctagctgatgctactcagtgccataggagtaacatttgccatttggcactatcaattaattagttaataataataataatattattatttgtatttttgcctgtcttgtaatcaaacttgtgatgttagtgtcagaaatcaaagttaaacagcaaagtaatagttttttctactccaaaaaaaaaaaaaaaaaa

SEQ ID NO: 35717 - DNA, 2015 bp, Oryza sativa
  Clone ID: PAT_MRT4530_39612C.1
gaaaaggtttataaaaagaaaaaccctaaaagtcttctttccccccctttccctcgtgggccggctcggcccaactctccctccctctctctctcctctcctccgcggcacatcggcctcctccccgcgcgcgcgccgctgacaggcgggcccgcccaccaccctcgctgacgggtggggcccacctgtcatcccccacctcgcgccgcgcccgccgcccgcccgtgccctagcgccgccgccgccgccgaatccgccgcatcccgccgtccccgcgcgcattaaagtgggggggattattccccgcgattccctctcccgtttcccccactttcccctctctctctccctcggattcgctcggattcattcccgaaatcctcgccggcgtcatcaatggagccgagatctccgcgcccgtttcctccctctccggccgctctctctcactcccgacgctatataattgttccccgtgcctctctcctccgtttccgccgctcgccgctcgctctccccgtcggattcgtgctcgcgccgattgtacctctctctccgccgtcgccgccgagctccggttcgccgccgtcgtcgctccggacttcctcccgtctcggcgtcacctccatcggcttcgccgcgtcgtcgtcgacctcgtccgccccttcatttcgcccgccgaccgccggagcaccgtcgtcctcgccgtcccgaaccgcgccgccgctttcctccgcttcggccgccgttcccgtcgtcgccgtcgacccggggtgagccgaggaccgcctctttcgcttccctcgcctctccgctctctcggccgccgctccgtcgcgccgttggtcgccggcggtgaccatcggggcgcgggcgcgccgtctcccgtcggccgtgccggcgaggccgccttcgggcgcgccccgcggctgccaggtgggcccggccgtcagccgcccgcgcccacgggtgcggctgacgcgtgggacccacagcgccggccggcgtcagccgcgtgcacccggtccaccgtggaccgagaggctgacgcgtgggccccactcccgtggacccgggcaaatgaaggctacacgagctgcggcccggtagtcgagatgtcatggcagagggttggtgccctgctgctaggggctcagtcttgcctgcctgtcccgggggttccggccataggcgggattgggtcgatggccggcagcgtcacccgccgtggtttggacatgactggcttcgtcctggagctgcggggcatgtgcgtggtcttagggtacccacatggagtggactaccaggccaggccgcttccggatcaggagggagacgacgcggagccccacgctggttgggaggtcactgctgtgatcctctctggctctcccgagcggacttcgctggcagtcaccgcgggtggagattccttccccgccgcttgccagaacgccgctctcctcgccatcggcactcttcaccagcgctacccggacgagttgcagcactcgccctaccgctaccacccccgtcgcggaggagcctgcgactacgccaccttccgggatgctagctcggaggatgacgctaccatcgtgcacctggcgcgcatggtggaggcgtacgacgcggctcgtatcgacttccatcagatggtgcgccgcgggatggtcgagaacaacatgaagatcctggagctgcaccaggagaatctgcagctcaagaaggacctcgacgcggtggaggcgcagctgcatcagctcaagatcgcccagggagagatctgccgccccaagcgccgtcgtgtctgccgcagccagaagatcaccgcccgcaagagcacctccaggcccgagcttgttcgtcagtccctggcgtggacttgcttcgtcgagacccctcgtgccgagcccgcgcccgtggttccccaggagggggaagcctccggcgttggtagcacggagggtgcgctgttgctcaccttccgccctggcccgtcgcagcggtag

SEQ ID NO: 35718 - DNA, 366 bp, Oryza sativa
  Clone ID: PAT_MRT4530_39613C.1
atggcgaggttggaggagaagagggagggatccagatggggacgacgacgacgagtgcgagtcgggatgggagctggagcgccggtggaggggagcgctcgagggccggcggtggggagcactggaggctcgcgcgaggctcccgtccctcgcgtccccctcctccatggccgcgccatcgtccaagcgaatctgctgctctgcttgcctatctgcagctttgctcggtcggtcatccctttgcttgttggcttgtcgcttgatgttagtacacacatgcactgcttgttgctaccgcttgctagccgtagccctcatatctcgccccttgccgattgtctcggcaaccagcaggagaatgcttga

SEQ ID NO: 35719 - DNA, 918 bp, Oryza sativa
  Clone ID: PAT_MRT4530_39614C.1
atggttatgccgctctctctgtttggtggttctgtgtggggttttcagatggtgacgaccaggagaaatgctgccaccagtgatggcaaccaacctgaaggcagcaaccacaacaaccatggcagcccacctccacctcctccaccgcctccaccaccaccaccagacaccaacgccattctcacccaaatcctcgcccagcaggccaacatgatggctgctttcctccaccacatccaaaatccgccacaacataatgctccaccaccacccccacaacactctaaactcgccgagttcctacgcatccgtccacctaccttctctagctccaacaaccccgtggatgcgttggattggttgcatgccgtggggaaaaagttagacaccgtgcagtgcagcgatgaggagaaagtcatcttcgccgcccaccaactgcaggggcccgcatctctatggtgggaccatttccaggctacgcagccagtggggcaacctattacttgggcccgcttcaccgccgccttccggaggacccatgtgcccgccggagtcatggcccttaagaaaagggagttccgagagttgaagcaaggcaaccgctccgtgatggagtatttgcatgagttcaacaacctggcccggtacgccccggaggatgtacgggaagatgaggaaaagcaggagaagttcttggcaggaatggatcctgagctgtccgtccgtctagtctccggggactatccggatttccaacgtctggtggacaagagcatccgcttggaagccaagcacaaggaactggagtcgcacaagcgtcgcttggcgaattttcgcaatcaacagggagctaaccaaaggatccgctacaccaatccctatccagggggatcctcctcgcagcagcaacaacagtag

SEQ ID NO: 35720 - DNA, 1640 bp, Oryza sativa
  Clone ID: PAT_MRT4530_39615C.1
tcggccgtgccggcgaggccgccttcgggcgcgccccgcggctgccaggtggggtgtcacgaccggaaatcacccaacaggcgttcctgacccgctcggtccacggtggaccgggcgcacgcggctggcggcggtcggcgccgggggtcccgcgcgtcagccgcacccacgggcgcgggcggctgacgggccgggcccacttggcagccgcgagggcgcgcccgagggcggcctcgccggcgcggccgacgggagcggcgcgcacccgcgccccgatggtcgccgccggcgaccaacggcgcggcggagtggcacccgagagagaggagggaagggggaaacgaaggggacggtccacggctcaccccgagacagcgaaggcggcggaaacggcggacggagcggaggaagacggcggcgcggctcgggatgacgagggcgacggtgctccggcggtcggcgggcgaagcggagcggcggacggggtcggcaaccactcggcgaagcggacggaggtgtcgccgaagtcgatttgggacgcgacatggggcccggccgtcagccgcccgcgcccgcgggtgcggctgacgcgtgggacccacggcgccggccggcgcaagccgcgtgcacctggtccaccgtggaccgtgaggctgccgcgtgggccccactcccgtggacccgacgctgcagcttcggaagatccgctcttcgtggaagttgaagccgacgctgggctcggggtgcatggttacacggatggagatggaagaagtcgggggtcgatggacatctctaggacaaatgaaggctacacgagctgcggcccgatggccggcagcgtcacccgtcgtggtttgagcatgactggcttcgtcttggagctgcggggcatgtgcgtggtcctggggtatccaaatggagtggactaccaggccaggccgcttccggagcaggagggtgacgacgcagagccccacgctgcttcggaggtcactgcagtgatcctctctggctctcccgagcagacttcgctggcagtcaccgcgggtggagattccttctccgccgcttgccagaacgccgctctcctcgccatcggcactcttcaccagcgctacccggacgagttgcagcactcgccctaccgctaccaccctcgtcgcggaggagcccgtgactacgccaccttccgagatgctagctcggaggatgacgctaccatcgtgcacctggcgcgcatggtggaggcatacgatgcggctcgtatcgacttccaccagatggtgcgccgtgggatggtcgagaacaacatgaagatcctggagctgcgtcaggagaacctgcagctcaagaaggacttagacgcggtggaggcgcagctgcatcagctcaagatcgcccagggagaggtctgccgccccaagcgtcgccgcgtctgccgcagccagaagatcaccgcccgcaagagcacctccaggcccgagcttgttcgtcagtccctggcgtggacctgcttcgtcgagacccctcgtgccgagcccgcgcccgtggttccccaggagggggaagcctccggcgttggtagcacggaggatgcgctgttgctcaccttccgtcctggcccgtcgcagcggtag

SEQ ID NO: 35721 - DNA, 7770 bp, Oryza sativa
  Clone ID: PAT_MRT4530_39616C.1
atttctccatctgcattccacagtgtcgcacccgccagcctaacttaacggcgcggttagtcgacgtgcttgacaccgacatcttgtggagcctcagatattcgacgtttcgccgaataaacagctgcttcttggcttatgaattctccatctgcattccacagtgtcgcgcccgccagcctaccttaacggcgcggttagtcgacgcgcttgacaccgacatcgtctatgctatccaccctaacagtcacgcccgccagcctaccttaacggcgcggttagtcgacgcgcttgacaacgacatcgtctatgctatccaccctaacgtcctatatggagaattctccatctgcattccacagtgtcgcgcccgccagcttaacttaacggcgcggttagtcgacgcgcttgacaccgacatcgtcgatcctatacaccctaacgtcctatgtgccatccctatactaaccacctcgttgagaaccagttgtggaccctcagatattcgacgtttcgccgaaacaaccgctgcttcgtggcctatgatattcgacgtttcgccgaaacaaccgctgcttcgtggccaatgatattcgacgtttcgccgaaacaaccgctgcttcgtggcctatgaattctccatctgcattccacagtgtcgcacccgccagcctaacttaacggcgcggttagtcgacgtgcttgacaccgacatcttgtggagcctcagatattcgacgtttcgccgaataaacagctgcttcctggcctatgaattctccatctgcattccacagtgtcgcgcccgccagcctaccttaacggcgtggttagtcgacgcgcttgacaacgacatcatattcgacgtttcgccgaataaaccgctgcttcctggcctatgatattcgacgtttcgccgaagcaaccgctgcttcgtggcctatgaattctccatctgcattccacagtgtcgcgcccgccagcttaacttaacggcgcggttagtcgacgcgcttgacaccgacatcgtcgatcctatacaccctaacatattcgacgtttcgccgaaacaaccgctgcttcgtggcctatgatattcgacgtttcgccgaaacaaccgctgcttcgtggccaatgttgtggaccctcagatattcgacgtttcgccgaaacaaccgctgcttcgtggcctatgatattcgacgtttcgcccaaacaaccgctgcttcgtggcctatgttgtggaccgtcagatattcaatgtttcgtcgtaccgaccgctgcttcgtggcctatgatattcgacgtttcgtcgaaacaaccgctgcttcgtggcctatgttgtggacgctcagatattcgacgtttcaccgaaacaaccgctgcttcgtttcctatgatattcgacgtttcgccgaaacaaccgctgcttcgtggcctatgttgtggaccctcagatattcgacgtttcgccgaaacaaccgctgcttcgtggcctatgatattcgaagttccgccgaaacaacggctgcttcgtggcctatgttgtggaccctcagatattcgacgtttcgccgaaacaaccgctgcttcgtggcctatgatattcgatgtttcgccgaaacaaccgctgcttcgtggcctatgaattctccatctgcattccacagtgtcgcgcccgccagcctaccttaacgacgcggttagtcgacgcgcttgacaccgacatcgtctatgctatccaccctaatttgtggaccctcagatattcgacgtttcgccgaaacaaccgctgcttcgtggcctatgaattctccatctgcattccacagtgtcgtgcccgcctgcctacgttaacgacgcggttagtcgacgcgcttgacaccgacatcgtctatgctatccaccctaatttgtggaccctcagatattcgacgtttcgccgaaacaaccgctgcttcatggcctatgaattctccatctgcattccacagtgtcgcgcccgccagcctaccttaacggcgcggttagtcgacgggcttgacaccgacatcgtcatttctagaaaaatctctagtgttccacctctccaaatacagtctctcaagggtgagttgtggaccctcagatattcgatgtttcgccgaaacaaccgctgcttcgtggcctatgaattctccatctgcattccacagtgtcgcgcccgccagcctaccttaacgacgcggttagtcgacgcgctggacaccgacatcgtctatgctatccactctaatgtcctatgtgccgtccatatactaaccacctcgttgaaaaccagttgtggaccctcagatattcgacgtttcgccgaaacaaccgctgcttcgtggcctatgtgtcgggcccgccagcctaccttaacggcgcggttagtcgacgcgcttgacaccgacatcttgtggaccatcagatattcgatgtttcgccgaaccaaccgctacttcgtggcctatgaaacaactgctgcttcgtggcctatgacgctgcagcttcggaagatccgctcttcgtggaagttgaagccggcgtttgggaaagcgagcaaggcaaggcaaatgaaggctacacgagctgcggccggtagtcgagatgtcatggcacagggccggtgtcctgctgctaggggctcaaagaggagttccttgaagatgaaggctttggtgtctagctcgtgcctgctgtcaagcgcctgtggtcgtcgccctagtcttccgctgtttctcatggccggtagcatcaaccgtcgtggtctggacctgactggcttcgttttggagctgcggggcatgtgcgttgtcctggggtatccgcatggagtggactaccagggcaggcagctcccggagcaggagggtgacgatgcagagctccacgctgcttgggaggttactgcagtgatcctcactggctcacccgagaggacttcgttgacagtcaccgcgggtggagattctttcttcgctgcttgccagaacgccgcactcctcgccatcggcactcttcaccagcgctacccggacgagttgcagcactcgccctaccgctaccaccctcgtcgcggaggagcccgcgactacgccaccttccgggatgctagctcggaggatgacactaccatcatgcatctggcgcgcatggtggaggcgtacgacgcggctcgtatcgacttccatcagatggtgcgccgtgggatggtcgagaacaacatgaagatcctggagctgcgtcaggagaatctgcagctgaagaaggatctagacgcagtggaggcgcagctgcatcagctcaagatcgcccagggagaggtctgtcgccccaagcgtcgccgcgtctgccgcagccagaagatcaccacccgcaagagcacctccaggcccgagcttgttcgccagtccttggcatggacctgcttcgtggagacccctcgtgccgagcccgcgcccgtggttcctcaggagggggaagcctccggcgttggtagcacggaggatgcgctgctgctcaccttccgtcctggcccgtcgcagcggagaaatgctaatacaggtgatggcaaccaacccgaaggcagcaaccacaacaaccatggcagcccacctctacctcctcctccgcctccaccaccaccaccagacaccaacgccattctcacccaaatcctcgcccagcaggccaacatgatggctgctttcctccaccacatccaacatccgccacaacataatgctccaccaccacccccacaacactccaaactcgccgagttcctccgcatccgtccaccaaccttctctagctccaataaccccgtggatgcgttggattggttgcatgccgtggggaaaaagttagacaccgtgcagtgcagcgatgaggagaaagtcatcttcgccgcccaccaactgcaggggcccgcatctctatggtgggaccatttccaggctacgctgccagaggggcagcctattacttgggcccgcttcaccgccgctttccggaggacccatgtgcccgccggagtcatggcccttaagaaaagggaattccgagagttgaagcaaggcaaccgcttcgtgatggagtatttgcatgagtttaacaacctggcccggtacgccccggaggatgtacgggaagatgaggaaaagcaggagaagttcttggcaggaatggatcctgagctgtccgtccgtctagtctccggggactatccggatttccaacgtctggtggacaagagcatccgcttggaagccaagcacaaggaactggagtcgcacaagcgtcgcttggcgagtttccgcaaccaacagggggctaaccaaagggtccgctacaccaatccctatccagggggatcctcttcacagcagcagcaacctcgctccgcgccccgacctcaattcgtggtgcgcgtcccacagccgcagcaacagcagagtcagcaagggacttgtgcgccccgtcctccaacgccagccgcgcagcttggtcaaggccgcagggacgttcaaggtccgcagcgtctgtgcttcaactgcttcgagcctgggcactttgcggataaatacccaaagccgaggcgccagcaaggccaagcgcctccccgctccaacaacggtggtaaggatgtcattcggggtcgtgtgaaccacgtgacggccgaggacgtgctgacaactccagacgtcatcgttggtacgttcctcattcattccatccctgctaccattttgttcgactctggagcttctaactcgtttatatctgtgccattcgtggggagaaatcagttgggggtagaaaggcttaggaaccctctgctcatcaccacccctggaggggttatgacagcaaaccgcctgtgccgcctcgaccgtgcgccggccggccgcgccgtcgcctcctccagcgtcgccgccacctcctccaccccggcctgccctccgtttcgcgcggtgaccatcggaggcgcactcccgccgtcgcccttctcattcctccttgccggccacctccagccgcacctcccgcctcgcccgtgcaccctccggccgcgccgccacctctcccggcgtcgcagccgcctcctctttcccggcttcgcctccgtttcgcggggaaatcaccggagacgcgtcctcgccggcgtccagtggcgtcgccaccacttctccgcctccggccgcctctgccgcgtccccggtgcgccggccgacgtcgccgtctcctccgttgacgtcgcagtgccgtcctctctcccggccaggccacggcgtcgcccgaatttcgccggaacgccgtcgtctccgcgccggcctctccttcctcctcgtcggctcgccaccccgctgcaccaccaccttcaccaacatcgcagcggcgtgttccacgccgtcccctcctccgctcagccgctgctgcctgccatcatcgtttcatcgtcgtctccgatcgttctcgtcgtcgacgtcccatcggtcgcccggctcgtcgtctcgcggcgccgcctccgtcgtcggcatcgtagcggcgtgttcctcgccgtcctcgtccccgtgcagccgctgccggctgtcctcgtcgcctcctcgccggtcccggtcgtcgtcgtcgtcgtcgtcctctcgtcgttcccggtcatcgtggcgttcgtccctccgtcgagccgttctcgtccgtcgtccgcgtccgtcaagcaagccgcggcagccccgtcgtcgtcttcgtcctcggctccgcgtcgtcaagcctcgtgccggccgcgtctcgccttcgcccaaggatcgccaccgaagccgtcccctcgccgttcgtctccgttgtgcccgtctgtctccgccgcgcccgttcgtcgttgtcgttcccacgcctcgtcgcgtggtggcttgtagctttgcttgtgtgcttcgcgtagtcttcgtcgttccggaggttcccgaagcgtggtttgcggtcgtcgccgaaggttcggaaggccgttatctctgagcaagtaagagaagctttggagaagaagtcttaggtggagtcctggcttataccccagttgagcgcctgtgaagatggagccgtaggcccgcaagtccgctgctgtttatttttgtttgtcaggccttaagtgcctttgtaataatgtaaatattatcgatataataaagacctgggccggccacccggcccaaccctagccgcgcccccgcccgtgcagcgcgcgtgcgcgcgctgacgccgccgcctgaccggtgggtcccacgcgccaggccgggcgtcgtccccttcctcccgcccggccgtcctctctccctctcccgtgaaccctagctcgcttcctcctctaaatccgctcgattcaagcatgggattcccaaattgattagggggaattaatcccctttccctcctctctctttcccccttaattcccccttgaatggcgcccccaatcgccgggaacggacgcgccaagtccggccgccttcctttgccgccggccgccattcccgtcgccgttccgtgtcgcgaccgggaaaattgccttttcccgaacgctagtgtaataatccccgtcccaggaaaagccggggtacaccacacaaacatgatataaaagacacatctttattatatcgataatatttacattattacaaaggcgcttcaggcctgccttaacccaaggcctacgatgattcggaccgaactggcaacccgacctgggttccagctcgtcccaagccaacccaggccaaccattccacattttagttgttgagcaaattttaagaattagaacactgacttgggtacattgctcggcttgcccatatccgagggctcggctattcgaatagatttactctgatcagaggtgtacatcgacccaatcccgcctacggccggaacccccgggacaggtagacggaactgagcccctcgcagcagggcaccaaccctgtgctttttgacatctcgactaccgggccgcagctcgtgtagccttcatttgccccattagacatgtggaagtacggtagtgctttgcaacagaggcccgagcttaatccttatagtggccggggtgggtccacggtggaccgggcgcacgcggctggcggcggtcggcgccgtgggtcccgcgcgtcagccgcacccgcgggcgcgggcggctgacggccgggcccacttggcagccgcgagggcgcgcccgagggcggcctcgccggcgcggccgacgggaggaggacgcgcacccgcgccccgatggtcgccgccggcgaccaacggcgcggcggagtggcgcccgagagagaggagggaagggggaaacgaagggcggtccttggctcaccccgggacaacgacgacgacgagaacggcggccggagcggaggaagacggcggcgcggttcgggaagacgagggcgatggtgcaccggcggtcggcgagcgaaacggagcggcggacggggtcgacggcgatgcggcgatgccgagggaggtggcgccgagccgggaggaagaccggagcgacggcggcggcgaaccgaaggtcgacggcgacggcggagagagaggagcacggcgctagcacgattccgacggcgagagcgagcggcgagcggcggaaacggaagagcggagctcgggcaacgaatatatagcaacgggagggggagagcgcggccggggaggaaggaaaccggccgcgaagatctcggccgccat

SEQ ID NO: 35722 - DNA, 479 bp, Oryza sativa
  Clone ID: PAT_MRT4530_39617C.1
ggcacggtggtgcgtccacgacagacggcgtgacgggtgttctggcgacacagctgatttgtcgctgctacgctccgaggcagcacggaacgacgatgacaatgaggttaggtgccagatctgtcgccgcctcttcctccgccgccaacatctctgccctaggccaccgccataccatcttctcttcttctccctatgctgccgcttccgccgtcacacgggtgaggggcgtcgcgtggggccatgcccccacccaatgcgtcacttgccctgtgcttcgccccacgcctgccaaattccgacgaaaaacgtgtagcttcatttggctccgcggttttcagtcgggaacaacaggcgtgtgcgtggcgatgaatcttcaatgtggctgctcgggacagaacgcgacatcagtgcactgtgaccgcttaacagctgcaatatgcagctcaagcgaggattcagattgggtgcagctgtaa

SEQ ID NO: 35723 - DNA, 508 bp, Oryza sativa
  unsure (1)..(508): unsure at all n locations
  Clone ID: PAT_MRT4530_39618C.1
ctttcttcccaacaccaaccgcatcatcatccatcacccatacgcgcggcggagagatcgttccatcgatcgatcgatcagctcgcggctggatcgaggcgaagacgcatcanatattgatcagatggaggtggaggagatgaagccggccggcgccggtgggacgacggtgggcgacggcttcttcacggaggccgatctggcggcggcggaccagctcgtgcagctcagcgtcagcggcggcgggtgcgaggacgatggctacgactcctcctcgtccaccacgctgcagtcggtgaacaacgccgaggcgtcggcggcgatggacgacgacgacgacatggggctggataggagggtcaggaagaggtaccgccacctgtcggagctctacgccgccacgctgccggtgaaggagaaccacggcggcggcaagcggaagaagagagaggaggacatggggaagaagaagcagccgcagccgcagccgcagccgcagccgcgctag

SEQ ID NO: 35724 - DNA, 459 bp, Oryza sativa
  Clone ID: PAT_MRT4530_39619C.1
atgccctgctgctgctgcggcatgctgccctcttgctgctgcgccatgctgctctgccgctgccacctaccgccggccggcttcccttgtcgctgcggcaggcaaggtgggtcttatttttggctgcggttgcttgcatgcgtagatgtgggagaggagaccgatggccagccgcatgccgagatcaatttttgtagtgcggatggcttaagggggcccatctgcgataatatctcttctcttcacagtcgagcctctttagacctgcttgtgaaaatcgatttttataatcgcgatggcaggagcaccgattgtgttaatagtgagggtgttaaaatagaatatgctgatcaagccagccaagaggaaaccaaggaaacacctcaagtccctgatatcatccctccttgctccctgaaaattttggtttttaaatacggaattaaaaattcggaataa

SEQ ID NO: 35725 - DNA, 414 bp, Oryza sativa
  Clone ID: PAT_MRT4530_3961C.1
cttccgcagacgtgggaatctctcttatgttcttatgtcataagggtgatctccaactagctgggggggcatcactcccatgcgctaagctccgaacccccctcccgctcgtgccacctctctcaccaccacgggcggcaacgcggctcctctccgacgcgagtacgattctgtcataacaccccactctcatggagttcgctctagcgcactccatacttcttcctcacgcggagacactttacaccctgccagccgaggcggagccgctttgcaagacgatactatggataccccggcgcggctcctcccggccctcctccacggttatggtcgtatgactgttcacctgggacagtgcacacccgggcttcccctgtggcaccacatcgtactcgtgcgtctcaactactc

SEQ ID NO: 35726 - DNA, 543 bp, Oryza sativa
  Clone ID: PAT_MRT4530_39620C.1
ctagaagatgtattccccgaaggtcatctcgatggaatccattgcagacaagccccgtgcctccatgcatcggtcgaaagaaaaaaaaaatgagggcagcgcgatatctccccccgtggacgccgaaagcgcgcactgggggcggggcgcgagcgcgacgtgccgcgcgcggtcgccgacagcacggcatggcggatggcgcgataccgcgatgcggtgcagcataacagaagacgacgcgcggctgggaagacaccagaggcatgatggagtggcaacgattgtggaccagtgaggcgtgtggagcagcggttccgacgaaaagaatggaacaccagggtggcgattgtgatgaggacaaaggtggcgaagcagccccaccgtcaggaggacggaccaccgtggcgcggggcgggcggggcggcgttgagggtggcggaggcagtcgcagagccgccggaagaagtcgaccaccggccggatccgcgacagcagcacgaacaccgggcccagcacgccgccggtcaccgtcacgatcgccat

SEQ ID NO: 35727 - DNA, 1430 bp, Oryza sativa
  Clone ID: PAT_MRT4530_39621C.1
aattaaaatgttgatatactatagagaactagtagtatcaattgagttaggtgtagagtatatcggcgtacaactatagcttaatcgagctaaatacattaaccataaatgttcataacttaattataggtacagtattatgcatcatccattggaactatcagaagtcatccagggccagtttggcagctaatatattacgaggttcagggtcagtacacgctacaggtccgatttttgctgtattttgtttatccatgacaattgagctcccttagcctgtccgctatatcacttgcagtatcagataccacctggagcagacatgtagggactgtaaaactactgcagaaaaagatatcggcattttccaaaagctgacgagaaacaggagtgatcaaatgaatacaatctcgtgaaacatctatggctttgatgaaacctagtccaatgcaacaaggtgtggaacactgatttgacaaagctacagatgcacttgttgcaatgccaacaatagtacctttcaagaagtgatgcactgtataatcagacacctggctgtgcagatcaataacctgaagttttgacaaaggaagctgaaacggttcaatagaagcaaagccttgaattaaatcattgtaagagaaaacaggaaactccatgggtaagcactgcctgaagtatgcaattatccttagatcacgaatgatccttgcctctttctttattaatagactgcactcaaaagccttatatccattaatatgacgaggagagtgttgtgcagcacgaatttcaactaaattaatggccgggtctccttcaggttcatctaaccaaaacatcccagcaggtaaattttttccctctactgatgttcttagccgaataacatgagttggagatgcatatttcaacatctcagtcagcatatgcaggccagtacctttcacccatccagaagtgttaataacaagtggtattgctgatttgttagggttatcggtgtcttcaaagcgatagagttctttgaggaaataatcataaaggctaaatatgtagctcaagagaagttttggattcttctttgcagagcaatcaccgaaaaagaagcacctctttggtgtccgcaggtacaacattttaaaatcttcagcctgttcctcaagtacatgaatcgatacaaacccaggaggtgtgaactctggttggccaacatcagtatccaggtaggccaccttcttatacctccccacgagggtgttgaggaggaggcgggagaaggcggacttgccgctgttcccggggccgcacaccgccaccaccggcggcggccaggtgcaggagtcgtacgccaccgcctccgccgcctcctcccactccctctccctctccctctcctccgacccctcgccgccgccgcgccccat

SEQ ID NO: 35728 - DNA, 330 bp, Oryza sativa
  Clone ID: PAT_MRT4530_39622C.1
atggtacggcgcgacatccaggtcaggtgcatcatgcatgccatgtcgcatatgacactgagccaccttgcccagttgaggaacctcatagcggtgagcgacactggcggtgggttggcggcggacgcatgcggacccgaggatggtggcggcgtcgacggcaagtgcgggcggatccggcggcggcggctccctccgccccctctcgcctccctcccgcggcagatccggcggcggtggcagtgtcggcggctagatccgtcggtggtggcgatcacattcacaggaacacataatggaaagaagcaagatggtatgcatattgactaa

SEQ ID NO: 35729 - DNA, 2088 bp, Oryza sativa
  Clone ID: PAT_MRT4530_39623C.1
ctaaaccttagaagaggcctttttgcatacttggacagggggttcgccgaaaatcatgcattcggcccccttctgggagctggcgaagtcaaaacgagaaatttgtggcattgaagggtctttcggcgaaaataggactgccgcaatgcctgctcccttgtgcgaccacgagccatcggagcacatcacccagaattgttcggcgagctcggggtcggggacaagtaccggtgtccattcagctacgaagtcggctagcacttgagacttgatagcagagcgtgcaacaaaatgtaagtcgaacggggatagctctgccgcccacttgctgagccggccagtgacttccttgcctcggagtattttgcctaaggggtactgtgatggcactatgactttgtgggcctggaagtagtgcttaagcttgcgcgaagccatcaccagggcgtaagcgagcttttccatttcaatgtaccttgtcttcgctccttgcagcgcttcggagacgaagtagaccggtttttgtccgaactctgtttcttggacgagggcagcactgacggccaccggcgaagctgctaagtataatagcagttcgcttcctgggggtgggcttatcagagctggtgggctttgcaagtattgctttagctcgttgaatgctgcttggcactctggtgtccaattaaactttcctgtgccccggagggttttgaagaagggcaaacctctttcggctgcctttgagaggaatcgattgagtgccgcaattcggcctacaagcttttgtacttcatgtacgcttgacggaggcttcatttgctgaatggcatcgattttctcgggattcgcctcgatgcctctttcggaaacaaggaaacccaacaacttgcccgcgcggacgccgaaaatgcacttctccggattcagccttatgcctgctgtacgcaagctgtcgaatgtcttttgcaggtcgatcgcatggtcgaaagccttgcggctttttacgacgatgtcgtcgacgtaagcttccacattcctccccaactgcttgccaaggaccttgtacaccagcctggcgaaagttgctcctgcgttccttaagccgaaaggcatcctgaggtgacaaaatgtgccgaatggagtgatgaagaatgttttggggatgtcgagcgggttcatgtggatctcgtcagggctccaggcgaagatattgatgttctttttgagcacctctaggatactctcaacttcttcttcgcccatgtcgccccccagtgaaacgagctttgtggggtcggcgtcatcaatctgcacttttgttatcttgccatgagggatgggctttggcgtgtgcttcggccgttcatgcggttcggtctcaacactgtgcactgctttgctgattatggctagatcgccttttgaagcggccgaaggatgaagccccttgactactatcacccctgttgggccgggcatcttgagcttgagataattgtggtgggaaatggcttcgaacttgttcagggttgcacggccgaagatggcgtcgtagttgtacgggatgtcgacgacgtcgaacagtatttgctcttcgcgtctgttctcccccgagccaaaggctatcagcaaaagtgtttggccgagaacttgaactgcctctccgccgaaaccacggagcgatgctggtgctagggtaagggcttgggtaggcaaccccatcttggcatatgcttcggcgaagatgacatcggccgaactccctccgtcgaccaggattcgtcggacttcgaaaccagctatctcggctgagattaccaggggatcttgatgcgggaacataactccttggatctgcatcttcttctgccgtttggacaactggcttggcggatcagcccttgtaatcacttggattatccttcgctgaacatcttggcgttgttcggctgggggtgtttgctcctgaattgcttcgcgggatgcttcgacagttgttcccttcttgtgggctggctgctgatggttgctcgcttgctgggcatcgaactccttgcggagggcttgcacttcttcgaccgccat

SEQ ID NO: 35730 - DNA, 874 bp, Oryza sativa
  Clone ID: PAT_MRT4530_39624C.1
ttcacttttgcaacaatggatcgaagttggatgtatggaactgtgcgacgacatagcaaagagtatagaagtggcatttcaaattttataaatgccgcagaggaggacatgaaaagaagaaactgcgattacacgtgttgtccatgtacatattgtagaaatgagattatgcttgatagtggattcgacgtacacactcatctgatacgtcgatgattcatggatgactacacatgttgggtgaagaatggatcggagagcaagaatcagtcgatgatgttgcagctgcagacagaagtggtgcacaaaattagaagatgaagatgagcatgacatgtttgtaccttctccattgggtggtgaaatggttggtgcggatcacgatttgcagtaagacatgttgcgttatgttgaggacttagcttacaatgagagagattctataaagttcaccaggttggtcagtgactcggagacacctctatacaccggatgaaagtccaaacacaccaaattgtcagctaccgtggatctactgaaactgaaaataagtagtggatggacatacaagagtttcacagattttttaagaatattgaaagccatgcttcctaaggagaacacattgtccgagacgacatatgaagcacaacaggttttatgtcagctggggttagaggtctgtagaatccacacttgtccaaacgatagcataatgtaccacaagcaataggcggacttagatgcttgtcttgtccgcaaggtttcaggacacaagcaaattcacgaagctgacgaaggaggcctttcttcacagagggcctcaagccgcggtatatcgactcttccactattaaaaccgatgcaaactata

SEQ ID NO: 35731 - DNA, 1242 bp, Oryza sativa
  Clone ID: PAT_MRT4530_39625C.1
atggaagccatgcggcggaaaatgacacggctccaagacatgcttcgccaaatgcaagaacaacaacaagcatacgaggcggcaaggcggaccaaggccacatcggctccaatccttcagtattcgccacacaagcgccggtgtacttcgccgggcagcatcaaccacctggccaagcgccacaatcagtggtggaaggggctttggctctgcaggcacaacttcaagctttccttcagcaactcaaccaaccccactgcatttcaagcacaaccccatcggcccgcccggaggggagtacaactcaaggtacgcttaattggttgtcaccgattcagccgggcctgggagtttcgccgtggaatcaaggaccgcagttcgactgtcaacgctgcccaggcgccaaccgctcggcagcaagcaccgactccaggcttcggaacaaaccaagcaccaattcaagctgccatgacgtggtcacagccaatttttgacccgtccatggtggctcagcaagtaccaccagttggagccgggcagccgaacgccatggcccaatctcacgcacaagttgcgatttcgcccttcgccacaccgtacccgcagcaaggtgcggtaaacagggcgggaggcgaaaaggggctaccgctgagtgggggaatcaagactcgtccaatcccaccccagttcaagttcccacccgtccaacgctattcgggcgaaaccgacccgaaggagttcctctccatctacgagtcagcgatcgaagcggctcatggtgacgaaaataccaaggcgaagataatacatctcgctctagacggcatcgcccgttcttggtatttcaatttaccaaccaatagcatttactcatgggagcaattgcgcgatgtttttgtccttaactttcgaggcacctatgaggagccgaagacgcagcaacaccttctcggcattcgccaaaggccggaggagtcgataagggagtacatgcgtcgcttctcgcaagcccggtgccaagttcaagacttaaccgaggcgtcggttataaacgccgcttcggccggaccactcggggcgaacgttgaaattcacactcccgaacacagttttcctcgtcccagctggggtaatcaccgtcttcgagttcacggtggcgaagaatatggcgccgaagagctcggcgctgggctcaaacccggaagtccgacacgcccagtcaaagatggagatccaaactag

SEQ ID NO: 35732 - DNA, 5982 bp, Oryza sativa
  Clone ID: PAT_MRT4530_39626C.1
agcttaccaatcactagtgggttcgccttcttccttagaacaagatgaccaggcatcagctccgcgagttgaacttttttgttgtaagttgccgaagtgcttgtggcgtatttgtgcatgtgctcgagcgcttcgactcttactccttccaagagttcgagcgatactccgcgtccctcttcgcccccagagaacatcacccttggtgagttagcccctagctctgctggggtcattgcctcatcaccataaagaagcataaacgggctaaacttggttggtcttgtgggggtcgtccgaagggcccagagaaccaatagcaattcctctggccatttgactttcgctgccccctcgagacttttctttagtgcttctaggatcttgccatttgtatgttcggccgccccatttgactgcgggtgtgcgaccgacgcgaactgatttccaggttaagcccttcgcacatttctttgaacttatcagagtcaaactacttgccgttgtcagtaatgaactcttttggcaccccgaaacggcaaacaatgtttttccatacaaacttctgtactgctgccgaagtgattgccccaaggggttcggcttcaatccatcaagagaaatattccacagctacaattgcgaatttatacccgtttcgcgaaaccgggaacggcccaatgatgtcctgtccccatctggcaaagggccatattggcgcaatgggctgcaaatcatactggggcgtggcttggcttcggccatgacgctggcaactttcgcacttcttgatttgctcaacacagactttcaacatagtgggccaataaactccttgtctaaatactttggaggccactgttcttgcagcctggtgcacgccacatagcccctggtgtatctccttttccatttcttcgccttcggcaaaagagatgcaacgaagtaagggttaaagtaccccggagcagtaaagctaacccgagaccatcttatacttcgtggctctgagttgcaaacgcttcgcttctacttcgtctaccggaagccagccagtttgaaggtgtttcacaaatggggctcgccagtcatatgggtcttcgcccagtttctcctggtcgattgccatgacttccgagctgtccatgggcacacttggagcatgtaggacttcgaaaaagatgccaggcgaatatgggccaccacaagcaacggatttcgccaaggcgtctacttcctcgttctggtctctaggcaagtgttcgaccgttatgccggtgaagcatttttcatggatcgaatagcctccagatacctctttattccctcttcttttgcctcgaagaatttttcaacatggcctgctaccaacttggagtcagttcgaattagcaggcgccggactccctttcttaggcccaggagaacggcttcgtattctgctgcattgttggttgtgtcgaactgcagtcttgctgcgtaccgcattggcacaccatttggtgaaaataggactgccgcaatgcctgctcccctgtgcgaccacgagccgtcagagcacatcacccagaattgttcggcgggctcggggtcgggggcaagtaccggtgtccattcagctacgaagtcggctagcgcttgagacttgatagcagagcgtgcaacaaaatgtaagtcgaacggggatagctctgcagcccacttgctgagccggccagtgacttccttgcctcggagtatttcgcacaaggggtactgtgatggcattatgactttgtgggcctagaagtagtgcttaagcttgcgcgaagccatcactagggcgtaagcgagcttttccatttcaatgtaccttgtcttcactccttgcagtgcttcggagacgaagtagaccgatttttgtctgaactctgtttcttggacgagggcagcactgactgccaccggcaaagctgctaagtataatagcagttcgcttcctgggggtgggcttatcagagctggcgggctttgcaagtattgctttagctcgtcgaatgctgcttggcactctggtgtccaattaaactttcctgcgccccggagggtcttgaagaagggcaaacctctttcggctgcaaggaaacccaacaacttgcctgcgcggacgctgaaaacgcacttctccagattcagccttatgcctgctgtgcgcaagctgtcgaatgtctcctgcaggtcgatcgcatggtcgaaagccttgcggctttttacgactatgtcgtcgacgtaagcttccacattccgccccaactgcttgccaaggaccttgtacaccaacctggcgaaagttgctcctgcgttccttaagccaaaaggcatcctaaggtgacaaaatgtgccgaatggagtgatgaaggatgttttggggatgtcgagcgggttcatgtggatctggtggtaaccggaatatgcatccaggaaactgatgagctcgcatccagctattgaatccacgagctggtcgattcgcagcaaggggaagtcgtctttcggacacgctttgttcaggtctgtgaaatcgacacacatgcgccatttgccgtttgacttccgcaccagcactggattcgccaaccactccggatggttaatctcttggataacccccgccctgagcaatttttgtacttcggctttcgccgcttcttagcgatcggcagacatcttgcgcaacttttgttttcttggcttaatgtccggcttgactgctaggtgatgcatgatgagatccgccgggacaccccccacctcgtcagggctccaagcgaagatatcgatgttctttttgagcacctctaggatactctcaacttcttcttcgcccatgtcgccccctagtgatatgagctttgtggggttagcatcatcaatctgcacttttgttatcttgccatgaggggtaggctttggcgtgtgcttcggccgttcatgcggttcggtctcaatactgtgcactgctctgttgattatggctagatcgccttttgaaacagccgaaggatgaagccccttgactactatcacccctatcgggccggacatcttgagcttgagataattgtggtgggaaatagcttcgaacttgttcagggttgcacggccgaagatggcgttgtagttgtacgggatgtcgacgacgtcgaacagtatttgctcttcgcgtttgttctcccccgagccaaaggctatcagcaaaagtgcttggccgagaacttgaactgcttctccgtcgaaaccgtggagcgatgctggtgctggggtaagggcttgggtaggcaaccccatcttggcatatgcttcggcgaagataacatcggccgaactccctccgtcgaccaggattcgttggacttcggaaccagctatctcagctgagattaccaggggatcttgatgcgggaacataactccttctgcgtcttccggcccaaaagaaattaactagttcagatacttcttgcgggctggctgctgatggttgcttgcttgctgggcgtcgaactccttgcgaagggcttgcacttctttgacagccatcacagtcttgcccgcacggtctgttctgaactttctccaagtcatgggggcttggccttgccttggctgctgtccttggatcgccggctgagactggcgaacagagaggggaggtggttcggcaacttgaacttgtgcttgagcttgagcagcggcgacagaggctttgtcgtactcagcttgtatagcttgtcatcgcttggaatcctcctcgccccttgcgaacccgtcaatgatgcgaagtaggtgctcgagcgtctgtggctccttgttggcgatttttcttgtgagttcgccctcgagcagaccggccgaagcggcgtttataaccgacacctcagttatgtcttgaacttggcaccgggcttgcgagaagcgaggcatgtactcccttatcaactcccccggcctttggcgaatgccgagaaggtgttgctgcgtcttcggctcctcataggtgcctcgaaagttaaggacaaaaacatcgcgcaattgctcccatgagtaaatgctattggctggtaaattgaaataccaagaacgggcgatgccgtctagagcgagatgtattacctttgccttggtattttcgtcaccatgagccgcttcgatcactgactcgtagatggagaggaactccttcgggtcagtttcgcctgaatagcgcgggacgggtgggaacttgaactggggtgggattggacgagtcttgattcccccactcagcggttgccccttttctcctcccgccctgtttaccgcactttgcggcgggtacggtgtggcgaagggcaaaatcgcagcttgtgcgtgaggttgggccctggcattcgactgcccggctccaactggaggtacttgctgagccgccatggacaggtcaaaaattggctgcgaccacgtcgtggcagcttggattggtgcttggtttgttccgaagcctggagttggagcttgctgccgaacggttggtgcctgagcagcgttgacgaagtcggactgcggtccttgattccatggcgaaactcccaggcccggctgaatcggtggcaaccaattaggcgcaccttgacttgtattcccctccgggtgggccgatggggttgtacttgaaatgcagtggggttggttgagttgctgaaggaaagcttggagttgcgcctgcagagccgaagccccttccgccattgtttgtggtgcttggccaggtggttgatggtgtacttgggcagcgactggttgagcttgcagttgcacgtgaggggccggatgcactgctgcggccgattgctgcccggcgaagtacactggcacctgtgcagcttgtggcggaatgggctgggtcgtcacttgcggatggacttgaggtgggacaaaacctaccgaatactgaaggattggagccgacgtggccttggtccgccttgccgcctcgtatgcttgttgttgttcttgcatttggcgaagcatgtcttggagccgtgtcatcttctgtcgcatggcttccatgtcagcttcggcttgagtttcggggtcagggctgacttgggcctgcacaacggcgagcgcagttggggctgctgccggctgcgatggagcggcttggggcaccaccagtcggcttgttgaaaggatctccgccctggtctggagtgcccttgccgccacagccgcctttgccacgtcggccgcgttcggcacttgcacagaggttgcaggggccaaaggcggttgtgatggcgctggtcctcctccatcttcggccacgggcgccgaaggctctgctccgtcctcggcggccatgtccggtccggcgtcgctttccttccgcctggcaaccttctccttcacgaccctcttcggtggcattcgctctcagtggtttcactcggaggtccccacggtcggcgccagctgttgtcgaaatgacaaataattacccttacgaaagggacatttacaggggtacataatgttataggggctcataggcctctgatgggccgtctggcgatcgccggccctatagcccctaggcttgatgggccggaaaggcttcttcggccctcgcgggggcgaacttgccatggcgaagtcgtcttccttcggcagatagtcttcgccttgcacccttcgcctgagacgcctctggcctggcaaggcactcgtacgactcttcgcctcacgccgttcttgctccatagctttcgccacgggtttcggcagatttggtcgaagggcctcatgccatccgccaacaagccccttacgggtaagggtgagattggagcttcggccgagaccgtgcaaagtatgtggtatggtcgctcttttcctccgtttcggggatcctctagagtcgacctgcaggcatgcaagcttgagtattctatagtgtcacct

SEQ ID NO: 35733 - DNA, 3691 bp, Oryza sativa
  Clone ID: PAT_MRT4530_39627C.1
cggcagaaaagatgcagacccgtatggtccacagcatcacttcggagggtgaaggagcgccgcaatatctgaaccagctaatttcttttgggccagaagacgcagaaggagttatgttcccacatcaagatcccctggtaatctgagctgaaatagctggtttcgaagtccgacgaatcctggtagacggagggagttcggccgatgttatcttcgccgaagcatatgccaagatggggttgcctacccaagcccttaccccagcaccagcatcgctccgcggtttcggcggggaaccagttcaagttctcggccaagcactcttgctgatagcctttggctcgggggagaacagacgtgaagagcaaatactgttcgacgtcattgacatcccgtacaactacaacgccatcttcggccgcgcaaccctgaacaagttcgaagccatttcccaccataattatctcaagctcaagatgcccggcccgacaggggtgattatagtcaaggaggttcagttttcggctgcttcaaaaggcgatctagccataattaacagagcagtgcacagtgttgagaccgaactgcatgaacggccgaagcacacgccaaagcctacccctcacggcaagataacaaaaatgcagattgatgatgccgaccccacaaagctcgtatcactgggggcgacatggaagaagaagttgagaatatcctagaggtgctcaaaaagaacatcgatatcttcgcctggagccctgacgaggtggggggcgtcccggcggatctcatcatgcatcacctagcagtcaagccggacattaagccaagaaaacaaaagttgcgcaagatgtctgccgatcgccaagaagcggcgaaggccgaagtacaaaaattactccgggcaggggttatccaagagattgaccatccagagtggttggcgaatccagtgctggtgcagaagtcaaatggcaaatggcgcatgtgtgtcgatttcacagacctgaacaaagcgtgtccgaaagacgatttccccttgccgcgaatcgaccagctcgtggattcaacagctggatgcgagctcatgagtttcctggatgcatattccggttaccaccagatccacatgaacccgctcgacatccccaaaacatccttcatcactccattcggcacattttgtcacctcaggatgcctttcggcttaaggaatgcaggagcaactttcgccagactggtgtacaaggtccttagcaagcagttggggcggaatgtggaagcttacgtcgatgacatcgtcgtaaaaagccgcaaggctttcgaccatgcgatcaacctgcaggagacgttcgacagcttgcacgcggcaggcataaagctgaatccggagaagtgcgttttcggcatccggcgcaggcaagttgttgggtttccttgtttccgtaagaggcatcgaggcaaatccagagaaaatcgatgccatccagcaaatgaagcctccgtcaagtgtacatgaagtacaaaagctcgcaggccgaattgcggcactcagtcgattcctctcaaaggcggccgaaagaggtttgcccttcttcaagaccctccggggcgcgggaaagtttaattggacaccagagtgccaagcagcattctacgagctaaagcaatacttgcaaagcccgccagctctgataagcccacccccaggaagcgaactgctattatacttagcagcttcgccggtggcagtcattgctgcactcgtccaagaaacagagtccggacagaaaccggtctacttcgtctccgaagcactgcaaggagcgaagacaaggtacattgaaatggaaaagctcgcttacgctctagtgatggcttcgcgcaagcttaagcactacttccaggcccacaaagtcatagtgccatcacagtaccccttgggcgaaatactccgaggcaaggaagtcactggccggctcagcaagtgggcggcagagctatccccgttcgacttgcattttgttgcacgctctgctatcaagtctcaagtgctagctgactcgtagctgaatggacactattcgacacaaccaacaatgcagcagaatacgaagctgttctcctgggcctaagaaaggcgaaagcactgggagtccagcgcctgctaattcgaactgactccaagttggtagcaggccatgttgacaaatcctttgaggcaaaagaagagggaatgaagaggtatctggaggctgttcggtccatggaaaaatgcttcaccggcataacggtcgaacacttacctagagactagaacggggaagcagacgccttggcgaaatccgctgcttgtggtggcccacattcgccgggcatctttttcgaagttctgcatgctccgagtgtgcccatggactgctccgaagtcatggcaatcgaccaggagaaactgggcgaagacccatatgactggcgaaccccatttgtgaaacaccttgaaactggctggcttccggtagacgaagcagaagcgaagcgtttgcaactcagagccacgaaatataagatggtctcgggtcagctttaccgctccggggtgcttcaacccttatttcattgcatctcttttgccgaaggcaaagaaatggcaaaggacatacactaggggctatgtggcgcgcactaggctgcaagaacagtggcctccaaagtatttaggcaaggagtttattggcccactgtgttgaaagtctgtgttgagcaaataatgaagtgcgaaagttgccagcgtcatggccgaagccaatctgcgccccagtatgatcggcagcccattgcgccaatatggcccttcgccagatgggggctggacatcatggggccgttcccggtggcgcgaaacgggtataaattcgcaattgtagctgtggaatatttctctcgatggattgaagccgaaccccttggggcaatcacttcggcagcagtacagaagtttgtatggaaaaacattgtttgtcgtttcagagtgccaaaagagttcattactgactatggcaagcagtttgactctgataagttcagaaaaatgtgcgaagggcttaacctggaaattaggttcgcgtcggtcgcacacccgcagtcaaatggggcggccgaacgtacaaatggcaagatcctaaaagcactaaagaaaagactcgagggggcagcgaaaggcaaatggccagaggaattgctatcggttctctgggcccttcggacgacccccacaagaccaaccaagtttagtccgtttatgcttctttattgcgatgaggcaatgaccccagcagagctaggggctaactcaccaagggtgatgttctctgggggcgaagaaggacgcgaagtatcgctcgaactcttgaaaggagtaagagtcgaggcgcttgagcacatgcacaagtatgccacaagcacttcggcaacttacaacaaaaaagttcgacccacggagctgatgcctggtcatttcgtcctaaagaacaaggcgaacccagtagcggttggcaaacttgaatcaaagtgggaagggccataccttatcaaacacaagtccaggatgggatctttttgcctagcgacactcgaaggcgtggagttcgaccattcctagaacgctgcctctctcaagcgcttctatgtc

SEQ ID NO: 35734 - DNA, 5616 bp, Oryza sativa
  Clone ID: PAT_MRT4530_39628C.1
ttatgacttaaaaaaattatacttaatgttggcggatggcatgaggcccttcgaccaaatctgctgaaacccatggcgaaggctatggagcaagaacggcgcgaggcgaagagtcgtacgagtgccttgccaggccagaggcgtctcaggcgaagggtgcaaggcgaagactatctgccgaaggaagacgacttcgacttggcaagttcgcctccgcgagggccgaagaagcctttccggcccatcaagcctaggggcaatagggcaggtgatcgccagacggcccatcaggggcccatgagcccctatatcatcatgtacccctgtaaatgtccctttcataaggctggcgccgtccgtggggacctccgagcgaaaccactgagagcgaatgccaccgaagaaggtcgtgaaggagaaggttgcaaggcggaaggaaagcaacgccgcaccggacatggccgccaaggagggagcagagccttcggcgccagtggccgaagatggaggaggaccatctgcttccacacctgcgccatcacaaacgccttcggcccctgccgtctctgtgcaagtgccgaacgcggccgacgtggcgaaggcggttgtggtggtaagggcactccagaccagggtggagatcctttcgacaagccaactggtggtgccccaagccgctctatcgcagccggcagcagcctcgactacgctcgccgctgtgcaggcccaaaacaacaacaagcatacgaggcggcaaggcggaccaaggtcacgtcggctccaatccttcagtattcggcaggttatgtcccgcctcaagtccatccgcaagtgatgacccagccctttccgcctcaagtcgcacaagcaccaatgtacttcgccgggcagcaatcggccgcagtcgctgcccaagtacaccatcaaccacccagccaagcgccacaaatagtggcagaaggggcttcggctctgcaggcgcaactccaagctttccttcagcaactcaaccaaccccactgcatttcaagtacaaccccatcggctcacccggaggggaatacaagtcaaggtgcgcctaattggttgccaccgattcagccgggcttgggagtttcgctgtggaatcaaggaccgcagttcgacttcgtcaacgctgcccaggcgccaaccgttcggcagcaagctccaactccaggcttcagaacaaaccaagcaccaatccaagttgcgatgacgtggtcacagccaatttttgacccatccatggcggctcagcaacagggtgcggtaaacagggcgggaggcgaaaaggggctaccgctgagtgggggaatcaagactcgtccaatcccaccccagttcaagtttccacccgtcccgcgctattcaggcgaaactgacccgaaggagttcctctccatctacgagtcagcgatagaagcggctcatggtgacgaaaataccaaagcgaaggtaatacatctcgctctagacggcatcgcccgttcttggtatttcaatttaccagccaatagcatttattcatgggagcaattgcgcgatgtttttgtccttaactttcgaggcacctacaaggagccgaagacgcaacaacacctactcggcattcgccaaaagcagggggagtcgataagggagtacatgcgtcggttctcgcaagcccggtgccaagttcaagacataaccaaggcgtcggttataaacgccgcttcggccggtctgctcgagggcgaactcacaagaaaaatcgccaacaaggagcctcagacgctcgagcacctacttcgcatcattgacgggtttgcaaggggcgaggaggattccaagagacggcaagctatacaagttgagtatgacaaagcctccgtcgccgctgctcaagctcaagcacaagttcaagttgccgaaccacctcccctcttcgttcgccagtctcagccggcgatccaaggacagccgccgaggcaaggccaagcccccataacttggagaaagttcagaacagaccgtgcgggcaaagctgtgatggcggttgtagaagtgcaagccctccgcaaggagttcgatgccgagaaagcgagcaaccatcagcagccagcccgcaagaggtccgaaaagacctctactgcgcctttcacaaacgctcttcgcacaccacggaacaatgcagaaacattaggcaacgtggcaacgcgcaagacccaaggccgcagcagggaacaactgtcgaagcaccccgcgaagcagttcaggagcaaacacccccagctgaacaacgccaagatgtatagcgaaggcatcacttcggcgggtaaaggggcgccgcagtatctgaaccagctaatttcttttggaccggaagacgcagaagaagttatgttcccgcatcaagatcccctggtaatctcagctgagatagctggtttcgaagtccgacgaatcctggtcgacggaggaagttcggccgatgttatcttcgccgaagcatatgccaaaatagggttgcctacccaagcccttaccccagcaccagcatcgctccgcggtttcggcggagaagcagttcaagttctcggccaagcacttttgctgatagcctttggctcgggggagaacagacgcgaagagcaaatactgttcgacgtcgtcgacatcccgtacaactacaacgccatcttcgggcgtgcaaccctgaacaagttcgaagccattttccaccacaattatctcaagctcaagatgcccggcccgacaggggtgatagtagtcaaggggcttcagcgttcggccgcttcaaaaggcgatctagccataatcaacagagcagtgcacagtgttgagaccgaaccgcatgaacggctgaagcacacgccaaagcccacccctcacggcaagataacaaaagtgcagattgatgatgccgaccccacaaagctcgtatcactggggggcgacatgggcgaagaagaagttgagagtatcctagaggtgctcaaaaagaacatcgatatcttcgcctggagccctgacgaggtggggggtgtcccggcggatctcattatgcatcacctagcagtcaagccagacattaagccaagaaaacaaaagttgcgcaagatgtctgccgatcgccaagaagcggcgaaagccgaagtacaaaaattgctcagggcgggtgttatgcaagagattgaccatccggagtggttggcgaatccagtgctggatgcctttcggcttgaggaacgcaggagcaactttcgcaggctggtttacaaggtccttggcaagcagttggggcggaatgtggaagcttacgtcgatgacatcgtcgtaaaaagccgcaaggctttcgaccatgcgatcgacctgcaggagacattcgacagtttgcgcacagcaggcataaggctgaatccggagaagtgcgttttcggcgtccgcgcaggcaagttgttgggtttccttgtttccgaaagaggcatcgaggcgaatcccgagaaaatcgatgccatccagcaaatgaagcctccatcaagtgtacatgaagtacaaaagctcgcaggccgaattgcggcactcagtcgattcctctcaaaggcacccgaaagaggtttgcccttcttcaagaccctccggggcgcaggaaagtttaattggacaccagagtgccaagcagcattcgacgagttaaagcaatacttgcaaagcacgccagctctgataagcacacccccaggaagcgaactgctattatacttagcagcttcgccggtggcagtcagtgctgccctcgtccaagaaacagagttcggacaaaaaccggtctacttcgtctccgaagcactgcaaggagcgaagacaaggtacattgaaatggaaaagctcgcttatgccctagtgatggcttcgcgcaagcttaagcactacttccaggcccacaaagtcatagtgccatcacagtaccccttgggcgaaatactccgaggcaaggaaatcactggccggctcagcaagtgggcggcagagctatccccgttcaacttacattttgttgcacgctctgctatcaagtctcaagtgctagccaacttcgtagctgaatggacaccggtacttgcccccgaccccgagcccgccgaacaattctgggtgatgtgctctgacggctcgtggtcacacaagggagcaggcattgcggcagtcctattttcgccgaatggtgtgccgatttggtacgcagcaagactgcagttcgacacaaccaacaatgcagcagaatacgaagccgttctcctgggcctaagaaaggcgaaagcactaggagtccggcgcctgctaattcgaactgactccaagttggtagtaggccatgttaacaaatccttcgaggcaaaagaagaggggatgaagaggcatctggaggctattcggtccatggaaaaatgcttcaccggcataacggtcgaacacttgcctagagaccagaacgaggaagcagacgccttggcgaaatctgctgcttgtggtggcccacattcgcctagcatctttttcgaagtcctacatgctccaagtgtgcccatggacagctcggaagtcatggcaatcgaccaggagaagctgggggaagacccatatgactggcgaaccccatttgtgaaacaccttgaaactggctggcttccggtagacgaagcagaagcgaagcgtttgcaactcagagccatgaagtataagatggtctcgggtcagctttaccgctccggggtacttcaacccttacttcgttgcatctcttttgccgaaggcgaagaaatggcaaaggagatacaccaggggctatgtggcgtgcaccaggctgcaagaacagtggcctccaaacagtacagaagtttgtatggaaaaaacattgtttgccgtttcggagtgccaaaagagttcattactgacaacgccaagcagtttgactctgataagttcagagaaatgtgcgaagggcttaacctggaaatcaggttcgcgtcggtcgcacacccgcagtcaaatggggcggccgaacgtacaaatggcaagatgctagaagcattaaagaaaagactcgagggggcagcgaaaggcaaatggccagaggaattgctatcggttctctgggcccttcggacgacccccacaagaccaaccaagtttagcctgtttatgcttctttatggcgatgaggcaatgaccccagcagagctaggggctaactcaccaagggtgatgttctctgggggcgaagagggatgcgaagtatcgctcgaactcttggaaggagtaagagtcgaagcgctcgagcacatgcacaagtacaccacaagcacttcgtcaacttacaacaaaaaagttcgacccatggagctgatgcctggtcatctcgtcctaaggaagaaggcgaacccagtagcggttggcaagcttgaatcaaagtgggaaggaccatacctcatcaaacacaagtccaggacgggatattttcgcctatcgacactcaaaggcgaggagttcgaccattcctggaacgccgcctctctcaagtgcttctatgtctag

SEQ ID NO: 35735 - DNA, 475 bp, Oryza sativa
  unsure (1)..(475): unsure at all n locations
  Clone ID: PAT_MRT4530_39629C.1
ggatccccgggctgcaggatgtaggctctttgtgcattctcatcctctagcatcgcagtcccatatttggaaagtatgattgcgaaagcgaggatatgggtctgcagaagtctcaagttttatggtgttcatcaaagctcaaaaagaaagcatcaacagcattgaaagtctcagaagactgcttattccaaacgaagaagacagtgaacagatgatggcttataaaaatctctttgagggagttgtccattatatttctcaaatattttgcagtgaactggatctttagcggaaaactcatgcacaaaaatgctcacttaaaatatcgcttcaagatgcttcgaaggattcaagatccagaaaatttcacataccttaaaactacagttaaataaaaaaatgctacttcctgactttnctacccttgatcagtaattacatagccgtattatttcgatttttcatataagccttt

SEQ ID NO: 35736 - DNA, 711 bp, Oryza sativa
  Clone ID: PAT_MRT4530_3962C.1
atggcggccgacctcccgcgccggtttcctcccttccccggccaccctctctcgccccggctctatttaaaccctccccgcacctcctccgtccggttccgcctctcgccgcccttcctcctcgccggatttgagctcgcgacgtcgctctctctctccgtcgtcgccgccgagctccggcccgccgccgtcgtcaccccggaccgcctcccacctcggcgccgcctccttcggcttcgccgcgtcctcgccgacctcgtccactcctccgtttcgcccgccgaccgccggaacgccgccgtcctcgtcgacccgagctgcgccgccgcctccctccgctccggtcgtcgtttccgccgtcctcgtcgacccggggtgagccgtggaccgctcctttcgcttcccccttcccttctctctctcgggcgccgctccgccgcgtcggtggtcgccggcggcgaccatcggggcgcgggcgcgccgcctcccgtcggccgtgccggcgaggccgcttccgggcgcgccccgcggctgccaggtgggcccggccgtcagccgcccgcgcccgcgggtgcggctgacgcgtgggacccacggcaccggccggcgtcagccgcgtgcacccggtccaccgtggaccgtgaggctgccgcgtgggccccactcccgtggacccggtctgcgcgccctctctcccggctgacgcaataa

SEQ ID NO: 35737 - DNA, 6293 bp, Oryza sativa
  Clone ID: PAT_MRT4530_39630C.1
agcttgccaaccgctactaggttcgcctttttccttaggacgagatgaccaggcatcaactccgtgggtcggactttttgttgtaagttgccgaagtgcttgtggcgtacttgtgcatgtgctcgagcgcttcgacccttacaccttccaagagttcgagtgatacctcgcgcccctcttcgcccccggagaacataacccttggtgagttagcccctagctccgctggggtcattgcctcttcgccataaagaagcataaatgggctaaacttggttggtcttgtgggggtcgtccgaagggcccaaagaaccgataacaattcttctagccatttgcctttcgccgccccctcaagtcttttctttagtgcttctaggatcttgccatttgtacgttcggccgccctatttgactgtgggtgcgcgaccgacgcgaacctgatttctaggttaagcccttcgcacatttctctgaacttatcagagtcaaactgcttgccgttgtcagtaatgaactcttttggcaccccgaaacgacaaacaatgtttttccatgcaaactttggtactgctgccgaagtgattgccccaaggggttcagcttcgatccatcgagagaaatattccacagctacaattgcgaatttatactcgtttcgcgccaccgggaatggcccaataatgtccagtccccatctggcgaagggccatattggtgcaatgggctgcagatcatactggggcgcggcttggcttcggccatggcgctggcaactttcgcacttcttgatttgctcaacacagactttcaacacagtgggccaataaactccttgtctaaatactttggaggccactgttcttgcagcctggtgcgcgccacatagcccctggtgtatttcctttgccatttcttcgccttcggcaaaagagatgcaacgaagtaagggttgaagtaccccggagcggtaaagctgacccgagaccatcttatacttcgtggctctgagttgcaaacgcttcgcttctgcttcgtctaccggaagccagccagtttcaaggtgtttcacaaatggggttcgccagtcatatgggtcttcacccagtttctcttggtcgattgtcatgacttccgagctgtccatgggcacacttggagcatgtaggacttcgaaaaagatgccaggcgaatgcgggccaccacaagcagcggatttcgccaaggcgtctgcttcctcgttttggtctctaggcaagtgttcgaccgttatgccggtgaagcatttttccatggaccgaacagcctccagataccccttcattccctcttcttttgcctcgaaggatttgtcaacatggcctgctaccaacttggagtcagttcgaattagcaggcgccggactcccagtgctttcgcctttcttaggctcaggagaacggcttcgtattctgctgcattgttggttgtgtcgaactgcaatctcgctgcgtaccgaatcggcacaccattcggtgaaaagaggactgtcgcaacgcctgccccattgtgcgaccacgaaccgtcagagcacatcacccagaactggtcgtcgggctcggggtcgggggcaagtaccggtgtccattcagctacgaagtcagctagcacttgagacttgatagcagagcgtgcaacaaaatgcaagtcgaacggggatagctctgccgcccacttgctgagccggccagtgacttccttgcctcagagtatttcgcccaaggggtactgtgatgggactatgactttgtgggcctggaagtagtgcttgtgcttgcgcgaagccattactagagcgtaagcaagcttttccatttcaatgtaccttgtcttcactccttgcagtgtttcggagacgaagtagaccggtttctgtccggactctttcttgaacgagtgcagcactgactgccactggcgaagctgccaagtataatagcagttcgcttcctgggggtgggcttatcagagctggtgggctttgcaagtattactttagctcgtcgaatgctgcttggcactctggtgtccaattaaactttcccgcgccctagagggtcttgaagaagggcaaacctctttcggccgcaaggaatcccaacaacttgcctgcgcggacgccgaaaacacacttctccggattcagctttatgcctgccgcgcgcaagctgtcgaacttctcctgcaggtcgatcgcatggtcgaaagccttgcggctttttacgacgatgtcgtcgacgtaagcttccacattctgccccaactgcttgccaaggaccttgtacaccggcctggcgaaagttgctcctgcattccttaagccgaaaggcatcctgaggtgacaaaatgtgccgaatggagtgatgaaggacgttttggggatgtcgagcgggttcatgtggatctggtggtaaccggaatatgcatccaggaaactcatgagctcacatctagctgttgaatccacgagctggtcgattcgcggcaaggggaaatcgtcttttggacacgccttgttcagatctgtgaaatcgacacacatgcgccatttgccatttgacttccgcaccagcactggattcgccaaccactccggatggtcgatctcttggataacccccgcccggagtaatttttgtacttcggccttcgccgcttcttggcgatcggcagacatcttgctcaacttttgttttcttggcttaatattcagcttgactgctaggtgatgcatgataagatccgccgggacgccccccacttcatcagggctccaggcgaagatatcgatattctttttgagcacctctagtatgctctcaacttcttcttcgcccatgtcgcccccagtgatacgagctttgtggggtcggcatcatcaatctgcacttttgttaccttgccgtgaggggtgggcttcggcgtgtgcttcggccgctcatgcggttcggtctcaacattgtgcactgctctgttgattatggctagatcgcgttttgaagcggacgaaggctgaagccccttgactactatcacccctcttgggccaggcatcttgagcttgagataattgtggtaggaaatggcttcgaacttgttcagggttgcacggccgaagatggcgttgtagttgtatgggatgttgacgacgtcgaacagtatttgctcttcgcgcctgttttctcccgagccgaaagctatcagcaaaagtgcttggccaagaacttgcactgcctctccgccgaacccccggagcgacgttggtgccggtgtaagagcttgggttggcaagcccatcttagcatatgcttcggcgaagatcacgtcggccgaactccctccatcgaccaggattcgtcgaacttcaaaaccggctatctcagctgagatcaccagtggatcttgatgcgggaacaggactccttcgacgtcttctggcctgaaagagatcagctggttcatgtacttcttgcgggctggctgctgatagttgcttgcttgctgggcatcgaactccttgcggagggcttgcacttcttcgacagccatcacagccttgcccgctcgatctgttctgaactttctccaagtcatgggggcttggccttgccttggcggctatccctggatcgccggctgagactggcgaacagagaggggaggtggttcggtaatttgagcttgcacttgagcttgagcagtggcgacggaggctttatcgtactcagcttgtatagcttgtcgtcgcctagaatcctcctcgccccttgcgaacccgtcaataatgcgaagtaggtgctcgagcgtctgcggctccttgttagtgatttttcttgttagttcgccctcaagcagaccagccgatgcggcgtttatgaccgacgcctcggttatgtcttgaacttggcaccgggcttgcgagaagcgacgcatgtactcccttatcgactcccccggcctttggcgaatgccgagtaggtgttgttgcgtcttcggctcctcgtaggtgcctcgaaagttaaggacaaaaacatcgcgcaaatgctcccatgagtaaatgctattggctggtaaattgaaataccaagaacgggcgatgccgtctagagcgagatgtattaccttcgccttggtattttcgtcaccatgagccgcttcgatcgctgactcgtagatggagaggaactccttcgggtcagtttcgcctgactagcgcgggatgggtgggaacttgaactggggtggaattggacgagtcttgattcccccactcagcggtagccccttttcgcctcccgccctgtttacccaccttgctgcgggtacggtgtggcgaagggcgaaatcgcagcttgtacgtgaggttgggccatggcgttcggctgcccggctccaactggaggcacttgctgagccgctatggatgggtcaaaaattggctgcgaccacgtcatggcagcttggattggtacttggtttgttccgaagcctggggtcggagcttgctgccgaacggttggcgcctaagcaacgttggcacagtcgaactgcggtccctgattctacggcgaagctcccgagcctgactgaatcggtggcaaccaagtaggcgcaccttaacttgtattccccaccgggtgagccgatggggttgtacttgaaatgtagtagggttggttgagttgctgaaggaaagcttggtgttgcgtctgcagagctgaagccccttccgccactgtttgtggcacttggccaggtgattgatgctgcccggtgaagtacaccggcacctgtgcggcttgtggcggaaagggctgggtcgtcacttgcggatggacttgaggttggacatagcctgccgaatactgaaggattggagccgacgtggccttgacccgccttgccgcctcgtatgcttgttgttgttcttgcatttggcgaagcatgtcttggagccgtgtcatgttgtgccgcatagcctccatgtcggcttcggcttgtgcttcgaggtcaaggctggtttgggcctgtacaacggcgagcgcggttgtggtcgctgccggctgtgatggagcagcttggggcaccaccggttggcttgtcgaaaggatctccgccatggtctggagtgcccttgccgccgcagccgccttcgccacgtcggcctcgttcggctcttgcaccgaagttgcaggggccgaaggcggttgtgatggcgcttgtgctcctccagcttcggctacgggcgccgaaggctctgctccttcctcggcggccatgtctggtccggcatcgctctccgttcgcctggcaaccttctccttcatgaccctcttcggtggcattcgctctaagtggttttgctcggagtccccacggtcggctccaactgttgtcgaaacgacaaatgattacccttatgaaagggacatttacaggggtacataatgtcataggggctcatgggcccccgatgggccgtctggcgatcgtcggcctgatgggccggaggggcttcctcagccctcgcgggagcgaacttgtcaaggcgaagtcatcctccttcggcagacagtcttcgccttgcacccttcgcctgagacgcctctggcctggcgctactcttcgccttacgccgttcttgctccatagcctacgccatgggtttcggcagcattggtcagtgatgagggtcacctttgacgggttctacgggacgccgtcattggtgaggcatccttctacaacccgtcacaggtcgtttgagataatagtacctgtgacaggtttgatatgtggttcgtcgcagtgcgacctgtcggacgccgagaaggcacagttcgtcaagctccacaacgacgcccgggccgcggtcggcgtcaaggcgcaggtgtcgtggagcgaggcggtggcggcgaaggcccgggagcacgccagcacatgccgcacggaccacatacaggggccatacggtgagaacctgtggtgggggtggagcagcgccgccggctgggtcgggaagccagcggacgcgatggggagctgggtgggcgagaagccgtactacgatcgcagcagcaacagctgcgtcggcgggaaggtgtgcggccactacacgcaggtggtgtggagccgcaccacccagatcggctgcgcgcgcgtcaccggctgcaacatcaacggtcgcagcagcacgctgatcgcctgcaactacaacccgcgtggcaacattaacgggaagcgcccctactag

SEQ ID NO: 35738 - DNA, 1567 bp, Oryza sativa
  Clone ID: PAT_MRT4530_39631C.1
gctcggggctgagacgcgccgaacagctcacgcttctcccgaagcaaagccacagcggcccaaaccctaaaccccctcgaagctccatccaatggcggggtggccggcggcggaggccgcgggggcgctggtggtggcgatcctcgcggcggcggcgggcggcgcggcggggaagacgacgatcgagccgtgcgcgggggcggacacgtgcgccgcgctgctcgggtacacgctgtacgcggacatgaaggtgtcggaggtggcggcgctgttcggcgccgacccgagggccgtgctcgccgcgaacgcgctcgacttcgcctcccccggcgccgccaaccgcatcctccccgcggggctcccgctccgcgtccccacccggtgcgcctgctccgacggcgtccgcaagtccgtcgccgtgcgctactccgcgcgccccgccgacacgctggcgtccgtcgccgacgtcgtcttcgccgggctcgcctccgccgaccagatccgcaccgccaacgggctctccgccgaggaccccgacgcgccgctcgacgccggcgccacgctcgtcgtcccgctcccctgcgcctgcttcaactccacggacaacaacctccccgccgtgtacctctcctatgtcgtgcgggtcggggacaccgtgcagtccatcgccgcgacccacgccaccaccgttacggacatcagcaatgtgaacgccatggggagccccattgtcgcacctggtgacatccttgcaatcccactgccagcctgtgcatcaatgtttcccaactctgcttcggactatggattgcttgtggcaaatgggacctatgcactaactgctggaaactgtgtgcagtgcagctgtggaccaggagatctcaaattgtattgcacaccagcttcattaacagcatcatgttcaagtatgcagtgccccaatagcaacctcatgcttgggaatgtgactgcccaatccaccagtggtggatgcaatgtctcatcttgcagctatgctggacttgttaatggaaccattgccacgtcgctctcctctggtcttcaacccacatgcccaggaccacatcagttccccccactcagggcgacaccaattgcagtaaaccaaggatcataccttgctccatcacctgcaccaggagctggggaggctggcggcgatattccgggcttccctgggagctccaacgtttctcctgcaaacggcccttctgggagtgtctcccaagcggcttcggtgaatcggccacaccaaatcgtcgccctcattctttctgtagccttgtacttccagatgtgaattcgtgtgcagagtattgttgttgttgctggctgtgtgtattgaacagggggccctcatttgggcctggtggaaccctaatgtcaaggtcctttctatcgccgtcgtggtatatagcagcgatccaattcttaatgcgtcaaacggaagccccaattggggcgggcttattcagtttgtaaccacatgggcgttcaaattcaaaacctattgcttgagataaaaaaaaaaaaaaaaaaaaaaaaa

SEQ ID NO: 35739 - DNA, 2477 bp, Oryza sativa
  Clone ID: PAT_MRT4530_39632C.1
gctgcttatcgaggtcaaggtgcaggggtggagcaacttgctccaggccacaatggatgggggatgcaccctccaccttgcgctaaggctcaagagaggcatgccgacctatatgaggacggtatcgcggaggcggagtacacacgatgtctgtgttctactgcacgatcgaccgggcggcgccacttcacgcaagcgcccctaggctacgccacccactcttgattagagctcatcaccacgcctcccgccgcacatcataccaagtgtcctccttcctcctcatcctccccaaccactgcatccgggtcggcgtcctcctcctcctcctcctcctcgcagaatgcaacgggcaattcaagctatcgggtcacatggcagtctcctcaagtctgctgttctgcgacacatcagtgctccaaaaccatctattttacctgctgtatattcacgctccatgtcagtttcatctgctcaaatagaggagagtggatttgagactgccactgtggcagatattttgaagtctaaggggaagagtgctgatggatcttggctctggtgcactactgatgactctgtctatgatgctgtcaaatctatgacgcaacacaatgttggagctctggtggttgttaaacctggacaggataaatcaattgctggtattgttactgagagagattacctcaggaaaatcatagtgcagggacgatcttccaagtcaactaaagttggagacatcatgactgaagagaaccagctgatcacggtgaagcctgataccagagtcctgcaagcaatgcagctgatgacagagaagcgcatcaggcacatcccggtgatcgacggcacgggcatggttgggatggtctccattggagacattgtccgcgccgtggtcagcgagcaccgggaagagctgaaccggctcaacgcctacatccagggtggctactaggacgccgacgtcgacgttggtcactcgctcctgccattgaggctgtgcctgtctgaaaaagactccctcttccaaataacgctcgctcgggatgatgacgaaataggccgcgattttcctggagaaattgttgccgaatgtttctgcttgttcgcgtgtattatatcaatctgatggtggaaacgaacacccaaataaaatgaaccgtgtacaccgtcttgtgcagcagcctgctgtttgtgaattgtggcaggttgttgttgagacgagtcttgatgtttaattagatggatttgccgctgtagtttgggaatcctgggcgttttcacaagtcagacgctgaacataagcaaagcctctggccatgtttggggattgtttgtggagtttttaacggctgatgcttcttttagaatctccagctcttctagttcctaaataaaagaggttaaaaaaaagatgtggcagtgccggccgggatccctagctcccccactctcgtttagggtttccctccgccgccgccgcctcccgcatccacgcgcctcctcctcctccgccgccgccgccgccaccgcagcatcagccatggccgaagtggagctcccgcagcaggaggtcaagctcttcagccgctggtccttcgaggacgtccaggtgaacgacatctcgctggcggactacctggcggtgaacccgacgaagcacgcgacgtacctgccgcacacgggcggggaggtactcggcgaagaggttccggaaggcgcagtgccccatcgtggagcgcctgaccaactcgctcatgatgcacggccgcaacaacgggaagaagatcatggccgtgcgcatcgtcaagcacgccatggagatcatccacctcctcaccgacgccaaccccattcaggtcatcgtcgacgccatcatcaacagtggccctcgtgaggatgcgacccgtattgggtctgcgggtgctgtgaggaggcaggctgtggatatctctcccttgaggagggtcaaccaggcaatctacctcctcaccactggtgccagggagagcgccttcaggaacatcaagaccattgctgagtgccttgctgacgagcttattaatgccgccaagggctcatccaacagctatgccatcaagaagaaggatgagatcgagcgtgttgccaaggccaaccgttgagtggtgatcccatgtcattgtgctaaagctcttgcgctgtttggcaggactatactttttgctagtaatttaagccttttcagacctacctgtggtttaatgtttgaatgaacatcactagtgctgagaaaaatatgtagtgctctattctatctatctatcgacatggttttatattgaacccgcaattcccgttccttcataatctgagttccttgatgcgtgctgaatggctctgctctggttatatgttgtttacttgtttgaattgatgaactgaagatgataattgatagattttgagtgcattactgtttccgcggctat

SEQ ID NO: 35740 - DNA, 324 bp, Oryza sativa
  Clone ID: PAT_MRT4530_39633C.1
gtaaaaacggaggaccctgggggtccatttttttttcacaacccggggtcccggaaaagggggaccccaatttttttgggccccaattccccccctgggccggcctttatttggttccttccagaggggttggtcccagttccgggtggccagtaacagaccccgcctcccccttggggggtgtccacgttgcaaacacccggggggctcgcccccgcccctttaatgtcccttttcggggggggggggaacccctgggccagggggggcccagggtgggggggcccgttttcccggggggggaccccaacggggggggggggg

SEQ ID NO: 35741 - DNA, 120 bp, Oryza sativa
  Clone ID: PAT_MRT4530_39634C.1
atggatgtgaattggatgatgcgatttgctttggaaatggctgggaatggatgggggatcgatgcggtggatgcgcggaagatttctgtggagttttggaaggcggatttgagcgaatcg

SEQ ID NO: 35742 - DNA, 1155 bp, Oryza sativa
  Clone ID: PAT_MRT4530_39635C.1
atgcagatcgggataaacgaaagtgaaaattcaacttcgttggatcataaattagctccgatgttattgtttcattacaactatgatatgtctctagaggaaagcgacgacgaccaggacaatgaagaaagtggtgatgacgaggatgtgagcgacgaagatgagtttactgaggcaagtgacgatgaagagtctatggaggaaactgatgatgatgaaaccgatgcaagtagtaatgataatgatgatgatactgctaatgatgagggtaaggaggtaaatgacactttgctcctctatagcatatctagcaaacaattgctagctaatagcaagctggattatttgaaagatcacttttactggataacaccacaaggttggctgctcatggtacaccgagactcgcatgagacattcttgtggaacccattcacatctcagagaattagcttgcccttcgatcaagacagattcctcagaacgaattatacaaggtgcttgctatcgtgtaagcccaccgatataaactgtgtcgtgctcgtcctaagccttaatgacacggtaatttggtattgttatcccggaggaacccaatggtttaagcatgagtatcagtctaggaggtttcatcgtcatcgtggtagcgtcattggatatatggcccttctcactgtagttgggggtaagttctacactgggcttggtgatagtgtcataacactagacttctccccaaatccaaagtttgatattattcctattaaagcggtacaaaatccaatgtacaacttttcaagactctatttgttagaatcaagtggggagttgttcagcttgttcttttaccctccaatgacatgtcctaaaagaatagcagagattgaagtttacaagctggacataccaagaagagcatgggtgaaggtgtacacacttggtgatagagcattttttgtcaatagcaccaagtgctttggagcatcggtcagcgcaaaagaagcttgtctagaggaaaactgcatttatttttcgaggaccggggacaagggactatatgttcatagtatggaacgtggaaccactgctgcactcaatcccggtgaagattttctagataatgtggcagctgaaatactgatgcctgcaccttga

SEQ ID NO: 35743 - DNA, 165 bp, Oryza sativa
  Clone ID: PAT_MRT4530_39636C.1
atggagccgaatgcctgcagctttgcaataactctgtttgcaggagcgctgtgccccatggactatctgttgcaaagaccaaagtcacaagtgattgttcagctgccgggcctcgccgatgttattgacgccgagtcccctggcctcctcctccccatcgggtag

SEQ ID NO: 35744 - DNA, 238 bp, Oryza sativa
  Clone ID: PAT_MRT4530_39637C.1
actttgtgaggttctacgagacgttcgcatgggcgtcatcaggcccccacaacgttgtgtgtgtgacccccgtctacacacgctgtgtccacatccacatatattgtgtgggggtatatgtgtattcccgcagagacgtatacgtatgtatggtgccgtcccacgcgaggcacttggcccacactcgtgtgggtgggtggtgtctcggtgttactgagattggtgacccactagatgt

SEQ ID NO: 35745 - DNA, 390 bp, Oryza sativa
  Clone ID: PAT_MRT4530_39638C.1
atggcggcggtggcggcggtggatggctcctcagttgactcggcggaagggctatcctcctccggctcctcgctcacgccgggtgcaaacgccggcgacgtggcgccgaagccagaggcgacgtgcagcggccgagcgatgagggtcagcgcgcggcggccggccgaggaggggcgcggcggacgggcgaggacaggacggacgcgagttctggacagagcgtcgtcgtcgtcgtcttcggaaacaccgcagtggtcgtcgtcgtgctctacccgccgcccctctgttcctcccgccgctcgctgccgctccacccaccgcctgccgcctctcagctccatcgccgcccctctgtgccgcccgccgccgctggagagagaggggggatag

SEQ ID NO: 35746 - DNA, 2508 bp, Oryza sativa
  Clone ID: PAT_MRT4530_39639C.1
atggcagaccgcgatgacgaacaaatcctgttagacacgatcgcagagggcagcagtcagtactgggtggatgatgaggggaacgaggatcccaaccaatacctgaacgaggagggcaacgatgaggacaacgtccccatcagcatagtgtactggcgtcgaactaggtcacgcggggatgaagatagctttctccctgacacagagaaggacatgttgtggaccaccatgctggagacattcacgatccctgaggcagattgtcccagatgcaaagaatggaccctaaagaaaatggcagaactattccagagctacaaatcagatctgtacaagagatacatcctcaagggcttgacacctgatttcaacactggagcgcaagtgcaagcacagatagaaaagaacaaagccaatgcagctaagaagaaataccatcaccggcttgggtcaggtggatatggaaaggcaatccccaagtgggacaagttggaagctgacttgatagcaaggggtatcgagccggccatggctaattggcctgagcgatcgaggaactggttctatgcacagggtggatcgctcaatccaggtgatggctccctcatattcagcgatgagattcgagatgtagcacgccgacttgcggatgcaattgaagcctctacgcaggggactttacggcccgacagagagaaggatgagctcaccctcgcactacagaatcttgagcatccaggacgaacgcgaggaaaaggcgtccttccttggaaatatggattcaaagaggacatccacacgtataggagtcggatgaggagcaagagggatacagaggctaagatcgtcgatcttgagtacagggtgtccacctacgaggcaaggatgcaagaggagcgcggaatggaaacacaagcgcccgtcatggtgagcccctcgggcaaccgcagcagctgcgcttcaatgggccaagttggatcagagggcattgaggcagtggcagctcacgaagcaacctacttcccggttgatgatatcacgcagcgaacaccctgcgatatgcatactcccttcaggaacttgtctatcaaggttgcgtcgggcatggccatacccacggacccttcgagtacataccattgcaggcccattccacatggatatgcgaaggtcgagatagagctggtggaacgaacctacgaggatctcgagcttgacatcctcggaggagacggggagaagaaacttggagacacagcccacgccatcatactctggcataagaagtcccgcccatatgaacccgcaccttcaaggccgaagaagaaagccagatctgacgagccacggctccccgctctcaagaaaagggcgtacgacttgactccggaggagctcgatgaagccgttagagcagaagttatggagcagttgaagccacgtagtccggaaaagaagatccctatagccccggaggttgaggatcactttattatgatggccgaaccaggcaaaccggttgaagtttctgactatgatcgaacattgaggaaggctcttaaagccaagccttcagcagtgaagtgtggaaaggaagtccctcagctggggcaacagccacgacaagaggttgaaccgttaatcgtagaaccggcacaactagagatatgcaacttcttgaaagatacgggactgagtatggagcagttgctagaggacgcacctatcgaaacggctccggtcatgtacacgtttaaactcggtgaactgctagtcacgcctgataagatcagagagctacctacacagatgtaccggttccatcaatggtacatggacaaatcagggatgggtagagagatgttcggagctagggtgcgaaactcagattattaccaaggagaagatgttatttggatccgctacaaagaagtcttcgacttataccacctgaaggccctcgacgtctctattctcagcgcgtggactttaatggagattcagttatgccgtcaacacaacaaattcaatactggattcgtggacccatgcaaagtgaacacgctgatgatacaacaatacgagaaacaaactaaggacaatatcgtccatttcctggtgcagcagcattataagaggttcatactacttccctacaacacatcagcatggattcggttccgtacattggtccgcgggatctggaatgaaaaactcacccggaggttcaattttctgtgtgcaaagcaggaaaaggggactaacttgtgtggctactacgtatgccattacatgcactgcttagcacaccaaatcaggactggccaggaccttgaaatgatttacctgatagataacaccacccacgatgatttcataagggctgttcaagaacagataatgggattcatcaacaagcatattctccatcccacaggagaattctattatgatggatcgactattcataaagccggtccttcttcttcctatgtcaccaagtcgtag

SEQ ID NO: 35747 - DNA, 181 bp, Oryza sativa
  Clone ID: PAT_MRT4530_3963C.1
cccacgcgtacgctcggttttttcctctttccagagtccaactccagacctagctctcgtcgccggccaaacccacactcgcgggccaccaaggggacggttaggtggcttcttccagatccggactcctaccctttttctcctgcaccagatccgaagctgggacgcccagggccggggg

SEQ ID NO: 35748 - DNA, 281 bp, Oryza sativa
  Clone ID: PAT_MRT4530_39640C.1
acttatgctgtttttgttcaccaatgttgtgctgtataatcttttgatttttagcccaaaggcttctgttatatatattgcgtccagcagctcaccaataattataagatgttggtactacagcggatttggaaggcacagcttgcaattgtaaggagaggtcaggagcacggtgatcaactcagaacgcggaaaggagtaatcgaggagatgcacgctgagattggagaggacatgctcacgaagatattggtgaggctgacgaacaatacgatgacgag

SEQ ID NO: 35749 - DNA, 706 bp, Oryza sativa
  unsure (1)..(706): unsure at all n locations
  Clone ID: PAT_MRT4530_39641C.1
gcataaaagaaagcaacaaggatttccaatctgatgatattacaaaagcattggttgctatcagcaatgaagcagcttcaattcctgtacctaaactaaagaatgtgcatagacttcggacagaacactatgtttacgaacttccagattcacatcccctcatgcaacagctagcactcgagcaacgggagcctgatgatccaagtccttacctgttggccatatggacaccagatgaactaaaggacacaagggaggcaccaaaaccgtgctgcaatcctcaaactgaaggtggcttatgcagcaatgagatgtgccacaactgtgtatctgaacgagaaaaccaatatagatacgtcagaggcacggttctggttccttgccgaacagccatgagaggtagttttccacttaatggcacttactttcaagttaatgaggtttttgctgatcacagttctagccacaatcccataaatatcccaagggagcagttatggaacttgcataggcgtatggtttactttgggacttcagtgccaaccatattcaaaggtctaacaactgaagaaatacagcactgcttctggagaggatttgtctgtgtgagaggattcaacatggaaactagggcaccaangcctctatgcccccatttccaccttgcagcaagcaaactgcgaagatcctctaaaaaagcagcaac

SEQ ID NO: 35750 - DNA, 2040 bp, Oryza sativa
  Clone ID: PAT_MRT4530_39642C.1
atgaagcttgagggaaggcacatcgttactgagattgccccagacggcgaaccagtagccccgacgggtataggacgaaagtttgtgaatcattgtggttgggtcgtgagagacaacgtccccatcagcatagtatactggcgtcgaactaggtcacgcggggatgaagatagctttctccctgacacagagaaggacatgttgtggaccaccatgctggagacattcacgatccctgaggcagatcgtcccagatgcaaagaatggaccctgaagaaaatggcagaactattccagagctacaaatcagatctgtacaagagatacatcctcaagggcttgatacctaatttcaacgtgcataacaagtttagggatcactgggatgcgtttgtggcatacaagactggagcgcaagggcaagcacagatagaaaagaacaaagccaatgcagctaagaagaaataccatcaccggcttgggtcaggcggatatgcaaaggcaatccccaagtgggacaagttggaagctgacttgatagcaaggggtatcgagccggccacggctaattggcctgagcgatcgaggaactggttctatgcacacggtggatcgctcaatccagagaaggacgagctcaccctcgcactacagaatcctgagcatctaggacgaatgcgaggaaaaggcgtcattccttggaaatatggattcaaagaggacatccacacgtataggagttggatgaggagcaagagggatacagaagctaagatcgtcgatcttgagtacagggtgtccacctacgaggcaaggatgcaagaggaggtgacaagacaggtggaccaacgcctggccgagcagcgcggaatggaaacacaagcgcccgtcatggtgagcccctcgggcaaccgcagcagctgcgcatcaacgggccaagttggatcagagggcattgaggcagtggcagctcacgaagcaacccacttccccgttggtgatatcacgcagcgaacaccctgcgatatgcatactccattcaggaacttgtctatcaaggtcacgtcgggcatggccatatccacggacccttcgagtacataccattgcaggcccattccacatggatatgcgaaggtcgagatagagctagtggaacgaacctacgaggatctcgagcttgacatccccggaggagacggggagaagaaacttggagacatagcccacgccatcatactctggcgtaagaagtacatcgtgtttcccgggcaagaacggccgcccgctcctccttccccgccgcaagcacagtctcctccgccatcaccgcctcgtcagtctcctctggctccttcccctgcaccaccacctcctccgcgtgcaccagctgccaagtctgcaccgtcgggctcgcgggcaactactcctccacgtgcacttgctgccaagtctacactgtcaaggtcccgcccatatgaacccgcaccatcaaggtcgaagaagaaagccagatctgacgagccatggctccccgctctcaagaaaagggcgtacgacttgactccggaggagctcgatgaagccgttagagcggaagttagggagcagttgaagccacgtagtccggaaaagaagatccctatagccccggaggttcaggatcactttattaagatggccgaaccgggcaaaccggtcgaagtttctgactatgatcgaacattgaggaaggctcttaaagccaagcctttagcagtgaagtgcggaaaggaagtccctcagctggggcaacagccacgacaagaggttgaagcgttagtcgtagaaccggcacaactagagatatgcaacttcttgaaagatacgggactgagtatggagcagttgctagaggatgcacctatcgaaacggctccagtcatgtacacgtttaaactcggtgaaccgctagtcatgcctgataagatcagagagctacctacacagatgtaccggttccatcaatggtacatggacaaatcagtgatgggtagatag

SEQ ID NO: 35751 - DNA, 1587 bp, Oryza sativa
  Clone ID: PAT_MRT4530_39643C.1
atggcgtttaggtgtaagggcggcgtcgcttgggttgctctgctcgtcgctgtcgcggctctcgcctccgccgctcagggatttccaaatcccttcggtcacgaggagttcacggagagttactacgacgagacgtgccccaacgcgcagagcatcgtgcgctcggtcatggagcgccacgccgccgccaacccccgcacggcgccggccatcctccgcctcttcttccacgactgcttcgtcaacggttgtgatgcctccatccttctgaacgctacggactccatggagagcgagaaggatgccgagcccaacgccaccctcgccggcttcgacgtgatcgacggcatcaagtccgagctcgagcgcagctgcccggccaccgtctcctgcgccgatgttctcgcgctcgccgcccgcgacgccgtcgccatgctcggcgggcccagctggggcgtgctcctcggccgcaaggactccctcaccgccagcatagacatggccaacaaggatctcccgaacccgaaagacagcctggccgaactcatcaggatgttcaaggagaacgacctcgacgagcgcgacctcaccgcgctctccggtgcgcacaccgtcggcatggcacatgactgcaagaactacgacgaccgcatctacagccgcgtcggccagggcggcgacagcatcgacccatccttcgcggcgcaacgcaggcaggagtgcgagcagaagcacggcaacgccacggcgccgttcgacgagcggacgccagccaagttcgacaacgcctactacgtcgacttgcttgcgaggcgcgggctcctcacatccgaccaggagctctacacccaggggtgcgagaccggcgacctggtgaagacgtacgccatgaacggcgacgtgttcttcgccgacttcgcgagggccatggttaagatggggaacatacgcccaaagcattggtggactccggcggaggtgaggtacaagtgctcggtggcaaacacccattattgcacctagctccatgccattgcttctgcttttaccttcgcaggaagatctggaggcaagttgtccaagaccgatcgcttgcaagcactgggaatgtgtgacttgccttgcatcttcacttcgatctggggaggggttcgcggcagaggggtggttgcagtggcgatctggggaagcaaagcggatgctggggtggtgctcggcacggtgatgtcgacgacagcctcagtgctgtgcggggtggttaggggtggtggcaaggtgcggatggacgcgacgggaggtggtggagctcgggttcatggtgaaggggtgattgcggtggtgattcggggaaataaaggggcggccgttgtgtggggaggggctgcggagctagtggtggcggcggcgcagagtggcgatgaccagggcggcagtggcgcgcagctggagtcggcggtagcggcggagagaggtggtgcgcgtggcggcggcgtttcggaggtggagagggagaatggagtatgggccggggtggagcttggcacagcgatgccgatggtggcagcggtggagtgcgggcgtagctag

SEQ ID NO: 35752 - DNA, 2370 bp, Oryza sativa
  Clone ID: PAT_MRT4530_39644C.1
atggcagaccgcgatgacgaacaaatcctattagacacgatcgcagagggcagtagtcagtactgggtggatgatgaggggaacgaggatcccaaccaatacctgaacaaggagggcaacgatgagggtaaccaggaggctaaccaggaggggaccgaggaggggactgatagtcaaccgtcggccggacagaagaggccacgcaggaaaagaggtcccgcgaagaagcttgagggaaggcacatcgttactgagattgccccagacggcgaaccagtagccccggcgggtataggacgaaagtttgtggatcattgtggttgggtcgtgagagacaacgtccctatcagcatagtgtactggcgtcgaactaggtcacgcggggatgaagatagctttctccctgacacagagaaggacatgttgtggaccaccatgctggagacattcacgatccctgaggtagatcgtcccagatgcaaagaatggaccctgaagaaaatggcagaactattccagagagagaaggacgagctcaccctcgcactacagaatcttgagcatccaggacgaacgcgaggaaaaggcgtccttccttggaaatatggattcaaagaggacatccacacgtataggagtcagatgaggagcaagagggatacagaggctaaggtcatcgatcttgagtatagggtgtccacctacgaggcaaggatgcaagaggagcgcggaatggaaatacaagcacccgtcatggtgagcccctcgggcaaccgcagcagctatgcatcaacgggccaagttggatcagagggcattgaggcagtggcagctcacgaagcaacccacttccccgttgatgatatcacgcagcgaacaccctgcgatatgcatactcccttcaggaacttgtctatcaaggtcgtgtcgggcatggccatacccacggacccttcgagtacataccatttctggcccattccacatggatatgcgaaggatctcgagcttgacatccccggaggagacggggagaagaaacttggagacacagcccacgccatcatactctggcgtaagaagtacatcgtgttttccgggcaagaacggccgcccgctcttcgttccccgccgcaagcacagtctccttcgacatcaccgcctcatcagactcctccggctccttcccctgcaccaccacctcctacgcgtgcaccagctgccaagtctgcaccgtcgggcccgcgggcaactactcctccgcgtgcacctgctgccaagtctacaccgtcaaggtcccgcccatatgaacccgcaccatcaaggccgaagaagaaagctagatctgacgagccacggctccccgctctcaagaaaagggcgtacgacttgactccggaggagctcgatgaagccgttagagcagaagttagggagcagttgaagccatgtagtccggaaaagaagatccctatagccccggatgttcaggatcactttattaagatggccgaaccgggcaaaccggtcgaagtttctgactatgatcgaacattgaggaaggctcttaaagccaagccttcagcagtgaagtgcggaaaggaagtccctcagttggggcaacagccacgacaagaggttgaaccgttagtcgtagaaccggcacaactagagatatgcaacttcttgaaagatacgggactgagtatggagcagttgctagaggacggacctattgaaacggctccggtcatgtacacgtttaaactcggtgaaccgctagtcacgcctgataagatcagagagctacctacacagatgtaccggttccatcaatggtacatggacaaatcagcgatgggtagagagatgttcagagctagggtgcgaaactcaaattattaccaaggagaagatgttatttggatccggcacaaggaagtcttcgacttataccacctgaaggccctcgacgtctctattctcaacgcgtggattttaatggagattcagttgtgccgtcaacacaacaaattcaatactggattcatggacccacgcaaagtgaacacgctgatgatacaacaatatgagaaacaaaccgaggacaatatcgtccatttcctggtgcaacagcattataagaggttcatactacttccctacaacacatcatttcattgggtccttcttcttttcgatcttgagaaatccaaagttcatgtctacgattcaatggataaaccagagaaaactttcgcaaagattttcgaagtgatagatagagcatggattcggttccgtacattggtccgcgggatctggaatgaaaaactcacccggaggttcaattttccgtgtgcaaagtag

SEQ ID NO: 35753 - DNA, 588 bp, Oryza sativa
  Clone ID: PAT_MRT4530_39645C.1
atgccattaccgccccagacgtcgccgtcgcctccgccgtcgtcgtcgtcgtgctcgccatgctcatccgccctcgcgaacgccaccgatagcgttgcctccctcaagatggcagaccgcgatgacgaacaaatcctgttagacacgatcgcagagggcagcagtcagtactgggtggatgatgaggggaacgaggatcccaaccaatacctgaacgaggagggcaacgatgagggtaaccaggaggctaaccaggaggggaccgaggaggggactaataatcaaccatcggccggacagaagaggccacgcgggaaaagaggtcccgcgaagaagcttgagggaggcacatcgttactgagattgccccagacggtgaaccagtcacacggggatgaagatagctttctccctgacacagagaaggacatgttgtggaccaccatgctggagacattcacgatccctgaggcagatcgtcccagatgcaaagaatggaccctgaagaaaatggcagaactattccagagctacaaatcagatctgtacaagagatacatcctcaagggcttgacacctgatttcaac

SEQ ID NO: 35754 - DNA, 1572 bp, Oryza sativa
  Clone ID: PAT_MRT4530_39646C.1
ccacatgtctaatgggtaaggcttaactcggtgctcagtctaatcctgaacaaaaaagacacagatggagatggctgaagtcgttgcgatggatatctctgaggcaaatgaaggctacatgggcgggtgttcggtagtcaagatgtcgtttgagttaatgggcatgcatcgacatcggcagcaccgtgtggatttcatggagtgggcaccaggtgctcgttattgttctgtagtgggtgattttaatcagtggtcaactactgaaaattgtgcacgcgaaggtcatttgggacatggaaagggcgaaaagcttggttggagaaatatgttccagcaatttctcataaagacaagtaccgtgtttattttaacactcctgatggtggtttggaacgcattcctgcttgggctactttttgtgtagatgctgaagggaagcagtcctatgcagtacactgggatcctcctccagaagaaatttataaatggagatttgaacggccgaaggtcaaaggttcacttaggatatacgaatgtcatgttggaataagtggatcggagcaaaaaatatcgtcatttcaggagttcacatcaaatgtcctccctcatataaaagatgctggctataatgctattcaattgattggaattgtggaacacaaggattactcttctgttggctataaggtcaccaattatttttcagtcagtagcagatttggctcgccagatgacttcaaaaaactagtggatgaggcacacggccttggattagtggtgcttcttgatattgtccactcctatgcatcagcagatgaattggttggcttatccctctttgatggttctaatgattgttacttccacagcggtacacgagggcaccacaaatactggggtaccagaatgttcaaatatgatgatattgatgttctacacttcttattgtctaatttaaattggtgggtcactgaataccgtgttgatggattccagtttcactcactgccttctatgttatatactcataatggcttttctactttcactggtgccactgaagagtattacaatcaatacgtcgatgaggatgcgctgatatatttaattatagcaaatgagatgttgcatgagcttcatccagatattataacaatagctgaggatgtaagttgttatcctgggctatgtgagccaaccactcaaggcggattaggatttgattactgggtcaatctttcaattcctgaaatgtggttgtggcatcttgaaaatgttcctgaagcaagaatggagcatgaataagattatgagagtactagtaaacaacaacagtaatatgctatcttacgtcgaaaatcacaaccaggtgatactatttgtctaattttgtctgttgctactaattatatcatgttattattactgtaatctcttcttactgaaagaaacagcacagatcctgcacatggttgagaaaacatataatataatcaaactaattacttttacaacaagtggtggtgcatatctcaacttcattggaaatgaatttgcacatccaaaggtgag

SEQ ID NO: 35755 - DNA, 375 bp, Oryza sativa
  Clone ID: PAT_MRT4530_39647C.1
atggccctgtcactggtgatgggaggtagaggggttgggtctccaccctccttggaggtcatcggggctggtcatccttgccctggtttccacagagagtgcataggtgctcctcttggtggcattcttcatagtctacgggctagtttccaccaccgcgccagatctagtaaggtcaagtatgtcatgcaatctttgtcctcattgtcaatcaatgttttggctatcatcctcgatgctcctgctccaatgtcggccaacttcttcggctttagtgatgtttatccaaggcaacatcttcagcaattcattgtgcaatcaccatcgtcaatcgtgtcgtccaactccaaatcttgctgtgggcagagaagatag

SEQ ID NO: 35756 - DNA, 480 bp, Oryza sativa
  Clone ID: PAT_MRT4530_39648C.1
atggctgagatgctgattcggccgaacctgggctgggccctcctggcttggccttcggcctgtggactccctctgttctgccttatccatttctgtgaattttgggctgattctctggggagactgccgaaatttctaataattttgggagttagtggtttgagtgtttttttggtgtggcactttagtccaatcggcgagacaccggcgatcagaccgacgacattggatcggtcagaccagcggagcaacgatggtcagaccgacggcggcgacaggagccaggagcgattcttcggcgaggatgaagaggtggaggtcgctctcgcggcaccgacagcgagcacacgagcccgagcccctgaggggatgctaccgcgccgccgccaccttcctcttatagcaacgctgacgccctcctccacaccgccgcttgcggccactcgtgcgctgacgccctgctcctgcctgccacgctga

SEQ ID NO: 35757 - DNA, 578 bp, Oryza sativa
  Clone ID: PAT_MRT4530_39649C.1
atggatcgcttgtcgcggccggcgagccccgcgggcgggtacgctcgccggggcagcggcggcgggtacgggcaccactactacgggggcggtggcggtggatcggcgcagacgtcgccgccgggtggatctccgacggcgtcgcccgtgcaccgccacgcgcggacggggtcgctgggtggcgcgggggcggcgtccaccgtggggcgacgtggccgcgcgcataataccgcggcgagggccgcggcgcaacggctcgcgcgggtcatggcgtccaccgacggcgcgggggtaggaggaggaggcggcggcgtgggtggtggtggggatgggggcagcggcagcgacgacgacgagtacgagctctcggggccacccatcgagctctcctccaccccgcggcgcaccggcacccgctccccttccccatcggctccggtgagccgaccaccgtcgttgacgaaccgatacacgcccgggaagtcagttccgatgataccttcgatcaagcaacagaaccggccagcgacgagcggtccagggtcagagtcgcccgcaataaatcgacgggagcaaag

SEQ ID NO: 35758 - DNA, 465 bp, Oryza sativa
  Clone ID: PAT_MRT4530_3964C.1
ctgtcggtgatatgggaccgggggtatcgtgaccagaggcttgaggcagacacaatcgcccacgcggcctggcaccttcggggacgtcgggcccgagggtgaggtgtctgccctcctcctgatttctcccgaggggggggtcgggttactcctgccccggccccgagggccgaggcaccccgaccccttgaggaagtcggtcagatcacgggttaggtggcgactggcggtctgacgcacgccttgccccgtcccgtcaagacgaaagcctctaggcactcgtctcaagccggagttaggcgcgttatctgtatagatcgccggtgtctcgtgtttctggctggcggacgatatttccacatacagagagagagcgagagcttgagatttcaccctaagcccccggccgaactggcaaaggggggcctgcgcggtctcccggtgaggagccaccagctccgtcat

SEQ ID NO: 35759 - DNA, 471 bp, Oryza sativa
  Clone ID: PAT_MRT4530_39650C.1
atggctcggccacggcgggacggcgacggcgacgcatcgccggggttcatcgccgacagccacctccgtctgccagctcaccccgtccccacctctcctccctgccgtcctcgcttcctgcaacggccggcgcgggccgctggggcgcagacggagctggaagcgaacgggatgacgacagcgtgcgccggcggggagggcagcgaggaggctggagagggagtgctcgcggaacggcgacgacgcacgacggctcggccatggcggagctcggcggcagcgcaacgagaaaaagatgaacagagagagaggaagaagaagaacaaagagagattaacaagtgggactatgagacaacaccacgaggaggaggcggtggccttcggccggtatctctgcggcgagcacgtcctgcaccgcgaggacgacgttcgcgagttcagtgaatggcaatcacatgtattagtgata

SEQ ID NO: 35760 - DNA, 368 bp, Oryza sativa
  Clone ID: PAT_MRT4530_39651C.1
aaaacaattatatttcttacatatccacacatttatttgtccatggttcataaatattaaaacgttactcatcccaaaataatctatattctataaccacactttcataacttctttccatcaatacaattcttcaaattaaacacccgccaaatttaaaacatttttatattttttaaccatacaccctttaaaaaaacctttttctttaaatactttttaaacactttacccaacaaactttactctacacttaatcttttttaaaaacactaaacaattccccctttttatctatacttttaaaaaccctcaaatataattttttccccccacaataaaaatcctcattttaaactatcttcttt

SEQ ID NO: 35761 - DNA, 903 bp, Oryza sativa
  Clone ID: PAT_MRT4530_39652C.1
atggctccaagaatattagagaaggcattacacagtgatatcgcagatgatgtcataagatgcaacattctaccacgacttccattcaagttgaccacccgtttgaaggtcatatcatcaacgcctgacattgttggcattccctcaggttttgactttcttggttgctgcctagaaaatgggattctaagtctccttgcctcaaccaatgggcttgtctgcatcctctatactcgcatcggccttgcgttcgacccagtggataaatttcaggagaatacagtaagcaagttcaagatagtcaaggcagttggtgctaggaccattgaggataacgggactaagttttgctttgccaccttatcctcaaatactagctgctgggccatgtccagtacaaccgtttatgtggacaccaaaattaactgcaacaacaagaaggtggcctatggaagtggaatcatgtactgggattaccaggagattgtgctctggtttgacattgccacagatatggctggtatcgtgaagattccatggattcaactaggtgtcgaagtgaagggacctgtccaccatgatattgacacctctgccaatggaatgctgtttataagatgtggtgtcgaagtgaagggacctgtccaccatgatattgacacctctgccaatggaatgcttgtgtgtactacaattgataagggtggactaccaatgtatcatcttgttggagtaaacaccgacttcaattgggagatcaagcatgacagaagatggattgacatgatgaaggatagcatctctgcatttgggttctgccattcaatgcagttgcactcagggttgcagacaaaccttattgatgccggttccaaaccggcactggaactagcacctatttga

SEQ ID NO: 35762 - DNA, 237 bp, Oryza sativa
  Clone ID: PAT_MRT4530_39653C.1
atggctagagatttgagagccgcggttgaagtcgccaatggacttaagcagattacttgtccttcattcgtcggggctactctctctttttacatgaacacaattttcaagatggtgaacggtgtattcttaagaaacattttatttaaaattttctttaaaaatcaaataaatttacttctacgccacttgagcagaaacgaatgggacctaagagtgtcacataagattaggtga

SEQ ID NO: 35763 - DNA, 257 bp, Oryza sativa
  Clone ID: PAT_MRT4530_39654C.1
atgaagttaagcatgaaacgaccccatacaatcacacttctcgcatgggtcttcccttcccggatacgccagaactcctctcactactagaaactgtgtacgcctagagtgcatgaggatgaaaagttcatggagcgggtactgtcaatgtgaggttatcgaaaagctttgccgtgatacgtctcatgtgttgggacgaggctcatgtgttgggcagtcgcggagtgtgggtaaagtgtacatccactgcagtgtga

SEQ ID NO: 35764 - DNA, 407 bp, Oryza sativa
  Clone ID: PAT_MRT4530_39655C.1
gctcatcttctcatgtcaactcactgagcatacatgtttgtatgattcatgtctgaccagtggtagagaagcataaatgaactgacctagatcatagttatacattggagaagctcaacagtggagaattatatgtgattacatggtttgacatttacatggggccgcatagccatccttgaccttgtgtgttggattgatctaactttatttgacaaccaggatatagttctacttcctaaacttgttagccatggttgccctccatccaacaactcagtatctaatattctggataataattatacatggtatgcaacacaccatctactggagagattcaccaagcttccttctcttgatacaacagcttatacccaagacaatctttgtatctttacaagaaa

SEQ ID NO: 35765 - DNA, 1447 bp, Oryza sativa
  unsure (1)..(1447): unsure at all n locations
  Clone ID: PAT_MRT4530_39656C.1
cccgcgagccggtccacgagtccagcagttgttttcagagcccagctagctctcgatcatttgttacagagaaattgatcaaagcaggaaattaaccagctgtcaggaagcaatggctctcgtggaggataacaatgccgtagcggtgagcttcagcgaggagcaggaggcgctggtgctcaagtcatgggcgatcttgaagaaggattccgccaatattgccctccgcttcttcttgaagatcttcgaggtcgcgccgtcggaccagatgttctcgttcctgcgcaactccgacgtgccgctcgcggttgagttgaattgagctcgaattgtactcgattcaccacacagaggaatcaaatcgaagcagccatggctctcgtggagggaaacaacggcgtgtcggggggagcggtcagcttcagcgaggagcaggaggcgcttgtgctcaagtcgtgggccatcatgaagaaggattccgccaacattggactccgcttcttcttgaagatcttcgaggtcgcgccgtcggcgagccagatgttctcgttcctgcgcaactccgacgtgccgctcgagaagaaccccaagctcaagacccacgccatgtccgtcttcgtcatgacatgtgaggccgccgcgcagctgcggaaagccgggaaggtcaccgtgagagacaccaccctgaagaggctcggcgccacgcacttcaagtacggcgtcggagacgcccactttgaggtgacgaggttcgcgctgcttgagacgatcaaggaggcggttccggtggacatgtggagccccgcgatgaagagcgcgtggagcgaagcctacaaccaactggtcgcggccatcaagcaggagatgaagcctgctgagtgatatatatactgctccacctccatgatcctcgctgatcaactttgttgcattgtgctcgttcaatattcctcgccccacaaaagggacttttgtcggtgtgtgtatgtccaaatgattaaatcaactgctgttttgttctatgtaagatacataactcataaataaagatggttttctaaaaaaaaaaaaaaaaaaaaaaaaaaaaaatgggccgtccggccagcatggcccaagcaagaccgggcttgggccgatgttagtcgggctgacccacgggctacaccaacgtgtccgtgccatctcagatcttaaatccctgatctatcgtcgagttcaatcccgaatccagatccttcccaaatcaaatccctccgcaaaagtctatttcgcctccctcgggtttgatgaaatcnatatggngactccaccgcgtttggcgnngccgctctnanaactagtggnatcccccggngctgcagggaattcgattttcccctccccgccggcgtcatccgcctctgtcgccgttttggccacgagcgccgagcgccagctcgcaccttga

SEQ ID NO: 35766 - DNA, 809 bp, Oryza sativa
  Clone ID: PAT_MRT4530_39657C.1
cgcgtccggttgttttcagagcccagctagctctcgatcatttgttacagagaaattgatcaaagcaggaaattaaaccagctgtcaggaagcaatggctctcgtggaggataacaatgccgtagcggtgagcttcagcgaggagcaggaggcgctggtgctcaagtcatgggcgatcttgaagaaggattccgccaatattgccctccgcttcttcttgaagatcttcgaggtcgcgccgtcggcgagccagatgttctcgttcctgcgaaactccgacgtgccgctcgagaagaaccccaagctcaagacccacgccatgtccgtcttcgtcatgacatgcgaggccgccgcgcagctgcggaaagccgggaaggtcaccgtgagagacaccaccctcaagaggctcggcgccacgcacctcaagtacggcgtcggagacgcccacttcgaggtggtgaagttcgcgctgcttgacacgatcaaggaggaggttccggcggacatgtggagcccggcgatgaagagcgcgtggagcgaagcctacgaccacctggtcgctgccatcaagcaggagatgaagcccgcggagtgatcgacaggcatgctagctgctccacctccatgatcctcgcctcgcgagtccgattagcttttgttgctttcaaatgctcgtttcatattcatcgtgtcccacaaaaaaaggagtgtgtatgtggtgtacgattggtgcacgctcctgctgttttcttctcgtgataagacataaataaagatggttttctacgcttgcatgcgcttttgaacag

SEQ ID NO: 35767 - DNA, 246 bp, Oryza sativa
  Clone ID: PAT_MRT4530_39658C.1
atggccgatgtggctccatcagtccatgtgcaattctccatcctgtcctgctttggccacactcctgtggcggcgttcgtgctcgctggggtgcagggcgctgggatgccaacaggaggcggctgcacggggcgttcgcaggcgagcggtgccgggggcaggagcgcggggatgccatcagatggcggcgctgggaatctgcggacggccgacactaggcacacgcgagcagcaaggctaatatga

SEQ ID NO: 35768 - DNA, 337 bp, Oryza sativa
  Clone ID: PAT_MRT4530_39659C.1
ccacgcgtgcgcccgaaaacattcctgtttatctctatccatccctattcactcttcatttttctttctcttactttctccactactggggtaaagctgggttctgggacatacctattgatgcaagcctggaatccatgtcagtaaatgctatgggttgtgaaggacaagtaaaccctaaagtaaatgaagtccataaagcacacgattgtcttttgcccatggggataacgtcctaaaatgttgcgcaccgatatggtgtaacaagacaagaacatgatcaggctgctgctgagtctcatacgaaggcctcttcatccacatctgcttggaaatt

SEQ ID NO: 35769 - DNA, 705 bp, Oryza sativa
  Clone ID: PAT_MRT4530_3965C.1
atggcggccgagatccccgcgcccgtttcctccctctccggccgcgctctccccctcccggcgctatataatcgtcccccgcgcttcgctcttccgtttccgccgctcgccgctcgctctcgccgtcggattcgtgctcgcgccgtcttcctctctctccgccgtcgccgccgagctccggttcgccgccgccgtcgctccggacttcctccccactcggcgtcacctccatcggcttcgccgcgtcgtcgtcgacctcgtccgctccttcgtttcgcccgccgaccgccggagcaccgtcgccctcgccgtcccgaaccgcgccgccgcgttcctccgctccgttcgtcgtctccgccgtcctcgtgtctcggggtgagccgtggaccgtccctttcgcttccctctcctctccgctctctcgggcgccgctccgccgcgccggtggtcgccggcggtgaccatcggggcgcgggcgcgtccccctcccgtcggccgtgccggcgaggccgccttcgggcgcgccctcgcggctgccaagtgggcccagccgtcagccgcccgcgcccgcgggtgcggctgacgcgtgggacccacggcgccggccgccgccagccgcgtgctcccggtccaccgtggaccgaggggctggcgcgtgggccccactcccgtggacccggtccgcgcgccctctctctcggctga

SEQ ID NO: 35770 - DNA, 204 bp, Oryza sativa
  Clone ID: PAT_MRT4530_39660C.1
atgcccaatctactcttgctacatttgcaccttccagtcctcagagctacgtccctcaagagagaatcatattccaggaaggaagaggatgatgcggagaaagagcggcaaaaagcggagaggtacaaagttgcattcgcacttgatcaacaatggattggtttggagaaagaaaagtttgagttgaagagaatgatagaataa

SEQ ID NO: 35771 - DNA, 1329 bp, Oryza sativa
  Clone ID: PAT_MRT4530_39661C.1
atggcgccagtgcaagtcccagctgagctcatcggcagcagcaacggcggaggaagcgcgggggggtcactgaccgtggacccggcgctcggccggcggcaggcgactgcggcggcggcagcgctgccgacgccgaggtcgccgccgccggcgttcgggagcatcgtggcggtgctgagcatcgacggcggcggcgtgcgcgggatcatcccggggaccatcctggcgttcctggaggagaagctgcaggagctggacgggccggcggcgagggtggcggactacttcgacgtcatcgccgggacgagcacgggcgggctggtgacggccatgctcgcggcgcccggcgccgacggccggccgctcttcgccgccaaggacatcgtcgacttctacctccggcatagccccaagatattccctcctgtcatcaaaggacccctgggtttgctgaagagcatgatgggtcccaagtacgacgggcgatacctccggtccattgtgcaggagctgctcggtgacaccaggattagccaggccatcaccaacgtcgtcatccccacatttgacatcaagctcctccagcccaccatcttctctagatttgatgcacagaaggatgcatccaagaatgctctcttgtccgacgtgtgcatcagcacgtcagcggcgccgacctacctccccggtcaccgtttcgagaccaaggacaaggccggtcagccccgggtcttcaatctcatcgatggaggtgttgctgccaacaatccgacgttggtggcgatgacccacgtgagcaagcagatcctgctggggaaccaggacttcttcccgatcaaaccggccgactacggcaagttcatggtgctctccctcagcaccggctcggccaaggtggaggggaggtcattcgacgccgacgagtctggccggtggggcctcctcggctggctccgcaacgacggcggctcggcgccgccgctgatcgacagcttcgcgcagtccagctccgacctcgtcgacatccacgcctccgtgctcttccaggcgctccgctgcgaccgccactacctccgcatccaggacgacgacctcaccggcgacgccgcttccgtcgacgtggccacgccggagaacctccgcgcgctcgccggcgccggggccgcgctgctgcggaggcaggcgtgcagggtggacgtggagaccggcaggaacgtggccgacgccggcaggggcaccaacgaggaggagctggcgcgcttcgcccggatgctgtcgatggagcgccgggcgaggctcggcaagcaggagtccacccctcgtgtataa

SEQ ID NO: 35772 - DNA, 111 bp, Oryza sativa
  Clone ID: PAT_MRT4530_39662C.1
gttcgtgcagtttgtacttcaaacagattcgaagtgtatatatgcatggatttgttgtacgtcaagatgtaaatagatggtgatggtgaacgtgattgaacttgtcctgat

SEQ ID NO: 35773 - DNA, 3453 bp, Oryza sativa
  Clone ID: PAT_MRT4530_39663C.1
atggcgcagacgacggcggcgttcgtggctagctccagcgcctctctcctccgtgccgtcaccgttcacgagtggcgccatcgctgccatcttgctctagccaggggagagagagatggggtgggaggggagtggtggggcccacgaatagccaagaagagagactctccaagtttagctagtgagaggatcaaatcaactggcacgctcaagaatctaaaggcaagattttggacctgcaatgaagttaagcagatcttccaggccagttcgcaacttttcccccaccttgttcaggttctttcgcctcatggttctgcaacggcggttgtgaaccccgatccagttcctttccttcctccaaccctgcagcttcaagaatcttgggatcaccagcttgagcgcgctgacctctgtcttcaagaggaaccacccaggcgcaatgaagatatggcagtggttcagaatgtgttggggtaccatattcttgaagttagttggcatcctatggaattcttgtacattcgtgttgcctctgctcttttgagggatactctaatctcggggggaccgtatgatgttgagcatcagttcatgcttagttttgtgcctcaagatttcgctgttagttgtcgtaactcgcctttcactatggagggatggattatgtttttggacttcccactggactttaaaactcctgctatcatagacaaggcggtttccctgtttggtaaagtgattaaagctcagcttgatgataatgtgaggggaagattgctggttaaagctgtgtactcttctacccttcaagttcctagaagaattgtgattaaaagggttacagcttttggtggagttggacggtcttggactgtctcagttttcctttgtgatggggatctgccagatgtcatgcctacagatgaagatcttcctccagtcaatcacatttccgttcctgaaccagtgccacaagtgcagccagaagtggagctttttagagacaatatgcaggaggatgcccacgaggaccaacagcagcagtctcatactattagtgccctgtctgtggtggctgctggatcccaccaatggtctctggcgatgggaccccctcagaatctccagattgtgtcatactccttgccagttgttcagatagaggcccatcactttgaagatgttgaaatgattgagcccattgcctcggttccacctaaccaggctgatctgcccatggccccatttcagcaattggggtccaacaggccctctcttaaaaagtctaaaaagggtaaggccaaacaggtagcaattattgatactgatcgaaggaggagttccaggatcaataagcttactgaaggatacatgtcccctgatcccaatctaggaattggaaagcctaggggaaaaagtgttaagaagcttaagcttattgctcaacagagtgtcaatgtttatggtccttcatatggaccagaaagagatgtctttgtgcaatggatgaatagtttggatatagagccaaatgaaaactggattatcatgggagattttaatttctatagatttgtgcagaacagaaatagacctggaggggacatgaatgatattttcctctttaatgacatgatcagtaatcttggtttgattgaaatccctttaaaagatagatcttttacttggagtaacatgcatgacagccctttacttgagcagcttgactgggtgttcatttctcccagctggttaatctcctaccctaataccttggctttgtctatgattaagcatatatctgatcatgtgccgttgaaggttcaagtgcaaactgccattcctagggcaaatgtttgccgttttgaaaacttttgggttcagcacgaggggttttttcagcaagttcttaatgcttggctcgcagttcaaaacatagatagttctgccatggctatttcagccgaactcaagcaagtcaaaagaaatttaaagtgttggagtaaagagttgtcaaagctttcacttgtaattgacaattgtaataaggtgattaattttttcgacattttcgaagagcgtaggctcctctcagtgcttgaactggtattcaggagtatggttagaaagaaagtaactcttttactaggatacaagcaggaatactggaggaagaggttcaggcaaaattgggctcaatttggtggggaaaatacaaaaaattttcatgccatggcttctaagaggtttcgaaaaaattctacccagctcaccacctctgatggcattgatatttccgatcatgaaggcaaggcagggttagtccttgagacttacagagcaaggctgggggtgtctggattgccttccatggcatttgagttgagtgatctttttattcccagggatgatcttgatgatctagtggagcccttttctactaaagagatagatgaaattattgctcaaatgcccactgataaagctccagggcctgatgggaaagatggtacaactggttcaccaaaatcaatatggtttcataaaatccaagacaattatattgacagagctagaaggcattttttgtggagaggaaaggatcttaattcaaccaagaaatctttggcttcttggggaaaggtttttgctcactctttcccaacactcttttccttcgcaaagcacaaattagacacagttgctcagcatcattcaaggtcagttgatgatcagttctttcttccactatcagttcaagcatatgaagaatataaagttttcctggaggatgttacccaaatctctttgaactacatggtggataaatggacatacatctgggcttctacttctgtacttctgaatggggtcccaggaaagtttttcccttgtaggagaggagttaggcaaggggatcctctttctcctccactctttgcaattggtgcagatatcctgcaatctatcatcaataagggtcatcaaagaggtgtttttcatttgccaattctaataaatggggattgcaatttcccaattgtgccatatgcagatgatacattgcttttcatgcaagcctctaggactctgcttttggccttgaaagctttgctcaatacagttgcttcatcaactgggttaaaggttaatttttcgaaatcttgtctgatccctttgaatttggatgaggacaaagctaacaatcctgcccagacttttggttgctcctttgggactttgcctttcacttatttaggccttcctcttagctgttccaagcctaaggttattgatttctctcctctcactgattggattgaaagaatgcttgttgcaacctctgcttttctttcctatggggacagactcactcttgtcaactctgttttgtcaacaatgcccacatactatatgtgttctctccagcttcctgttgcagtgatttaa

SEQ ID NO: 35774 - DNA, 604 bp, Oryza sativa
  Clone ID: PAT_MRT4530_39664C.1
aaaggaaaaaggggggggcacaggcaaaaacctttccccattattcaggggggaaaaacccgggaacaaaccacaaaactaccgacctacaagctgaaatcggacaaaaaaaggaaacggccctgaacaatccccaatccccccccgtttagcagcttttttaacaaggaattaccccccaacccaggggttttttgggcccccgcaaaaaaggccccaggggaaaaactaaacaaaccccccctccaaaaaaaaaaaatcccccccaaaacggggggctttcaccaaaactcaggggaaaaaaaactttagcactaacaaccaaccccgccgggtttgaaaaaaaccagcgccggattttttaccccattacaggggagccaaaaaaaactgggggggggtcacccccccccaccattttcgcttcaccgaggggggcaaaaattcggggcccccccccagctggggggggaacacctttgtcccccttaggcgcgagccgaagccctttttccaagaggaaaaattttggttcagccgggggagccccatgggagggttaaggggggaattggcctggccggacttgacctcaaccaaaaac

SEQ ID NO: 35775 - DNA, 516 bp, Oryza sativa
  Clone ID: PAT_MRT4530_39665C.1
tttttattttatttttttttttatttttttttttttggtttttttttttttttgtttttttgtttttttttgggtgtttttttttttttttttttttttttttttgtaaaaagaaacaacgggacacaaaggggcccgacataaaggagaatcttgaaaaaaaagaccacggggggaaaagttcagatcaaagcgacactaaaaaagaaataaacggacaaacaaagaacaaagatgccccaaccaaaaaaaagggggggaaaaaaaaaaagggggggcactaacgaccaaaaggggggaatccaaattgcacccaaaaaaatggaactaaaaaaactacattggggggggcctcatcttaaaaaggggggggccaaaattttgcccaccccccctgccaaaatcttgggaaaacttttaccgcccccccaaattttttttgacaaacggggggatgcgcacggaaaggatatcacgaaaatcacgcccaaaaatgggggggggaaggaaatttgc

SEQ ID NO: 35776 - DNA, 366 bp, Oryza sativa
  Clone ID: PAT_MRT4530_39666C.1
atgtccgaaactagccacgagctgaggtcggggacgccggctcgtccgttcgtctcgtccctccacctcccgccctctgtggtactacagtcccaagcagccgagctccaactctgcaccatcatgaagctccctctgacggcatcaacccaggcgatcgccgtcacacgaacccgtgcacggcaacgcctccgggagctgaggccgacggcgagggtggcggcggaccaccgcaataaagcgcaggaaaagcgtcggcgtccggttgcgccggggcatggggccaacgggaccgggccgggcggtggtcagggccaatccaacgaccaggtcacatggcaactgtaccaacatgtactctggtga

SEQ ID NO: 35777 - DNA, 308 bp, Oryza sativa
  Clone ID: PAT_MRT4530_39667C.1
tcggaaacgcgtgggggtgagccttcgggcatttagcaatgtaggggtacccattgggataggaggtgcatgctaatgcctgacttatactatgaacaccacaactggctactaagaaacagctacctggtgtgtcgtgtgtggaacctatataataagtgcagccgatcgatcggaaacatatatatgtggtgaatcaattactgagttgccatgagcagaaaaaacgggaccataagagcctcttggccgtcatccgccggatggttaggagctacgaccagagcatgccgatacccatggagcaa

SEQ ID NO: 35778 - DNA, 142 bp, Oryza sativa
  unsure (1)..(142): unsure at all n locations
  Clone ID: PAT_MRT4530_39668C.1
cttatcaccgcaatcaaacagccctctcggcgatcaantcaccgcaaaataccccccccgcgcgccctcggcgcaaaatcactcccgcctatctcacaccaccctcaacgcttcatcaccccgctcaccgaacactcccacc

SEQ ID NO: 35779 - DNA, 5085 bp, Oryza sativa
  Clone ID: PAT_MRT4530_39669C.1
ctacagcacaggaccatgcccgggacgaaaccgcctgggatgaacacttttttttggtctttcttttttgtatcatctcacttcaaccggagcccaaccaagaataccaccagagctgctagatttctgtaacctgtgatcatttttcatgtttgttggagattgataccaagcttacttataaaagtgattatcagccattgtttttcttcttttttgtaagaatgggcaactaaaccataattcattatattgcaacttaaaaagatcatacatgtattgatgttgaactatatagatcattgctgagatgaactttcttaaaacatcccaactgaaatattcttctattagatcacaaaactgaccgacaaaattttctagactcttcctcttgcctcaagtttttttttcaatgtcagaagaatcttgtgtgtgtacatctgctaaaggtgccagcatctcctcagcaacccctggcatttcttttagactcggattcaaaactgtggtccacatcaggttccagcacttcattatttttttttcttcaaaaagaatttcaattgaacggtcttcccccatttttacatgtgcggcatgctagaagctgatatttccttggagcgatgctgctttaagtgacaacattgttcacttgaacaactacagcaaaggcccatgcccgggtggaaaacgactgggatgaacacctctttttggtctttcattgccgtatcgtctcatttcaaccggagcccaaccaagaataccagcagaactgctagattcctgtaacctctttccatcggccatgattggaggagcctcctccaaaggttggttatccaattgattgacgaggacctcccttggctttcgagctcttaccacgaagattggcaaattccttttgtagaagagcactagcacgattatccaagttcggtgcacgcggtaaaaacgtctctcgttcaccaagggttgctggtgcaattttcgctgtcaagctaagttttggatctaatcgtatcttctcccaatttccatagccataccaatgaattccaaccatcaatcttgcatcatcagtttcagtccaaccacagcttgctgaccactgtggcttttgtaaggtgcctggatccggtattgtctaactggatctttgtaacgtgcaatgcgccttgccaggaactgtagctcttccacacgggctatcaactcatgcgccttaactgctacaccaaaaaaatccaacactgtgcccttggcatccatattatttttaacagcatcttgacaaccctcaatgagtagagtaaacagctcaagctgttgatcaaccgaagactttgctattgcaccaccaacatcatccacgattaacccaatttggcttgggtttccaaattttttaaccgctcgaacaaatcgggtagcatctttctttgacaaatttccaaatgaccattctcgtacttgatgtgctgaaccatctatgagtggtaatgacacagctgtgtccattgttctgctagaacgcctccttggcttttcttgtgcatcgattcctcgccttttcctgttgctattcttatcaagttggtgatcttcaacatagctcttcttatttcttgcagcacgaggtgctaaagtctcctcaaccatatctgaagcatctggttgaattaatctgctccagaatgtggcatcatcctcaccactagaaaagttggcaacagaagtatagaatttaagcatgatgtctgaatcacaggtcatatggtagtgcacagaacatgccttgaatgcactaagaagttcatttccttcctccccttcaccaccctttgtttcaactttctcagctctctcgagaatttcatcaatgtccatgctttcaagcttcttcttggtctcttcatcagtcttatcttctttgaataactcttctgctccaaatctcaatatcgctgaaagttcattcttgtcaaacatggaaccacctttttttgattctttcttctcgagcctgccctcagcatttagcttctgaatcactaggtgatcaagaacctgtaaatcattttgcggattccagtctgaatcaaaaatgatcacggtatctgctgttgcaagattaataccaagcccaccagcacgtgtagacagaagaaaacagaagtcatcacttccaggagcattaaaatgctccatggcctggtgacgaagatctgctctcgtactgccatcaagcctctgaaactggaatcctcggagggatagatactcagcaaggatgtccaacatcctaaccatcaacagcttgtccaataacactaatttcccactactcataacaatgcgttcaactttattgcgatcaccaatgctatctccaccataaccatgatcagcactttcaaataaaaatgggtggttgcagcactttttcaactcaacaacgatatttaaaagcgagacctgattcccacgaactcctttgttgagattctggaaattccgctccaaaatccatttgtaatactgcttctgtagaggagacatatcaacacgaagaatccgctcaattttcggaggtaaagatttctccacatcttttataactcgtcttagaatatgaggcctcaattccttgtgaagatttgcaagctcagtttcattgaaggaactcaaatttttgtatctctcaacaaatatatccttgctgttgaatttagatggatcaaggaaatgaagtaacgcccagagctcttcaacgctgttttgcaatggggtcccggtgatgagaagcttattcttagtgctgaattccaaaagagtcgtatacagcgatgcttcacaattctttaatcgatgagcttcatcgaccataagatagttccatttgatcttggaaagggcagctttgtccttaagtatgacctcataagtagttatcaatgtatggaattttacatgtcgaccacccttcttatttgtaaaaaattcatgctgctggcagatctctctgctagcacgatttcccacataaaccacaacattcatgtcaggtagccatttccgaaattctttcgcccagtttgacaatgttgacagtggaacaaccacaagaaacggaccattaatttcttgagcattatgaaggaaacccagcatggagacagattgaatagtttttcccagacccatctcatcagcaagaataacattagtgtcatttctccacccattaacaaggaagtttaggccttcaagctggtaatcacgtagtttgcctccttttagccattctggttggtcgtcaagcctccgcaaactagctttgctttttttcctttggaaatcaactgttttcccgagtatagatgttgcagcttcacgggccttgtactcatcaatagcatcctgagcaaattcaatatctgtatctttttcccaggttgattctgcataaggaagtccttgccatttgactaaatattctggcaccaggtcatcgccatcaactttgctaaccctatcagcaaatatgcgttcaacctggctgtactgtttaataagatccagctccatttccttgcccacatcatgcacctcaacctcctcacgtgataacgatcgcttgtacctcagctcgtcagtaactcttttcatgtaatttagaacctttttaaatccactaacgttttggagctcagataatgtcttccactggcaatgtaagaatgattggcccttccattttatatagaattctacatcatcccatgattgatccacatctgatgtgaagctaatcacagtaggttgagttgattggccattcctcagtgcctcttcagcaacacccttaggttgatgccaaaggattctttcaattgtttccccttcttcctcttctgggtcctccttcaagaccttttgttgcttagctaacttttcctcactatcatcactttcttcactttcagcatatgaaatatttctagctgtcctcctccttccagaagttcgaacctcatgagaatcaacatttgagaaaacatccttgcggcctacagttttctgatgcaacttgtcgggtttttttgctcggtgactgatatcagtatcactgggagcatcagagtcttttcctgaagaatcttcatctgtaaaagacacccctcgtttgcgttgaacctgtacaggaagctttcttcccttggaggttttagttccaccaaccttaagtcgcttacattgcctcttattctcaacaaaatcatcttcatcatcatctgagagctcaagctcatcatcttcttcttcgtcggagttctcactatccacaaacttatccttatcggcagccttttcagtatcactttctggctcaaaatccacatcgtctggatcatcttcgtctgcgtcatcatcgtcttcatcatcattctcatcattgtactcgtcatcatcttcatcctcataagcattgtattttgtcggcttcttcttttgtctagaggagacagattctgctgcagccccagaagtagaacagcttgggcggcgcatcccaccacgaagcaatgaatcactctgctcctctccatcctgctcatagtagtcatcagagagcatttcctcagcaggcacctccccatgccctcggttcagctcatcatcctctccactagcatccatgtcgtcatgtgaactagccgccgacccatattccattcccctgttactggtcaattgctcttccttagccgtctgtgtgggtccacaatccttcaaaaagtttgtaccccatgggccagaaggcccatttattttccgggcattctgcacagatttattctccgaggagttcggacctgaccggccaccatcatattgctcctcatcactatgataggcatcctcagccttctcatttaagttccattgcctagagttcaagtcgacatccctgtccccaactgactcataggcagcttcatcctcagccttctcattcaggttgtaccctcctgaatcagccctgcttccagagttgctgaagaatgccat

SEQ ID NO: 35780 - DNA, 139 bp, Oryza sativa
  Clone ID: PAT_MRT4530_3966C.1
cgggctgcaggaattcggcacgaggataaacaagattagtgcccttgaccccgggtttgttagtttatggacctggatgaagatctcctcacaagattaaggacagccagtacaatttactctttattatacgttaaac

SEQ ID NO: 35781 - DNA, 6507 bp, Oryza sativa
  Clone ID: PAT_MRT4530_39670C.1
atggcgcttcaggatgaggtcgcccaaaacctgagatggtctatggatagcgcacgcgatacagcctcatgcccatcgtacccctcagcaatggacggctggatgaaaactggggtaccgaaaggaggacgggagaaaatctcttgtcggggatttcactccagctttcgacccactgacagtggcctgtcactgaatgttgatgtatccacgacgatgatcgtcagacctggacctgtcatagagtttcttctcttcaaccagaatatcaagaaccctcatgaaattgactggggaaagttttaccttttccaggacagcatctacccttcagcatatttttcagttgctaggacaactgcgaccgctgcagcagcagcgagggcggccagactggcggcagcggagttggcagcagccagggcggaggcggaggcggcgaaagatgcggcacgtgcggcggaggtagaggttgagaccttgcgcagcagcatcaacggctccatcgccggcgacatcaccgccgacagggagcttgaggagctggcaagagcaagggcacgggagcgagcagagcggtgggcagcagcccacctccacggcggcggcggcggcccaagggaccgcgcgcccgccgacgggaacccagacgggctcgggcgtgccggcggcagcccggagcccgcacgtggccctcgcaggcagcacggctctctctcccctgaccggcaccatggtcaccacggcgtccagacagtggtcagggactttggtcccggcggtgggtggcctaccctcaccaaaaccaactacatcgagtgggccgcggtgatgagggcagtccggtacggtgacgtcgactacgacgaggatcggcgagcactggatgccctcatcgctgcagtcccgcccgagatgcagttctcgctttcccagaagcggactgccaaggaggcctgggacgccatcgctgcggcacgcatcggcagcgaccgcgcccgcaagtccacactgcaggcactccgcaaggagtgggagaacctggccttcaagccaggtgaggatgttgatgactttgctctccgtctcaacactctcttgcagaaaatggtgcagtacggcgacgacacctacgacgaggagagagctgtcgagaagctcttccgttgcgtccctgagaagtacaggcagatcgctcgctcgatcgaatctctgctggacctctccacgatgtcgatcgaggaggcgttaagtcgcctcaaggtcgtcgatggtgatgagccacagcctctctcggggcccatcaccatcggcgggaagctccatctcactcgggaacagtgggaggcctctcaaggtgacgggaggaagggggagtcatcttccccgataggcggccgtaagccgcgcaaggcacagggaggtgtccagctacggtgggcgcgaagacgtgccgagggtggcgcccgcagaggcgcccagggcgttgccaccggcaaccacaagccggcacgagacgacgcctgccgcaactgtggcaagcttggccattgggccaaagactgtcgacagccacgacgtggccaggcccacgtcgcacgggtggaggaagagccggctctgctcctggctcacgcaagcatcgagctacctccagcggcaccggccgcagcggctttcctccaccttgatgagccgaaggtactcgtctccctctgcaacggctccagcaacgacaaggctgatgggtggtacctcgacaccggcgccacccatcacatgaccagccgacgggagttcttcaccgagttcgactccagcgtccgaggctccgtcaagttcggggacgcctctggcgtggagatcaagggtgttggctccgtcaccttcaccgccaagtccggtgagcacaggctgctcaccggagtctactacatccccgcgttgaggaattctatcatcagcttgggacagctggatgagaacggctcacgcgtgttggtcgaggacggactcatgaggatttgggatcgccgtcgtcgccttcttgccaaggtaaccagaggcactaatcgactctacatcctcagcgcgcaggtcgcacaaccagtttgcctcgccgctcgtcgggatgacgaggcgtggcagtggcacgagcgcttcaggcacctccacttcgaggccctgaagcagctcagtgccaaggagatggtgcgaggcatgccgtgccttgaccacgtggagcagctctgtgacgtctgcgtggtgacgaagcagcggcggctcccctttccccagcagacgagcttccgagccaaggagcggctcgagctcgtgcacggggacttgtgtggcccagtgacaccggccacaccaggaggacgacgttacttcctactgctcgtcgacgacctctcctgctacatgtgggtgatggtcctcggcagcaagggagaggctgcggacgccatcaggcatgcgcaggctgctgcagaggcagagtgcggccgcaagctgcacgtgctgcgcaccgacaacggcggtgaattcacagcggctgaattcgcgtcgtactgcgctgatgagggcattcagcgacactacaccacgccttacagcccgcaacagaacgacgtcgtcgagcggcgcaaccagacggttgtggggatggctcgggccctcctcaagcagagggggatgccggccatcttctggggggaggcggtggtgacggccgcctacatcctcaaccgctcgcctaccaaggccctcgatggcaggacaccgtacgaggcttggcatgggcgcaagccggcggtctcccacctgcgggtcttcggctgcctcgcgttcgccaaggagcttggccacatcggcaagctcgacgacaggagcaccccaggggtgttcatcggctacgcggagggctcgaaggcctaccgcatcctcgacccggagacacagcgtgtgcgcactgcgcgcgacgttgtgtttgatgaagggcgagggtgggtatgggacaaggcggtggacgatggttcgactccgacgtacgacgacttcaccgtcgagtacgtccacttcgagggagctgggggagtaggcagctcttcttcacctagcgtgtctaccccagcccccaaatctccaccgactccaacaccaacacaccctcgggccacgacttcgactacgacgagctcttcgtcgactccacatgctccagcaccaacagccactcctccaagcacgtctactccgacgccagctcgtgttgagcgcagcccggtggagttcgctactccgctctcccacgacggggagcgcatcgacgtgtaccacgacggcgagcagctatggtaccgtacgatggaggatcttctcggcgaccagccggtgccgggactggtgcctcgcgacctagaggcgcagttgcaccttgcgtgcgatgacggtgagcctcggtcttttgcagaggccgagaaacacgcggcatggcgtgccgcgatgcagtcggagatggacgcggttcaggagaaccgcacctgggagcttgctgacctccctcgtggtcaccgcgcgatcacccttaagtgggtgttcaagctgaagagggatgaagccggagccatcgtcaagcacaaggctcgcttggtggcacgcggtttcgtgcagcaggaggggatcgactacgacgatgccttcgctcccgtggcacggatggagtccgtgcgactccttcttgcgctggctgctcaggaaggctggggcgtccatcacatggacgtcaagtcggcgtttctaaacggcgacttgaaggaggaggtctacgtgcaccagccgccgggatttgtgatccccggcaaggagggcaaggtgctacgcctgcacaaggccctctacggcttgcggcaggcatcgagggcgtggaatgccaagttggattctacgctcaaggggatgggcttcgagcaaagcccgcacgaggcggccatctaccggcggggcaatggaggaaatgccttgctggtgggtgtctacgtcgacgacttggtgatcaccggcaccaaggatgcggaggtcgcggcgttcaaggaggagatgaaggccaccttccaaatgagtgatctggggcctctctccttctacctggggattgaagtgcaccaggacaactccgggatcacgcttcgacagaccgcctacgccaagcgcgtcgttgagctggctgggctcaccgattgcaacccagctctcactccgatggaggagagactgaagctgagccgcgacagcacggcggaggaggtggatgctacacagtaccgacgtcttgtggggagccttcgctacctcacccacacacggccggacttggccttctccgtcggctacgtcagtcggttcatgcagcgaccaacgacggagcaccagcaggctgtgaagaggatcatccgctacgttgcggggactctcgaccacggtctctactacccgaagtgtcctggcaaggcacacttcgtcgggtacagcgacagcgaccacgccggtgacatcgacaccagcaagagcacgagcgggattctcttcttcctcggcaagtgcctcgttagctggcagtcagtcaagcagcaggtggtggccctgtccagctgcgaggccgagtacatggcggcctccgccgcttcgacccaggcgctctggcttgctcgactgcttagtgatctcctcggcagagacactggaaaggtggagctcagggtggatagcaagtccgctctagccctggcaaagaaccccgtttttcacgaacggaccaagcacatccgggtgaggtaccacttcatccgaagctacttggaggaatggagcatcaatgcgagctacatcaacaccaaggaccagcttgcggacttgctcaccaagcctcttgggaggatcaaactaggagggtgcagcaataggctagcagccagctatggctatatatatatgtatccaacctcccttggacaggccaagtgtgcactgaagaacctgaggataaaaacgactcacaccggctctgaatttaggatcatcggtttgtctgaagacacttgctattcgcagacgttccaaataaagagaaaaaatggcaacggtggctcggatacagtggaagaagtgacagtctttgaatactacaggaagaattggaaaatagatttgaagggatctgctcactttccctgtctaaatgttgggaagccaaagcggccaacatatatcccattggagctttgccatttggtgccattgcaaaggtacaaaaaggctttgtcgacgttacagcggtccacgttggttgagagatcaaggcagaatcctcaagagaggatgtttgtcttgtctggtgtgttgagggacagtgattataactctgtgccaatgctgagggagtgtggcatttctatagctcaagaatttacccaggttgctgctagagtccttccggcaccaaagctgaaatctggagatggcgaagatatttttgcgcgcaatgggaggtggaacttcaataaaaattgcaatgcccatcatcttgctcagcgtctcatccattgtgggaacttgaagggacttatcaacgatcagtacctgactaatgtgcttctaaagataaatgcaaagcttggagggttgaattcgctgctgcaaattgaaagaaaccaagccattcctctcttgtcgaagactccaaccattatcttaggcatggatgtttcccatggctcaccgggacgggatgatgtaccgtctgtcgctgcggttgttagttccctggagtggcctctcatatcaaaatataaagcctccgtatgcacccagtctcccaggctagaaatgatcgattccttgtttaagctagtggggaatgaggatcatgttatcattagagatggggttagtgaaggccagtttaatcaggtgctgaacattgagctagcccagataatcaaggcatgcgagtttcttgccaatgagaaaaatgacagtgaatggtctccaaagttcacggtgatagttgcgcagaagaaccatcacaccaaattttttcagacagatcgatcgaacaaagttgtcaatgttcctcctggtactgttgttgacaaaggaatctgtcatcccaggaactgtgatttctacatgtgtgctcatgctgggatgattgggactacaaggccgacgcattaccatgtgctgcatgatgagaacaatttcacccctgatgacttgcaggagcttgtgcacaacctctcatacgtgtaccagaggagcacgacggccatctcaggtgtcgctccgatctgctacgcgcacctggcggcggcgcaggtgtcgcagttcgtgagactcgacgacgcggcgtcggagggcagcggtgacggcggcgcgccgccgcggccggtgccggagctcccgcgcctgcacccggacgtcaggcagtccatgttcttctgctga

SEQ ID NO: 35782 - DNA, 2166 bp, Oryza sativa
  Clone ID: PAT_MRT4530_39671C.1
atggctctccctcaccggaccggtaccatggtcaccacaggatttaggccgtcatcagggaagtcggccctggcggtgtgtggcctaaaccctaccctcaccaagaccaactacgtcgagtgggccgtggtgatgaggataaggctccaggtgcgacacatgtgggagccagttcggcacggcgacgtcaactacgacgaggatcaacgggcgcccagaagcggactgccaaggaggcctgggacgccatcgctgcggcacgcatcggaagcgaccgcgctcgcaagtccacattgcaggcacttcgcaaggagtgggagaacctggccttcaagccagaagttggtgtcgtatggcgacgacacctacgatgaggagagagccgtcaagaagctcttccgctgcatcccagagaagtacaagcagattgctcgctcgatcgagtctctgttggacctctccacgatgtcgatcgaggaggcgataggaagcttcatctcactcgagagcagtgggaggcctgccagggtgacgggaagaagagggagtcctcttcctcgacaggccgcaagcgcggcaagggacacgtcctgcgaggacgcacccagggtggcgcccgcggaggcgcctaagccggcgcgagatgacgcctgccgcaactatggcaagtttggccattgggccaaagactgccgacagccacgacacggccaggccaacgtcgcacaggtggaggaggaggaagagtcggctctgctcctggcacacgcaagcatcgagctatctccagcggcaccggccgcagcggctttcctccaacttgatgagccgaaggccctgaagcggctcagtgccaaggagatggtgcgaggcctgccgtgccttgaccacgtgaagcagctctgcgacgtctgcgtgttaacaaagcagaggcggctcccctttccccagcagataagcttccgagccaaggagcggctcgagctcgtgcacggggacttgtgtggcccagtgacaccggccacaccaggaggacgacgttacttcatgctgctcgtcgacgacctctcccgcttcatgtgggtaatggttctcggcagcaagggagaggttgcggacgccattaggcgcgcgcaggctgctgcggaggcggactgcggcggcgaattcacggcggctgaattcgcatcgtactgcgctgatgagtgcattcagcaccactacttcgcgccgtacagcccgcagcagtacggcgtcgtcgagcggcacaaccagacggttgtagggatggctcgagcactcctcaagcagagggggatgccggccgttttctggggagaggcggtggtgacggctgtctacatcctcaaccgctcgactaccaaggcccgtacgaggcttggcatgggcgcaagccggcgcccccgagcctccaccgactccagcagcgacacgctctcgagctacgacttcggctgcaatgagttcttcgctgacaccatcacaaccggcgaccccacgcactccagcaccaacagccacccctccgggcacatccactccgacgccaggttgtgtcaagcacagcccggtggagttcgctactccgctctctcacgacgaggagcgcatcgacgcataccacgacacaggaggggatgccttcgcccccgtggtgcgatccccggcaaggagggcaaggtgctcctccttgcgctggctgctcaggaaagctggtgcgttcatcacatgaacgtcaagtcagcgtttctgaacgacgacttgaaggaggaggtctacgtacaccagccgccaggatttgcgatccccgacaaggagggcaaggtgctactcctgcacatggctctctatggcttgtggcaggcaccgagggcgtggaataccaagttggattccacgctcaaggggatgggcttcgagcaaagcccgcacgaggtagccatcaaccggctgggcaatggaggaaatgtcctgctggtgggtgtctacgtcgacaacttggtaattaccggcaccaaggatgcggaggtggcggcgttcaaggaagagatgaaggccaccttccagatgagtgacctagggcctctcttcttctacctagggatcgaggtgcaccaggacgactccgggatcacgtttcgatag

SEQ ID NO: 35783 - DNA, 1445 bp, Oryza sativa
  Clone ID: PAT_MRT4530_39672C.1
atggagtttacccccaaaatcacagccggcgcgaaaaactactagcatgagtggagagctgaagagagactacgagattggcgaggagatcgggcgcggccgcttcggcgtggtccaccgctgcacgtcgcgcgccaccggcgaggccttcgccgtcaagtccgtcgaccgctcgcagctggccgacgacctcgaccgggagctcgcggagctcgagcccaagctggcccagctggccgccgcgggcaacccgggcgtcgtccaggtgcacgccgtgtacgaggacgacgcgtggacgcacatggtcatggacctctgctccggccccgacctgctcgactggatccgcctccgccgcggcgcgcccgtcccggagcccgtcgccgccgccgtcgtcgcgcagctcgcggaggcgctcgcgcactgccaccgccgcggggtcgcccaccgcgacgtcaagcccgacaacatcctcctcgacgtcgtcgacgacgggatcgacggcggcggcacgccgcgcgcgcggctcgcggacttcgggtcggccgcgtgggtcggggagagcggcggcagcgccgagggcctcgtggggacgccccactacgtggcgcccgaggtcgtcgccggcggggagtacggcgagaaggccgacgtgtggagcgccggggtggtcctctacgtgctcctctccggcggcgccctccccttcggcggcgagaccgccgccgaggtgctcgcctccgtcctccgtggcagcgtcaggttcccgcctaggctgttcgccggcgtgtccccggcggccaaggacctcatgaggcgcatgatgtgccgcgacacctggaggcgcttctccgccgagcaagtcctcggtcacccgtggatcgtgagcggcggaggagcccgagcgatggagcagccaacctgaacggcggccgcgtccacgtcaagagggggcagacagaggcagcgaatcagtcggtgccacgtgtcgccgtagtcctagggagatacggcgatattttacagccgtagtctatacggttttgtatatacgacgagacggtagagagagatccctgcagcggatccgctgtagggtgtcgcggtattgcagatctgcagtagagagaataatcagagtattgattgaagaagaagctcgtgcagtcatgctaggcttcttttttctttcacggttccaggtttgctctgtctctagagagatcagagagccttaattttcgctttgtttttttttgtatgatgatgagtcaggttgtatatacgctaacgtaagtactaagcttttgtacaaatcgatcggagttgaataaaaatcgggcttgtgctctgcttcggcttcaaaaaaaaaaaaaaaaggaaaaaagctcatatcgaagtattggtcgcgatggagggacaacctatacatgaggtgagatgga

SEQ ID NO: 35784 - DNA, 4788 bp, Oryza sativa
  Clone ID: PAT_MRT4530_39673C.1
gttgtgtccttcaatggtgagaagaaagcgatagcaatgtaccgtaattttataaagaagtcatacaaggctactattgaggaaggcattatcactggttttggcatgggctctgtcatgtgcgtcgtatttggcagctatggattagccttctggtatggtggaaagctaatcattgagaaaggttacacaggaggaaaaatcatgactatcttgtttgccgtgttgaccggtgcatcctcattaggcaatgcaacacctgcagttgctgcagttgtggaaggtcaatctgcagcatacaatttgttcaaaacaattgagaggaaaccagagatagattccgatgataacaatggcatggttttagaagatatgaatggcgatattgagctaaaggatgtgtactttcgttaccctgcaagaccagagcagttgatattggatggattgtcgttacaagtagcgagtggaacaacaatggctatagtcggagagagtggaagcggaaagtcaactgttatcagcctagtcgaaagattctacgatccacagtctggcgaagttttaatagatggaattagcatcaagaaactgagacttgattggataagagggaagatcggtcttgttagccaagagcctctgctttttatggcctccattaaagataacataatatatggtaaaaaagatgcaacgcttgaagagatcaagagagcagcggagcttgcaaatgcagctaacttcattgacaagttaccaaatggttatgatactttagttggccagcgcggtactcagctctctggaggacaaaaacagagaattgcaattgcaagagccatcctcaaagatccaaaaatccttttgctcgatgaagcaacaagtgcacttgatgtggagtctgagaggatagttcaggaggcactaaatagaatgatggtagaaagaaccacactcgttgtcgctcatcgtttgagcactgtgaggaatgttgattgcatcacagtcgtccgcaaaggaaaaatagttgaacaaggtcctcatgatgcactggtgaaggatcccgatggagcttactcccagctaattaggctacaagagactcatcgtgatgaaaggcataaactaccagattccagatcaaaaagtactagtttgtcattcagacgatcaagaactaaagattttctcagcaagagcaacagtggggcacttggtacaaggctctcagtcgatgcgttgaatgtccgccgtttagtaggagataacctggcccttatagtccaggctgtagctacactaatcactggctttgccatagcttttgcggcagattggaggcttgcactgatcatcacttgtgtaattcctttagtgggtgcacagggctatgctcaagttaagttcttgaaggggttcagtgaagaatctaagaccatagcacttgttggagaaagcggtagtgggaagtccacgataattgctttattagagcgtttctatgatcctgattctggtaatatctcactagatggagttgaaattagaagcttaaaagtcagctggttgagggatcagatggggcttgtaggccaggagccagtgcttttcaacgacacaatccgtgccaacataacatacgggaaacacagtgaggtaacagaggaagagatcactgctgtggccaaggcagcaaacgcccatgagttcgtatcaagcctgccacaaggatacgacacagtggtaggtgagaaaggggtgcaactatctggtgggcaaaaacagagggtagcaattgcaagggccatcctaaaggaccctaagatactgctacttgatgaggcaaccagtgctctagatgcagaatcagaacgtgttgttcaagatgcattggatcgagtcatggtcaacaggactaccattgtagtggcacaccgcctctccacaatcaaaggggctgatatgattgcagtcctcaaggaaggaaaaattgcagaaaaaggaaagcatgaagcactattgcggatcaaggatggtgcatatgcttcacttgacgccgagctcgccgcagcagaagagcgcaggcgagcaacggctcagaccgctgcagcagcagcgagggcggccagactggcggcagcggagttggcagcagccagggcggaggcggaggcggaggcggcggaagatgcggcacgtgcggcggaggtagaggttgagaccttgcgcagcagcatcaacggctccatcgccggcgacatcaccgccgacagggagcttgaggagctggcaagaggaagggcacgggagcgagcagagcggtgggcagcagcccacctccacggcggcggcggcggcccaagggaccgcgcgcccgccgacgggaacccagacgggcgcaggcgtgccggcggcagcccggagctcgcacgcggccctcgcaggcagcacggctctctctcccctgaccggcgccatggtcaccacggtgtccagacggtggtcagggactttggtcccggcggtgggtggcctaccctcaccaaaaccaactacatcgagtgggccgcggtgatgagggtgaggctccaggtgcggcacatgtgggaggcagtccggtacggtgacgtcaactacgacgaggatcggcgggcactggatgccctcatcgctgcagtcccgcccgagatgcagttctcgctttcccagaagcggactgccaaggaggcctgggacgccatcgctgcggcacgcatcggcagcgaccgcgcccgcaagtccacactgcaggcactccgcaaggagtgggagaacctggccttcaagccaggtgaggatgttgatgactttgctctccgtctcaacactctcttgcagaaaatggtgcagtacggcgacgacacctacgacgaggagagagctgtcgagaagctcttccgctgcgtccctgagaagtacagacagatcgctcgctcgatcgaatctctgctggacctctccacgatgttgatcgaggaggcgttaggtcgcctcaaggtcgtcgatggtgatgagccacagcctttctcggggcccatcaccatcggcgggaagctccatctcactagggagcagtgggaggcctctcagggtgacgggaggaagggggagtcatcttccccgacaggcggccgtaagccgcgcaaggcgcggggaggtgtccagctacggtgggcgcgaagacgtgccgagggtggcgcccgcagaggcgcccagggcgttgccaccggcaaccacaagccggcacgagacgacgcctgccgcaactgtggcaagcttggccattgggccaaagactgtcgacagccacgacgcggccaggcccacgtcgcacgggtggaggaggaagagccggctctgctcctggctcacgcaagcatcgagctacctccagcggcaccggccgcagcggctttcctccaccttgatgagccgaaggtactcgtctccctctgcaacggctccagcaacgacaaggctgatgggtggtacctcgacaccggcgccacccatcacatgaccggccgacgggagttcttcaccgagttcgactccagcgtccgaggctccgtcaagttcggggacgcctccggcgtggagatcaagggtgttggctccgtcaccttcaccgccaagtccggtgagcacaggctgctcaccggagtctactacatccccgcgttgaggaattctatcatcagcgtgggacagctggatgagaacggctcacgcgtgttggtcgaggacggactcatgaggatttgggatcgccgtcgtcgccttcttgccaagtggcacgagcgcttcgggcacctccacttcgaggccctgaagcagctcagtgccaaggagatggtgcgaggcatgccgtgccttgaccacgtggagcagctctgcgacgtctgcgtggtgacgaagcagcggcggctcccctttccccagcagatgagcttccgagccaaggagcggctcgagctcgtgcacggggacttgtgtggcccagtgacaccggccacaccaggaggacgacgttacttcctgctgctcgtcgacgacctctcccgctacatgtgggtgacggtcctcggcagcaagggagaggctgcggacgccatcaggcatgcacaggctgctgcagaggcggagtgcggccgcaagctgcgcgtgctgcgcaccgacaacggcggcgaattcacagcggctgaattcgcgtcgtactgcgctgatgagggcattcagcgccactacaccacgccgtacagcccgcagcagaacggcgtcgtcgagcggcgcaaccagacggttgtggggatggctcgggccctcctcaagcagagggggatgccggccatcttctggggggaggcggtggtgacggcaacggcaacctcaacaatggcgtcggatggtcagggacaggggcggatgtggctaggggcagatgcggcggcgtgggaaggcagagaggagtgcaagcggcggcgccggatgcagccgggggtggaggtgatggtgtcggatgtggcggctcaaccgggggagccggatgaggcgggaaggagcgacgctggaatactcgccatggagctcgtgctagcggcggcggtcgtggcgggcgacgacgcggactgcagcggcggtcgcggcgggcgacggtgtggccgcggacggcggcggggctcgcggacgacggcggaggtcgcggtcagcgacgacacggatggcagcgacggtcgtggcgggtga

SEQ ID NO: 35785 - DNA, 606 bp, Oryza sativa
  Clone ID: PAT_MRT4530_39674C.1
gcggcggcggcgatgtcggcggcggcggcggaggccaccgagcggggcgagccctcgggcggaggcggagagatcgcgtacgtcagctacggcggggagcaccacctcccgctggtgatgtcgctggtggacgaggagctcagcgagccctactccatcttcacctaccgctacttcgtctacctctggccccagctcaccttcctcgcgttcgatcccaaggatggcaagtgcgtggggacggtggtgtgcaagatgggggagcacaggggggccttcagggggtacatcgccatgctcgtcgtgctcaagccctaccgcggcaggggaatcgccaccgaattggttacgagatctattcgggtaatgatggaatctggctgtgaggaggtgacacttgaagcagaagttacgaacaagggcgccctcgccttatatggtcgtttgggtttcatccgagcaaagaggctgtacagatactatctgaatggcgtcgacgcatttcgcctgaagctgctatttcctcgccctgatcctggtatgcatccaatgatgatgctaggcaatgagagagatgaccagcacatggattctccttacttgtga

SEQ ID NO: 35786 - DNA, 816 bp, Oryza sativa
  Clone ID: PAT_MRT4530_39675C.1
tcacgtgaccgttctcggtgagtttagagataacgttagacttcctttatcagcctcgtgcgggcaccgaaagggtttgtctaagtcaatctctgatgtcgaccaagaaagtacagagtgtacgactaagtctcccgtcttgctgtaatcgagaatttggattgaagtcaagaaattgtatctcggcgagtacaccatctcttcattccgtattccttgtcgagatccagcaaccgttctcaagcgatcgagaaggtgtagagtctgcgacgaagccttgtcaacattggtcgtactcgccttagtcgatcttggagtagaaccatagagacatggagtcttccgcaatgtcgaatagaattttcctgctatcaactttattgaaatagaggtagtaggagagtcgctacatcgctggtcgaggaccaggcagtagtcgtaactcggccaccaacttatagcatatccggatgtccgttcacaatcatgttgggtgatcaagccgacaacgttcgcgaagaattgtccgttaacaaccttttctcgagtagtccagccatggccggtgctatgagataggttgtcggtctttgttggtaggttgggtgcgataactcttattgcgtactcgtttgacatgatctgacatcttttggtacgccgcgtatcttgaggcttgggtgaactcgatagaccaagttgtcgatgacgatgatggttccgatctcgtcggaagacatgttccggtcgggttagatctccacagccgaagtcgtcgagtagcttgttgttggagaatccatctcttaaacccat

SEQ ID NO: 35787 - DNA, 4539 bp, Oryza sativa
  Clone ID: PAT_MRT4530_39676C.1
atgttcgacgttcggtctcggcgttcggtcgcctcgagcactcggcgtcagcaggacgccgagctcgccgcagcagaagagcgcaggcgagcaacggctcagaccgttgcagcagcagcgagggcggccagactggcagcagcggagttggcagcagccagggcggaggcggaagcagaggcggcggaagatgcggcacgtgtggcggaggtagaggttgagaccttgcgcagcagcatcaacggctccatcgccggcaacatcaccaccgacagggagcttgaggagctggcaagaggaaggacacggggagcgggcagagcggtccaggtgcggcacatgtgggaggcagttcggtacggcgacgtcgactacgacgaggatcgacgggcgctggatgccctcatcactgcagtcccgcccgagatgcagttctcgctttcccagaagcggactgccaaggaggcctgggacgccatcgctgtggcacacatcggcagtgaccgcgcctgcaagtccacactgcaggcactccgcaaggagtgggagaacctagccttcaagccaggtgaggatgttgatgactttgccctccgtctcaacactcttttgcagaagatggtgcagtacggcgacgacacctacgacgaggagagagctgttgagaagctctttcgctgcgtcccagagaagtacaggcagatcgctcgctcgattgagtctctgctagacctctccacgatgtcgatcgaggaggcgttaggtcgcctcaaggtcgtcgacggcgatgagccacagcctctctcggggcctatcaccattggcgggaagctccatctcactcgggagcagtgggaggccagccagggtgatgggaagaagggggagtcctctccctcgagaggggccgcaagccgcgcaaggcgcgcggaggcgtccagctgcggtggacgcgaagacacgccgagggtggcgctcgcagaggcgcccagggcggcgccgctagcaaccacaagccggcacgagacgacgcctgccgcaactgtggcaagcttggccattgggccaaagactgtcgacagccacgacgcgtgcatgcctgcaggtcgactctggccaggcccacatcgcacaggtggaggaggaagagccgactctactcctggcacacgccagcatcgagctatcttcagcggcaccggccgcaacagctttcctccacctctaggagccgaaagctctgtcaagtttggggatgcctctggcgtggagatcaagggtgtcggctccgtcaccttcaccgccaagtccggtgagcacatgctgctcaccggagtctactacatccccgcgttgagaaactctatcatcagcgtgggacagctggatgagaacggctcatgcgtgttggtcgagcacggactcatgaggatttgggatcgccgccatcgccttcttgccaaggtaaccagaggcactaatcgactatacatcctcagcgcgcaggtcgcacaaccagtttgccttaccgctcgtcgggacgacgaggcgtggcagtggcacgagcgtttcgggcacctccactttgaggccctgaagcggctcagcgccaaggagatggtgcgaggcctgccatgccttgaccacgtggagcagctctacgacgtctgcgtcctaacgaacaagggagaggctgcggacgccatccggcgcgcgcaggctactgcagaggcggagtgcggccgcaagctgcgcgtgctgcgcaccgacaacggcggcgaattcacggcggctgaattcacgtcgtactgcgttgatgagggcatttggcgccactacaccgcgccgtacagcccgcagcagaacggcgtcgtcgagcggcgcaaccagacggttgtggggatggctcgggctctcctcaagcagagggggatgccggccatcttctggggagaggcagtggtgacggccatctacatcctcaaccgctcgcctaccaaggccctcgatggcaggacactgtacgaggcttggtatgggcgcaagccgggggtctcccacctgcgggtcttcggctgcatcccgttcgtcaaggagcttggccacatcggcaagctcgacgacaggagcaccctaggggtgttcatcggctacgcggagggctcgaaggcctatcacatcctcgacccggagacacagcgtgtgcgcacagcgcgcgacgtagtgttcgacgaagggcgagggtgggtatgggacaaggcggtggacgatggttcgactccgacgtacgacgacttcaccgtcgagtacgtccacttcgagggagctgggggagtaggcagctcttcttcaccgagcgtgtctaccccagtccccgagcctccaccaactccgacaccaacacaccctcgggccacgacttcgactgcgacgagctcttcgccgacaccaccacagccggcgacccgacgcgccccagcaccaacagccactcctctgagcacgtctactccgacgccagctcgtgttgagcgcagcccggtggagttcgctactccgctctcccacgacggggagcgcattgacgcgtaccacgacggcgagcagttacggtaccgtacgatggaggatcttctcggcgaccagccggtgccgggactagtgcctcgcgacctggaggcgcagttgcaccttgcgtgcggtgatggtgagcctcggtctttcgcagaggccgagaaacatgcggcatggcgtgccgcgatgcagtcggagatggacgcggttcaggagaaccgcacctgggagcttgctgacctccctcgtggtcaccgcacgatcacccttaagaaggttggggcgtccatcacatggttgtccacgctcaaggggatgggctttgagcaaagcccgcacgaggcggccatctaccggcggggcaatggaggaaatgccttgctggtgggtgtctatgtcgacgacttggtaatcaccggcaccaaggatacggaggtcgcggcgttcaaggaggagatgaaggctaccttccagatgagtgatctggggcctctctctttctacctagggattgaggtgcacccggatgtctccgggaacacgcttcgacagaccgcctacaccaagcgcgtcgttgagctggctgggctcaccgattgcaacccagctctcactccggtggaggagagactgaagctgagccgtgatagcacgacggaggaagtggatgctacacagtaccagcgtcttgtggggagccttcgctacctcacccacacacggccggacttggccttctccgtcggctacgtcagttggtccatgcagcgaccgacagcggagcaccagcaggctgtgaagaggatcatccgctacgttgcggggactctcgaccacggtctctactacccgagatgtcctggcaaggcacacttcgtcgggtacagcgacagcgaccacgccggcgacatcgacaccagcaagagcacgagcgggattctcttcttcctcggcgagtgcctcgttagctggcagtcggtcaagcagcaggtggtggccctgtacagctgcgaggccgagtacatggcagcctctgccgcttcgacccaggcgctctggcttactcgactacttagtgatctcctcggcaaagatactggagcggtggagctcagggtggatagcaagtccgctctggctctggcaaagaaccccgtttttcacgaacggagcaagcacatccgggtgaggtaccacttcatccgaagctacttggaggaagggagcatcaaggcgagctacatcaacaccaaggaccagcttgcggacttgctcaccaagcctcttgggaggatcaagacagcatctacccctttagcatatttctcagttgctaggacagctgcgatactcattgaccaaagaaacgcatatttgagtgccatcagagatggagctggtcagtggttcaacttctctgacgcagaaacccctccagacattctcgatgcccaacctatcttatacctgaaagcagactatggtcaccttctgcaggactgggatgaggttacagtggggccaccgtctgtacttgattcatactacagactactgaacttcaacaatggtcttccgcgcgaccacccacttattcatgtccaaaggaaagcaattgcgcgcttagcagtgatgttttgtgaagccgcacgcctgagatcagtcagagcacttgtctatcaccaaatggacctatatgtgaatggaaccatcacaagcctcattacaagaaagagaatcacgagctggagcctgatatctgcattcgcattacactgctggagacgggagcatgatggtattgaaggatatcttcaggaagagcttgacaagcttcacccgatcgacatctatgatgcaaatcttgtcgcgggtgaaccagatggtgagttgctgctcatcctttacagagaagaggcgtttgctggcctgcaacagcatgcgccggagccgcaactgcagtga

SEQ ID NO: 35788 - DNA, 1425 bp, Oryza sativa
  Clone ID: PAT_MRT4530_39677C.1
atggccaagaaccccaaggcggccaagaaccgccgccccacgacgcggcgacctcgcgccgccgccgccaccgccaccgccaccgcctccgcctccgcggacatcgaggacctggcgtcgccgtccgggtgcagggcggtagcggggcccaccacggccgccgcggcggtgcgcgcggagctgctgcggtggtacgacgcaaaccggcgcgacctgccatggcggcgcgccgcggagccgccggcggggagcgggagcgggcgcggcgaggagcagagggcgtacgcggtgtgggtgtcggaggtgatgctgcagcagacgcgggtacccgtggtggtcgactactactcccggtggatggcccgctggcccaccgtggacagcctcgccgccgccacgcaggaggaggtgaacgagatgtgggcggggctcgggtattaccggagggctcgatttctgctcgagggagcaaaacaaattgttgaaaaaggcgagttcccttgcacagcatcaacactccgtgaagttcgtggcattggggattacacagcaggagccattgcttccatagccttcaatgaggttgtccctgttgtggacggaaatgttgttcgagttattagcaggttttatgctattcctgataacccaaaggagtcctcaacggtgaagagattctggcagctcactggtgaactggttgacccttcaaggccaggagacttcaaccaagcaatgatggaactaggagcaacactctgcagcaagacgaagcctggttgctctcagtgccctgtctctagccactgccaagcgctcgcactttccagccaaaatgcttcagtcaaagttacagacttcccacgagtagtcccaaaagccaaaccacggtctgattttgctgctgtctgtgttgttcaaatttcacaaggctttggtgaaggtatagcagaggcagagggcaaagataatctttttctactgatcaagaggccagaagagggccttctcgctgggctctgggagttcccatctgttcttgtgaacgaagggaagactgatacgctgaataggagaaaagagatggacaaatatttgaagcagcttcttagcatagatgttacaaggagatccagtgtgatcctcagggaagatgttggccaacatgttcacattttctcacacattcggctgacgatgtttgttgagctgatgattttgaacctcaaagatgatggggaggaattatgcaaggagggacaagatagcaccaaactgagattgattaacgaaaatgcagtccagtcgatgggattgacatcaggaatccggaaggtgtacaacatggtcaaggtcttcaaggagaaaaggctgaaagagcagagccaagtgccgacgaggaaaaggagtagacggctgaaataa

SEQ ID NO: 35789 - DNA, 541 bp, Oryza sativa
  Clone ID: PAT_MRT4530_39678C.1
gaattcggcacgaggcttttggggacaaagtactaagtggtgacttctcaatcaatggtgagcagacccactatggttctgggactgatatagtgcaattcccagcaggaggttttttgcatagcttccaactccaggacaactctaaaatttctcaggataactcaagaagcgcagatacacaaaataccccagataaaagcaagctctcttctattcttggaaggatggaagcaggcaaaggtcgggttgcagtctatggagattcaaattgccttgacagtagtcacatggtaacaaactgctattggcttttgagaaaacttgtggagttcactggcaatagaatcaaagatcctgttcttttctcagaatctgctcagttaaaatttccagtttttgagagcatccatcaactgtcacgtaaaccagatgtgaacttctcaaaatattcaactgtcgttggcaatgaattgatctgtcaccaggattcccgatttgaggtttggggaacgaaaggttatggtacccaacaaacagg

SEQ ID NO: 35790 - DNA, 682 bp, Oryza sativa
  Clone ID: PAT_MRT4530_39679C.1
ctagtggatccccgggctgcaggcttacaccaatcattcattcactattggagaagtaaagcatttatggaggaaaaatcgctgtgctagaacatatggtagaaatctgagtatgagagtcgacaattttgaacacccaacagagactaatgtactttgcagtgactggaatagctggaaagatccaatcatctggtttgatggtacaacagatgcagttgggatccaattctttctgaagaatgttcatgctagaatgaaaacagctgcttcgtcactctttggatcccctggctcatgacgtgcgagacctaatacatttggtgaacttatgcaagttataatatctccttcacagacagttgaaaaggcagttcaatgggctttaaagggttccagtcctgatattgtattgcacatgcgcatgatgacaaacaggccagttcgagcaagaaaagctgcagttaattgtattaagagagctatagagattcgtcatttgaagggtacacctcgggtagcagtaatttcagatacaccaggctttgccaaggatataaagcaagacatcagtgagtttgctgaggtgatttattttgatcacaaaaagttctccaggagtaatgatctagagataactggaagtgaaaaggctttggatttccgttcaagagactggggt

SEQ ID NO: 35791 - DNA, 1003 bp, Oryza sativa
  unsure (1)..(1003): unsure at all n locations
  Clone ID: PAT_MRT4530_3967C.1
aaatccctcctcttcctcctttgggccaagcccagtccgaagtcctcctctcctccctcttttctctccctcctcctcttgggcccccttcccctcggcccacctccctcttccctctccctcccgggctgcctctctcttcccctcccctcccggcctgcccggcccaggccgcctctcaatcctctcttcctgggccggccgccggcccaagccgccccagcccccaagccgctcccctcccgcacgtgccgcgcgcgtgcgcgcgctgacgcggccgcgccattcccggccgccttccattgccgccggccggcttttccgccgccgttccgacctcccccgtggccggctccctcttctctcatataaaatgggatccccgcactccgttctaccgttttaaccccatcccgagcctccccgtggtctctagccccatccccggcgtcgccctctctctcccacgccggcggcgacctccagccgcctgtgccgcctcgcccgtgcgccggccggccgcgccgtcgcctcctctagcatcgcagccgcctcctcttcgccggcctaccctccgtttcgcgcggtgaccgccggaggcgcactcccgccgtcgcccttctcattcctccttgccggccacctccagccgcctctccctcctcaccggagcatcgtccggccgtgccgtcgcctccctcggctctgcaacaccgtccccttcaccggcctcaccgtctcctcgccggaaactcgccggaacggtgcccccgccggcaaccagtgacattggtgccactgtactccctccagccggctgctgttcatcgccggtgcgccgatcgacgccgccatctncttcttcgacaccgcggcatcgccttctttcccggcatcacctcctcctcgcccgaatttcgccggaacgccgtcgtntccgcgccggcctntncttcctcctcgtcggctcgtcgccccgctgcaccaccaccttcaccaacat

SEQ ID NO: 35792 - DNA, 3879 bp, Oryza sativa
  Clone ID: PAT_MRT4530_39680C.1
atgtccgacgctcggtctcggcgttctgtcgcctcgagcactcggcgtcagcaggacgctgagctcgccgcagcagaagagcgtaggcgagcaacggctcagaccgctgcagcagcagcaagggcggccagactggcggcagcggagttggcagcagccagggcggaggcggaggcgtcggaagatgcggcacgtgtgacggaggtagaggttgagaccttgcgcagcagcatcaacggctccatcgccggcgacatcaccgccgacagggagcttgaggagctggcaagaggaagggcacgggagcgggcagagcggtgggcagcagcccacctccacggcggtggcggcggcccaagggaccacgcgcccgccgacgggaacccagacgggcgcgggcgtgccggcggaagcccggagcccgcacgtggccctcgcaggcagcgcggctctctctcccctgaccggcgccatggtcaccacggcgtccagacggtggtcagggactttggtcccggcggtgggtggcctaccctcaccaaaaccaactacatcgagtgggccgcggtgatgagggtgaggctccaggtgcggcacatgtgggaggcagtccgcgaccgcgcccgcaagtccacattgcaggcactccgcaaggagtgggagaacctggccttcaagccaggtgaggatgttgatgactttgctctccgtctcaacactctcttacagaaaatggtgcagtacggcgacgacacctacgacgaggagagagctgtcgagaagctcttccgctgcgtccctgagaagtacaggcagatcgctcgctcgatcgaatctctgctagacctctccacgatgtcgatcgaggaggcgttagatcgcttcaaggtcgtcgatggtgatgagccacagcctctctcggggcccatcaccatcggcgggaagctccatctcactcgggagcagtgggaggcctctcagggtgacgggaggaagggggagtcatcttccccgacaggcggccgtaagccgcgcaaggcacggggaggtgtccagctacggtgggcgcgaagacgtgccgagggtggcgcccgcagaggcgcccagggcgttgccaccggcaaccacaagccggcacgagacgacgcctgccgcaactgtggcaagcttggccattgggccaaagactgtcgacagccacgacgcgaccaggcccacgtcgcacgggtggaggaggaagagccggctctgctcctagctcacgcaagcatcgagctacctccagcggcaccggccgcagcggctttcctccaccttgatgagccgaaggtactcgtctccctctgcaacggctccagcaacgacaaggctgatgggtggtacctcgacaccggcgccacccatcacatgaccggccgacgggagttcttcaccgagttcgactccagcgtccgaggctccgtcaagttcggggacgcctccggcgtggagatcaagggtgttggctccgtcaccttcaccgccaagtccggtgagcataggctgctcaccggagtctactacatccccgcgttgaggaattctatcatcagcgtgggacagctggatgagaacggctcacgcgtgttggtcgaggacggattcatgaggatttgggatcgccgtcgtcgccttcttgccaaggtaaccagaggcactaatcgactctacatcctcagcgcgcaggtagcacaaccagtttgcctcgccgctcgtcgggacgacgaggcgtggcagtggcacgagcgcttcgggcacctccacttcgaggccctgaagcagctcagtgccaaggagatggtgcgaggcatgccgtgccttgaccacgtggagcagctctgcgacgtttgcgtgggctcgaaggcctaccgcatcctccacctggagacacagcgtgtgcgcattgtgcgcgatgttgtgttcgacgaagggcgagggtgggtatgggacaaggcggtggacgatggttcgactccgacgtacgacgacttcaccgtcgagtacgtccacttcgagggagctgggggagtaggcagctcttcttcaccgagcgtgtctaccctagcccccgaatctccaccgactccgacaccaacacaccctcgggccacgacttcgactacgacgagctcttcgtcgacaccaccccagccagtgactccacatgctccagcaccaacagccactcctccaagcacgtctactccgacgccagctcgtgttgagcgcagcccggtggagttcgctactccgctctcccacgacggggagcgcatcgacgcgtaccacgacggcgagcagctacggtaccaggccgagaaacacgcggcatggcgtgccgcgatgcagtcggagatggacgcggttcaggagaaccgcacctgggagcttgctgacctccctcgtggtcaccgcgcgatcacccttaagtgggtgttcaagctgaagagggatgaagccggagccatcgtcaagcacaaggctcgcttggtggcacgcggtttcgtgcagcaggaggggatcgactacgatgatgccttcgctcccgtggcacggatggagtccgtgcgactccttgcgctggctgctcaggaaggctggggcgtcgatcacatggacgtcaagtcggcgtttctgaacagcgacttgaaggaggaggtctacgtgcaccagccgccgagatttgtgatccccggcaaggagggcaaggtgctacgcctgcacaaggccctctacggcttgcggcaggcaccgagggcgtggaatgccaagttggattccacgctcaaggggatgggcttcgagcaaagcccgcacgaggcggccatctaccggcggggcaatggaggaaatgccttgctggtgggtgtctacgtcgacgacttggtgatcaccggcaccaaggatgcggaggtcgcggcgttcaaggagatgaaggccaccttccagatgagtgatctggggcctctctccttctacctggggatcgaagtgcaccaggacgactccgggatcacgcttcgacagaccgcctacgccaagcgcgtcgttgagctggctgggctcaccgattgcaacccagctcttactccgatggaggagagactgaagctgagccgcgacagcacggcggaggaggtggatgctacacagtaccggcgtcttgtggggagccttcgctacctcacccacacacggccggacttggccttctccgtcggctacgtcagtcggttcatgcagcgaccgacgacggagcaccagcaggctgtgaagaggatcatccgctacgttgcggggactctcgaccacggtctctactacccgaggtgtcctggcaaggcacacttcgtcgggtacagcgacagcgaccacgccggcgacatcgacaccagcaagagcacgagcgggattctcttcttcctcggcaagtgcctcgttagctggcagtcggtcaagcagcaggtggtggccctgtccagctgcgaggccgagtacatggcggcctccgccgcttcgacccaggcgctctggcttgctcgactgcttagtgatctcctcggcagagacactggaacggtggagctcagggtggatagcaagtccactttggccctggcaaagaaccccgtttttctcgaacggagcaagcacatccgggtgaggtaccacttcatccgaagctacttggaggaagggagcatcaaggcgagctacatcaacaccaaggaccagcttgcgtacttgctcaccaagcctcttgggaggatcaagtttctcgagctctgctccaggatcgggatggcccaacttccccacaagacgacgcacaagacttag

SEQ ID NO: 35793 - DNA, 4581 bp, Oryza sativa
  Clone ID: PAT_MRT4530_39681C.1
tcagagccacactttcctgtaggctaaacatctcttgttccaccccttcccaagctcggttgagctctcagccagcagcagcagcagcaccggttgctcctccttcccctttccctttcccccctccacgcagcagccccccggaggtgcgccatgtccgacgctcggtctcggagttcggtcgcctcgagcactcggcgtcagcaggacgccgagctcgctgcagcagaagagcgcaggcgagcaacggctcagaccgctgtagcagtagcgagggcggccagactggcggcagcggagttggcagcagccagggcggaggcggaggcggcggaagatgcggcacgtgcggcggaggtagaggttgagaccttgcgtagcagcatcaacggctccatcgccggtgacatcaccgccgacagggagcttgaggagctggcaagaggaagggcacgggagcgggcagagcggtgggcagcagcccacctccacggcggcggcggcggcccaagggaccgcgcgcccgccgacgggaacccagacgggcgcgggcgtgccagcggcagcccggagcccgcacgcgcccctcgcaggcagcgcggctctctctcccttgacctgcgccatggtcaccacggcgtccagacggtggtcagggactttggtcccggcggtgggtggcctaccctcaccaaaaccaactacatcgagtgggccgcggtgatgagggtgaggctccaggtgcggcacatgtgggaggcagtccgcaacgaccgcgcccgcaagtccacactgcaggcactccgcaaggagtgggagaacctggccttcaagccaggtgaggatattgatgactttgctctccgtctcaagactctcttgcagaaaatggtgcagtacggcgacgacacctactacgaggagagagctgtcgagaagctcttccgctgcgtccctgagaagtacaggcagatcgctcgctcgatcgaatctctgctggacctctccacgatgtcgctcgaggaggcgttaggtcgcctcaaggtcgtcgatggtaatgagccacagcctctctcggggcccatcaccattggcgggaagctccatctcactcgggagcagtgggaggcctctcagggtgacgggaggaagggggagtcatcttcctcgacaggcggccgtaagccgcgcaaggtgcgggaaggtgtccagctacggtgggcgcgaaaacgtgccgagggtggcgcccgcagaggcgcccagggcgttgccaccggcaaccacaagccggcacaagacgacgcctgccgcaactgtggcaagcttggccattgggccaaagactgtcgacagccacgacgcggccaggcccacgtcgcacgggtggaggagaaaaagccggctctgctcttggctcacgcaagcatcgaactacctccagcggcaccggccgcagcggctttcctccaccttgatgagccgaaggtactcgtctccctctgcaacggctccagcaacgacaaggctgatgggtggtacctcgacaccggcgccacccatcacatgaccggccgacgggagttcttcaccgagttcgactccagcgtccgaggctccgtcaagttcgggaacgcctccggcgtggagatcaagggtgttggctccgtcaccttcaccgccaagtccggtgagcataggctgctcaccggagtctactacatccccacgttgaggaattctatcatcagcgtgggacagctgaatgagaacggctcacgcgtgttggttgaggacggactcatgaggatttgggatcgccgtcgtcgccttcttgccaaggtaaccggaggcactaatcgactctacatcctcagcgcgcaggtcgcacaaccagtttgcctcgccgctcgtcgggacgacgaggcgtggcagtggcacgagcgcttcgggcacctccacttcgaggccctgaagcagctcagtgccaaggagatggtgcgaggcatgccgtgccttgaccatgtggagcagctctgcgacgtctgcgtggtgacgaagcagcggcggctcccctttccccagcagacgagcttccgagccaaggaacggctcgagctcatgcacggggacttgtgtggcccagtgacaccggccacaccaggaggacgatgttacttcctgctgctcgttgacgacctctcccgctacatgtgggtgatggtcctcggcagcaagggagaggctgcggacgccatcaggcatgcgcaggctgctgcagaggtggagtgcggccgcaagctgcgcgtgctgcgcaccgacaacggcggcgaattcacagcggctgaattcacgtcgtactgcgctgatgagggcattcagcgccactacaccatgccgtatagcccgcagcagaacggcgtcgtcgagcggcgcaaccagacggttgtggggatggctcgggccctcctcaagcagagggggatgccggccatcttctggggggagacggtggtgacggctgcctacatcctcaaccgctcgcctaccaaggccctcgatggtaggacaccgtacgaggtttggcatgggcgcaagccggcggtctcccacctacgggtcttcagctgcctcgcgttcgccaaggagcttggccacatcggcaagctcgacgacaggagcaccccaagggtgttcatcggctacgcgaagggctcgaaggccttccgcatcctcgacccggagacacagcgtgtgcgcactgcgcgcgatgttgtgttcgacgaagggcgagggtgggtatgggacaaggcggtggacgatggttcgactccgacgtacgacgacttcaccgtcgagtacgtctacttcgagggagctgggggagtaggtagctcttcttcaccgagcgtgtctaccccagcccccgaatccccaccgactccgacaccaacacaccctcgggccacgacttcgactacgacgagctcttcgttgacaccaccccagccagtgactccacatgctccagcaccaacagccactcctccaagcacgtctactccgacgccagctcgtgttgagcgcagcccggtggagttcgctactccgctctcccacgacggggagcgcatcgacgcgtaccacgacggcgagcagctacggtaccgtacgatggaggatcttctcggcgaccagccggtgccggtgcctcgcgacctagaggcgcagttgcaccttgcgtgcaacgacggtgagcctcggtcttttgcagaggccgagaaacacgcggcatggcgtgccgcgatgcagtcggagatggacgcggttcaggagaaccgcacctgggagcttgctgacctccctcgtggtcaccgcgcgatcacccttaagtgggtgttcaagctgaagagggatgaagccggagccatcgtcaagcacaaggctcgcttggtggcacgcggtttcgtgcagcaggaggggatcgactacgacgatgccttcgctcccgtggcacggatggagtccgaaggctggggcgtccatcacatggacgtcaagtcggcgtttctgaacgacaacttgaaggaggaggtctacgtgcaccagccgccgggatttgtgatccccggcaaggagggcaaggatgcagaggtcgcggcgttcaaggaggagatgaaggccaccttccagatgagtgatctggggcctctctccttctacctggggatcgaagtgcaccaggacgactccgagatcacgcttcgacagaccgcctacgccaagcgcgtcgttgagctggctgggctcaccgattgcaacccagctctcactccgatggaggagagactgaagctgagccgcgacagcacagcggaggaggtggatgctacacagtaccggtgtcttgtggggagccttcgctacctcacccacacacggccggacttggccttctccgtcggctacgtcagtcggttcatgcagcgaccgacgatggagcaccagcaggctgtgaagaggatcatccgctacattgcggggactctcgaccacggtctctactacccaaggtgtcctggcaaggcacacttcgtcgggtacagcgacaacgaccacgccggcgacatcgacaccaacaagagcacgagcaggattctcttcttcctcggcaagtgcctcgttagctggcagtcggacaagcagcaagtggtggccctgtccagctacaaggccgagtacatagcggcctccgccgcttcgacccaggcgctctggcttgctcgactgcttagtgatctccccggcagagacactggaacggtggagctcagggtggatagcaagtccgctctggccctggcaaagaaccccgtttttcacgaacggagcaagcacatccgggtgaggtaccacttcatccgaagctacttggaggaagggagcatcaaggcgagctacatcaataccaaggaccagcttgcggacttgctcaccaagcctcttgggaggatcaagttcctcgagctctgctccaggatcgggatggcccaacttgcccacaagacgacgcacaagacttag

SEQ ID NO: 35794 - DNA, 5166 bp, Oryza sativa
  Clone ID: PAT_MRT4530_39682C.1
atggagggcatgcggtggcaccgagttgttactgtagtatgcattccaaatgagcttcacccaagcagcagcaggagtaccgtctctaatgtttttcctgcattggagtctctgaagttcagggacatgggagcctgggaggaatggtcagaattcaaggatgaacacttcccacagctcaagtatctcagcattgttaggtgtgcaaagctgacggtgctgcccaacttcacttcaggaccaaaacagagaatcaggagttgtgagaaactgctccagcctctatgtcagaatatacggcggaatttgatgaagtacataccaccaccaagtgaactgtcatatgcatgcatggcagaaggttctaccccctctttcttcttcttaagagatattttacggtgtatgcattccaaaaagggtaaagatccaatgctcctcaatcacaggtaccatgttaaagaactaccaaatggtaaaatcccaatcaatcctaaatgtgtcaacattgtgtttggtatccctcgtactggagtgactataaaaccaaacaatccaaagcatgagtttatcaagatactaaagcacttgtttagggtttcatcgggtactcaaatttctgttcaacaattacaagtgcatttgaaggagatcattgccccaacaacatcaaaccaacctagtatgcaatatgccaatgtttgcttggatgttaacaacattgcaaagtacaattgggctgaggacatgctttcaactataagaaatgcagtgctgcagctactatatttagattatatagatgcatctggatgtaatgtgccatggggagagcctagggtggcattttggacagatcaagcagcaaaaccattgaaaaatgctgatatgggatctgggctttatgcagtttatggatcatgcaaggacagcatctactctttaagcatattttcagttactaggacagctgcggtagaggttgagaccttgcgcagcagcatcaacggctccatcgccggcgacatcaccgccgacaaggagcttgaggagctggcaagaggaagggcacgggagcgggcagagcggtgggcagcagcccacctccacggcggcggcggcggcggcggcccaagggaccgcgcgcccgctgacgggaacccagacgggcgcgggcgtgccggcggcatcccggagcccgcgcgcggccctcgcaggcagcgcggctctctctcccctgaccggcgccatggccaccacggcgtccagacggtggtcagggactttggtcccgggggtgggtggcctaccctcaccaaaaccaactacatcgagtgggacgcggtgatgagggtgaggctccaggtgcggcacatgtgggaggcagtctggtacggcgacgtcgactacgacgatgatcggcgggcactggatgccctcatcgctgcagtcccgcccgagatgcagttctcgcttttccagaagcggattgccaaggaggcctgggacgccatcgctgcggcacgcatcggcagcgaccgcgcccgcaagtccacactgcaggcactccgcaaggagtgggacaacctggccttcaagccaggtgaggataagatggtgcagtacggcgatgacacctacgacgaggagagagctgtcgagaagctcttccgctgcgtccgagagaattacaggcagatcgctcgctcgatcgagtctctgctggacctctccacaatgtcgatcgaggaggcgttaggtcgcctcaaggtcgtcgacagtgatgagccacagcctctctcggggcctatcaccattggcgggaagctccatctcactcaggagcagtgggaggcctctcagggtgacaagaggaagggggagtcatcttccccgacaggcggccgcgcccagggcggcgccaccggcaaccacaagccggcacgagacgacgcttgtcgcaactgtggcaagcttggccattgggccaaagaccgtcgacagccacgacgcggccaggcccacgtcgcacgggtggaggaagagccggctctgctcctggctcacgcaagcatcgagctacctccagcggcaccggccgcagcggctttcctccaccttgatgagccgaaggtactcgtctccctctgcaacggctccagcaacaacaaggctgatgggtggtacctcaacactggcgccacccatcacatgaccggccgacgggagttcttcaccgagttcgactccagcgtccgaggctccgtcaagtttggggacgcctccggcgtggagatcaagggcgttggctccgtcaccttcaccgccaagtccggtgagcacaggctgctcaccggagtctactacatccccgcgttgaggaattctatcatcagcgtgggacagctaaatgagaacggctcacacgtgttggtcgaggacggactcatgaggatttggaatcgccgtcgtcgccttcttgccaaggtaaccagaggcactaatcgactctacatcctcagcgcacaggtcgcacaaccagtttgcctcgccgctcgtcgggacgacgaggcgtggcagtggcacgagcgcttcgggcacctccacttcgaggccctaaagcggctcagtgccaaggagatggtgcgagacatgccgagccttgaccacgtggagcagctctgcgacgtctccgtggtaacgaagcagcggcgactcccctttccccagcagacgagcttccgagccaaggagcggctcaagctcgtgcacggggacttgtgtggcccagtgacaccggccacaccaggaggacggcgttacttcctgctgctcgttgacgacctctcctgctacatgtgggcggagtgcggccgcaagctgcgcgtgctgcgcaccgacaacggcggcgaattcacggcggctgaattcgcgtcgtactacgctgatgagggcattcagcgccactacaccacgccgtacagcccgcagcggaacggcgtcgtcgagtgtcgcaaccagacggttgtggggaaggctcaggctctcctcaagcagagggggatgccggccatcttctgggggaaggcggtggtgacggctgtctacatcctcaaccgctcgtctaccaaggccctcgatggcaggacaccgtacgaggcttggcatgggcgcaagccggcggtctcccacctgcgggtcttcggctgcctcgcgttcgccaaggagcttggccacatcggcaagctcgacgacaggagcaccccaggggtgttcatcggctacgcgaagggctcgaaggcctaccgcatcctcgacccggagacagcgtgtgcgcacagcgcgcgacgtagtgttcgacgaagggcgagggtgggtatgggacaaggtggtggacgatggttcgactccgacgtacgacgacttcaccatcaaccggcgaccccacgcgctccagcaccaacagccactcctccgagcacgtctactccgacgccagctcgtgttgagcgcagctcggtggagttcgctactctgctttcccacgacggggagcgcatcgacgcgtaccacgacggcgagcagctacggtaccgtacgatgaaggatcttctcggcgaccagccggtgccgggactggtacctcgcgacctagaggcgcagttgcaccttgcgtgcgacgacggtgagcctcggtctttcacagaggccgagaaacacgcggcatggcgtgccgcgatgcagtcggagatagacgcggttcaggagaaccgcacctgggagcttgctgacctccctcgtggtcaccgcgcgatcacccttaagtgggtgttcaagctgaagagggatgaagccaaagccattgtcaagcataaggcccgcttggtggaacgcggtttcgtgcagcaggaggggatcgactacgacgatgccttcgctcccgtggcacagatggagtccgtgcgactccttgcgctggctgctcaggagggctggggcgtccatcacatggatgccaaatcggtgtttctgaacgacgacttgaaggaggaggtctacgtgcaccagccgccgggatttgtgatccccggcaagaagggcaaggtgctacgcctgcacaaggccctctacggcttacggcaggcaccgagggcgtggaatgccaagttggattccacgctcaaggggatgggcttcgagcaaatggaggaaatgccttgctggtgggatgtggaggtcgcagcgttcaaggaggagatgaaggccaccttccagatgagtgatctagggcctctctcctcctacctggggatcgaggtgcaccaggacgactccaggatcacgcttcgacagaccgcctacgccaagcgcatcgttgagctggctaggctcaccgattgcaacccagctctcactccgatggaggagagactgaagctgaaccgcaatagcatgacggaggaagtggatgctacacagtaccagcgtcttgtggggagccttcgctacctcacccacacacggccggacttggccttctccgtcggctacgtcagtcggttcatgcagcgaccgacgacggagcaccagcaggctgtgaagaggatcatccgctacgttgcggggactctcgaccacggtctctactacccgaggtgtcctggcaaggcacacttcgtcgggtacagcgacagcgaccacgccggcgacatcgacactagcaagagcacgagcgggattctcttcttcctcggcgagtgcctcgttagctggcagtcggtcaagcagcaggtggtggccctgtccagctgcgaggccgagtacatggcagcttccgccgcttcgacccaggcgctctggcttgctcgactgcttagtgatctcctcggcagagacactggagcagtggagctcagggtggatagcaagtccgctctggccctggcaaagaaccccgtttttcacgaacggagcaagcacatccgggtgaggtaccacttcatccgaagctacttggaggaagggagcatcaaggcgagctacatcaacaccaaggaccagcttgcggacttgctcaccaagcctcttgggaggatcaagttcctcaagcgctgctccaggatcgggatggcccaacttccccacaagacgacacacaagacttag

SEQ ID NO: 35795 - DNA, 1101 bp, Oryza sativa
  Clone ID: PAT_MRT4530_39683C.1
atggaaaaggttcaagcttcttgtgagggtgatcagggaatctgcaaaagaggagccaaaggtggccatccgatcgaccaaaatcttgtgggagggatgactatgtcgaccggtgtccctactactgtgcctcctaccccagcattagctgccttgaaaaacctacttataagggtggtggcagcagcagctgggaaaggcctcagcagcagcgcagaagaagcaaggtgtctttgggcaaagctgccggcgccggaggaggaggaggaggccggccagcagccggagaggccgccgtcgtcatatcggcggccaccgacatcgacgttgatggcgccggtggggctccctccggggttccggttccacccgacggacgaggagttggtgaactactacctcaagaggaagatccacggtctcaagatcgagctcgacatcatccctgaagtcgacctctacaagtgcgagccatgggagctcgctgagaaatcgttcttgccgagtagggatccggagtggtatttcttcgggcctcgggatcggaagtatccgaacgggttcaggacgaacagggcgacgagggcggggtactggaagtcgacggggaaagaccggcgggtggtgcaccagcacggggggcgcgccatcgggatgaagaagacgctggtctactaccgcggccgcgcgccgcagggcgtccgcaccgactgggtcatgcacgagtaccgcctcgacgacaaggactgcgaggacaccatgcccatcaaggacacttacgcgttatgccgggtcttcaagaagaacgcgatctgcaccgaggtggaggagctgcaggggcagtgcagcatggcgctgctggagggcgcctgccagcagctgctcgccagcggcggcggcggcagccaggagcagtacgagacgccgtcgccgccggacgtccccgtcggatcaaccttcggtggggccgacgccgacgccgaggacgaccccgacaaggacgactcctggatgcagttcatctccgacgacgcctggtgctccagcaccgccgacggcggcgccgaggagagcacctcctgcgtggccctcgccggctga

SEQ ID NO: 35796 - DNA, 7767 bp, Oryza sativa
  Clone ID: PAT_MRT4530_39684C.1
atggcggcgcctcccaattcaccgattgggtggtggcgcgaggtgagagcgcgcttgtggctgcacacggtggaagtggaagtcaactttcttgcacatccatttgtggtttactcccatttccctctgtttgaatctggctctcctcctagtttctctctgaaagcagccttgcatttgatcagcaagaagaaagatcaagggcctcttcttctaggagtgagctgcagttctgatcttactactagtcagattgcaaccaagaagctctactttgccaaaatgaaagattctgcctatgatgccgacgacgtcatggatgaatttgattacctgattctgaaggcaaatgctcagcagaagagcaagctaagtagcttggcctccagttctcttgccataggaaagcgtttggttggccaagacaagttcagatccaagttaaggagggtcctcaatagcctgattagagtaaaagaatgtgctgacatgctcatcaaagtgattggggctgaaaactctaattcatatatgcctcctcagccacttcaatggcgtgtcaccagctcaatttctcctggccaaattatcattggccgacaaaatgagcaggatgatctagtgcaccgacttctgagagaagctgatggaccagagccaagcagaggactaacaatatcaccaacaccatctataattaccatagttggcagtggtggcattgggaaaactgcattagctcagcttatttacaatgacagaagaatagtcagtggttttgatctgaggacatggatatatgtttcaaatatcttcaataaggtcaaaatcaccaaagagattttgaaatcaattgatagaaacagtgatataacaaatttcagttttaacatgctccaggaagatcttaagaacaagttaacagcaaagaagtttctacttgtgctagatgatgtgtggtatgatgaaaagattggtgagcttacaaatgctgatagatggagagaattgtttgctcctctatgctatggagctaaaggaagcaaaattcttgttactgctcgaacaaatattgtttcaaggattttgggttgcccagcaccattccatttggagggtctgaagggtgaagatagttggaacctcttcaggatctgcgcatttggcgctgaagatccaggaaattatccagaactagagtctatcggtgaatgtattgtccaaaagttgaatggctcagcattagtcataaaggttgttggtgcacatttgaatgctaacctcaacgttgaagagtggacacgagttatgaaaagtagttcatcaaacaaggaagacattatgcaaattttgcgtctgagctatgaatgcttgccaggtcacctccagcaatgttttactttttgcagcctgttccccaaaggctattctcttgagcctgacttgttggtgaatatgtggatagcccataaatttgttcatggtcatataggcacatatgaaagtatgagagaaactggtagaagttatttcaatgaactattatctagatcattttttcaggaacttcagtatggccatacaatacgttatgttatgcatgacctcatgaatgaccttgcttctcacatttccagagcagccccccggaggtgcgccatgtccgacgctcggtctcggcgtttggtcgcctcgagcacttggcgtcagcaggacgccgagctcgccgcagcagaagagcgcaggcgagcaacggctcagaccgctgcagcagcagcagcgagggtggccaaactggcggcagtggagttggcagcagccagggcggaggcggaggcggaggcggcggaagatgcggcacgtgcggcggaggtagaggttgagaccttgcgcagcagcatcaacggctccatcgccggcgacatcaccgccgacagggagcttgaggagttggcaagaggaagggcatgggagcgggcagagcggtgggcagcagcccacctccacggcggcggcggcggcccaagggaccgcgcgcccgccgacgggaacccagacgggcgctggcgtgccggcggcagcccggagcccgcacgcggccctcgcaggcagcgcggctctctctcccctgactggcgccatggtcaccacggcgtccagacggtggtcagggactttggtcccggcggtgggtggcctaccctcaccaaaaccaactacatcgagtgggccgcggtgatgaggtccggtacgggcgacgtcgactacgacgaggatcggcgggcactggatgccctcatcgctgcagtcccgcccgagatgcagttctcgctttcccagaagcggactgccaaggaggcctgggacgccatcgctgcggcacgcatcggcagcgaccgcgcccgcaagtccacactgcaggcactccgcaaggagtgggagaacctgcccttcaagccaggtgaggatgttgatgactttgctctccgtctcaacactctcttgcagaaaatggtgcagtacggcgacgacacctacgacgaggagagagctgtcgagaagctcttccgctgtgtccctgagaagtacaggcagatcgctcgctcgatcgaatctctgctggacctctccacgatgtcgatcgaggaggcgttaggtcgcctcaaggtcgtcgatggtgatgagccacagcctctctcggggcccatcaccatcggcgggaagctcaatctcactcgggagcagtgggaggcctctcagggtgacgggaggaagggggagtcatcttccccgacaggcggccgtaagccgcgcaaggcgcggggaggtgtccagctacggtgggcgcgaagacgtgccgagggtggcgcccgcagaggcgcccagggcgttgccaccggcaaccacaagccggcacgagacaacgcctgccgcaactgtggcaagcttggccattgggccaaagactgtcgacagccacgacgtggccaggcccacgtcgcacgggtggaggaggaagagccggctctgctcctggctcatgcaagcatcgagctacctccagcggcaccggccgcagcggctttcctccaccttgatgagccgaaggtactcgtctccctctgcaacggctccagcaacgacaaggctgatgggtgcgtccaaggctccgtcaagttcggggacgcctccggcgtggagatcaagggtgttggctccgtcaccttcactgccaagtccggtgagcacaggctgctcaccggagtctactacatccccgcgttgaggaattctatcatcagcgtgggacagctggatgagaacggctcacgcgtgttggtcgaggacggactcatgaggatttgggatcgccgtcgtcgccttcttgccaaggtaaccagaggcactaatcaactctacatcctcagcgcgcaggtcgcacaaccagtttgcctcgccgctcgtcgggacgacgaggcgtggcagtggcacgagcgcttcgggcacctccacttcgaggccctgaagcagctcagtgctaaggagatggtgcgaggcatgccgtgcctggaccacgtggagcagctctgcgacgtttgcgtggtgacgaagcagcggcggctcccctttccccagcagacgagcttccgagccaaggagcggctcgagctcgtgcacggggacttgtgtggcccagtgacagcggccacaccaggaggacgacgttacttcctgctgctcgtcgacgacctctcccgttacatgtgggtgatggtcctcggcagcaagggagaggctgcggacgccatcaggcatgcgcaagctactgcagaggcggagtgcgaccgcaagctgcgcagggggatgccggccatcttttggggggaggcggtggtgacggccgcctacatcctcaaccgctcgcctaccaaggccctcgatggcaggacaccgtacgaggcttggcatgggcgcaagccggcggtctcccacctatgggtcttcggctgcctcgcgttcgccaaggagcttggccacatcggcaagctcgacgacaggagcaccccaggggtgttcatcggctacgcggagggctcgaaggcctaccgcatcctcgacctggagacacagcgtgtgcgcactgcgcgcgacgttgtgttcgacgaagggcgagggtgggtatgggacaaggcggtggacgatggttcgactccgatgtacgacgacttcaccgtcgagtacgtccacttcgagggagctgggggagtaggcagctcttcttcatcgagcgtgtctaccccagcccccgaatctccaccgactccgacaccaacacaccctcgggccacgacttcgactacgacgagctcttcgtcgacaccaccccagccagtgactccacatgctccagcaccaacagtcactcctccaagcacgtctacttcgacgccagctcgtgttgagcgcagcccggtggagttcgctactccgctctcccacgacggggagcgcatcgcataccacgacggtgagcagctacggtaccgtacgatggaggatcttctcggcgaccagccggtgccgggactggtgcctcgcgacctagaggcgcagttgcaccttgcgtgcgacgacggtgagcctcggtcttttgcagaggccgagaaacacgcggcatggcgtgccgcgatgcagtcggagatggacgcggttcaggagaaccgcacctgggagcttgctgacctccctcgtggtcaccgcgcgatcacccttaagtgggtgttcaagctgaagagggatgaagccggagccatcgtcaagcacaaggctcgcttggtggcacgcggtttcgtgcagcaggaggggatcgactacgacgatgccttcgctcccgtggcacggatggagtccgtgcgactccttcatgcgctggctgctcaggaaggctggggcgtccatcacatggacgtcaagtcggcgtttctgaacggcgacttgaaggaggaggtctacgtgcaccagccgccgggatttgtgatccccggcaaggagggcaaggtgctacgcctgcacaaggccctctacggcttgcggcaggcaccgagggcgtggaatgccaagttggattccacgctcaaggggatgggcttcgagcaaagcccacacgaggcggccatctaccggcggggcaatggaggaaatgccttgctggtgggtgtctacgtcgacgacttggtgatcaccggcaccaaggatgcggaggacgactccgggatcacgcttcgacagaccgcctacgccaagcgcgtcgttgagctggctgggctcaccgattgcaacccagctctcactccgatggaggagagactgaagctgagccgcgacagcacggcggaggaggtggatgctacacagtaccggcgtcttgtggggagccttcgctacctcacccacacacggccggacttggccttctccgtcggctacgtcagtcggttcatgcagcgaccgacgacggagcaccagcaggctgtgaagaggatcatccgctacgttgcggggactctcgaccacggtctctactacccaaggtgtcctggcaaggcacacttcgtcggctgcgaggccgagtacatggcggcctccgccgcttcgacccaggcgctctggcttgctcgactgcttagtgatctcctcggcagagacactggaacggtggagctcagggtggatagcaagtccgctctggccctgacaaagaaccccgtttttcacgaacggagcaagcacatccgggtgaggtaccacttcatccgaagctacttggaagaagggagcatcaaggcgagctacatcaacaccaaggaccagcttgcggacttgctcaccaagcctcttgggaggatcaagcgacttgttacttttcctaagtgcttgggcaccttgagcagcattttgtgtattgatgttcatcgtatgtgcactgttgatttagctgccagcagccatatgccatgtcttcgagcggctggggaattctgtgttgataagagtaaagtgcagggactagaggtgctgaagcagatgaatgaacttcaggggtcgcttgctattacatctcttgagaatgtgaaaagcagggatgaggcaactgatgctcaactattcagaaagagtcaaatctttaaactgaaactgcaatggggttcttctaatgcttctagcaagtctgacaaagcgaatgatgtgttcgatgctttaagacctcactcgggccttgaggaattgattgttcagggatatccagggtgtgtgtccccatcttggttggagtcagagtggctctctagactgagacacattagcatttctgattgcaagtgttggaagttgcttccatctttaggccaaatacaatctctcaggacacttcgtattgctagactgaatgcagtggtttgtataggccccgagttttatgggactgctggctttccctcactggagattctggaaatgatagagttgccagaattggcagaatggtcttctgtggactgtttttttcctgctcttcttgaggtgtgcatcagaggatgccccaagctgaaacaattgccaccagttgttctcccacctgtaagaatgagtatatatgtatctaccgaagtttgcaggctgcgaaatcataatcgcctggagacatgttttactcaggaggtgagcttaagcacactcttggatatgttgcatcttcgtcgtctggaacctgtgaaatgtgtaaatatcatctttgaaggagcaaacactctggaagatggacttaaagatgtaacaacaaatctgccatcccttgaagagttggttatcaggggatgttctgatctgcagcatgcttttgcagctagtaaacagcgggaagaggatgggaatgtcttttcttcggcatctattcaatgtctcaaaatgattggctgcaacctgacagtggacatttttcttagtgtgtttcagaacattagtttcctttcattgtggataaacgattgcaacatcacttattcaactcctgaacgtgtgttggccatgccaaagtcagtgactggagtacttgagaagctgtgtattttaagctgtgatgggttgacagctttcatgggcctagaaacattcttaaggttaagcacaatagaaattgcaagttgccccaagttaacgtcagtgccagactttaggtgtcttccagccctccagaacttgatcataaagaattgccctgagctcaaggaactacctgaaaatggtaacctaacaacattaactgcactggttgtggaacactgcaacgcgctaatatcactgaggaacctgcgagacctttctttcctctcaaaactggtggtcagaaattgtatgaagttaatggctttgcctcagatgattagtttctcttccctcagagtcttgatcataaaaaactgccctgaagtagtttctttaccagaagatggtcttcctgtgtcccttaattgtttgtatttggctggatgccatccagtgctggaggaacagtttgaccagaaaaatggtagtgaatgggagaagtatgaagtgttgccgttttgtttctttgctgataaatcaatagaagatatcgaagagatagccaaagaagtacttatggcggatgatcttaccaggatttccattcagggcaatcgagttcatgcaactgattctgcagcaagctcgtccagtttcccttag

SEQ ID NO: 35797 - DNA, 649 bp, Oryza sativa
  Clone ID: PAT_MRT4530_39685C.1
ctttctccgccgttgtcgggctcgagctctctctcctctccaccggttaaatcgagcttccgcctccactccttttctagtcgtcatagccggcgtgaatcgaggtgccgctgcttggcttggacctctccggtgatggtgcgctcttcccgctccggcgatggtgcctatgacaagctccctctctgccgctgtgatgggctcccaccggcctctcttccctccccgctgctgccacgagctccctccccacagaggacgacaaaatcagcggcggcgagctccatgtggtggcactcgatctcgagctctctctcctctccaccaccgagatcgacctaccaccgcctctccttcggtcacctctatcagcatggatcaaggctccctcccggctgctgcgatgggatctcaggcaacgcggccatgacgaggtgtggccacgcagctcatggacttcgagcttgccggatccagcctcatgctcactagatctgtgcggggacaagggcgaggagaagacgacgacctcgacagcagtggcgggttgcggtggcagcgccagcagcggcggagtgcagcgacgacctcggcagcgagcatgtcctgtcatcggcggcatgttcctcgattctctcctagaccacat

SEQ ID NO: 35798 - DNA, 476 bp, Oryza sativa
  Clone ID: PAT_MRT4530_39686C.1
atggcttcttcggtcctcccgaggccgaatcttgctatggcgaagtcgacccccttcggcgtatactcttcgccctacatccttcgcctaggaggcctctggcttggcgaggtttggtcgaagggcctcatgccatatcgccaacaccggaaggataatgtcgcgtacaaccatttgcttggactaaaaccatatgatctgggagctgaccttggaatccatccccgtggttatggcatgagagttcttggattggagcctttagtgacgatcatgttgccaaaaggatggatgaagcctgggatgatgtcgtcactcagtgcccatgccagcgcaccatcgccgcttcagtcgtacacgaagatcggtggcagcgacggcacgtggctaggcaagctagcaccatgggcggtgtgcggctgcaaggcccctcccactccattagccgcccggagagccctctactagaatcgtaa

SEQ ID NO: 35799 - DNA, 485 bp, Oryza sativa
  Clone ID: PAT_MRT4530_39687C.1
gtataagaattacatagaaaaaaatgtaattttagtatttaaaaaatgtaacattaatatattaaaaaatgtaacattaatatatcaagaggttccaaatcagttgaaacatatcaatacttgttggaagaatcagacaaaattagtagcacattgaaatcaatgatttcaacgattcaagagtgtgaacatcaaaatatcaatgttgaggataacatcttgcaaaatggaaaagcagaagtcaatgaaaattccgagaatattgatgtggaggaacaaacaatgaatgacgaaaatatttggaagatcctgatatagaaaattcaaaaggaaggccaagacaaagaaacaagactattaatgagcaaattgaagaaaaagagacaaatcattgtagtcattgtggtagaacagaccacacatttcccacatgtccatttaaacacatggaatttgatttgccaaggaagaagaagagaaaagtt

SEQ ID NO: 35800 - DNA, 420 bp, Oryza sativa
  Clone ID: PAT_MRT4530_39688C.1
atgcacatacaggatatattgcggcggctagcacagatcgaagaggacggcgccctgtcctgtcctgtgggagaccagcgcggcctgtgggagaccggcgcggcggcggcggtggcggccctccctcccctaaatttctcggtgagcctcggccccactgctgatctatcccattccggccgggcaccggcgacgacgatgcagctgtactccgccaatctccgcacttggattcttgcttgctactgccatcaccctacccttccagcttctacccctctgctaccgttcttcgtcgtcgggttcgcttgggaacgtgatcatagagtgccggcgctagtgagcggatacaggatccatctagccaccggtcttcctagaaaagagccgtcgtgccatcaccgatctggcaagccatag

SEQ ID NO: 35801 - DNA, 254 bp, Oryza sativa
  unsure (1)..(254): unsure at all n locations
  Clone ID: PAT_MRT4530_39689C.1
ttcttgcgtacccccacgcgnccccacacgcgggggggacgttttaagccctgagacagtaccggcccaccttaccagatgacaatccacactaacccccctcagcaaagaacggaactcaaaactcggaacctccacacgctgccgattatcaacctagaaaagacccttgccgatgaacaaacttgagcaagacgggtatggaatagatccacatatacatcctgcactcctcgaaatgatgcctactgaac

SEQ ID NO: 35802 - DNA, 5751 bp, Oryza sativa
  Clone ID: PAT_MRT4530_3968C.1
tggagttcacagatggaaggagtcctactcggacaggactgggtcgtcactgtatcgtgcaaggtccgatgtctccgagttctacttggaaaccgcctgacctgcgatataaaagggaccccctgggaggacctaaggcatcgaatctcatagccaacacatccaccacagcctacgaaatcctcgtaccagcgtaccacagtacccactatatccggtatcccccatcgacagtggcgcgccatgtagggggccttggtgctcaaggttctactactatttcatctagcttcgtcgacaacagcgtcaacaccaacctcgaccaaggagttcctgcttcaacaatgctggtgtgtactcaagtcggcgaaatcgtcttcccgatttacaccacggtgccgatctcggctggtccatcagtgactggaagcgagaacacagtggctacaacccaggacgacttcatgtcgaaggatcctcccgccgaagcggagaacggaacgtcgacgacatccgagcccgagaaggatcctaatgcggccaaaccttgtctcttcaacaagaatcacgagccgacgaggataacttccgaggtgataaggtcctggtgccctatccacaaaaccagaaaacacaccttgcaagcctgctgggtttttctcaacgtacatgccgaaattcgtgcctgcaaagagcgtggaattcagcgtacttctccaacccgtgatatctattgtcctatccacaagacaaagaatcacgacctctcaagctgcaaggtctttctcagcgccatgaagacggcgcctcctaaggtccagcagtcatgtatctctcctagggatgcggacaaggaacaaggagcgacactgatctcggatcgattcgttggggtaatcgacatcgatcctcacaagccgtcagttctacacttgctcgaagactatggctcatcatcaacaagtacgccacgcgaggtattggctatcgacaggactagcacgtcagcgcgcgctaatgcggaagtagaaaatcaagtgactacactggcccagcatatcagggccatcaacgcaatactgagggaggccccctacgatcccgttctgaacgacgatctcgcacggtggacagaacggctacaggaatcagtaaccaacctcagtaacgcgtttgaagaggccgtcgctacagcgcacccggaacagccaccaactggtggtgctaatggcgaaaaccctgaacagcgggaatcgcctcatcgagccacccctccacctcgcggcaccggcgatctccgcgatcacctgaatggccgccgagaggcacgacgcacacgagacaacgggaaccgttcctgacatcgcgtctcttcacgacgtcacgataacggtgataaccgccacaactaccacgatcacgacgatcgcgaatggcgggtgccgggcgatacaggtcgaggacgccgccataatgacgacgacaatggagatcggcgctgggacaacaacgggaggcgacgacaggattctcgagaacccggccgacgcccttgtaatcgcacaccggagtagatgacaacgcgttttcgaattatttgccaactgcattgaaaggctctgcacgttcatggctgatgcatctcccgccctactcgatttcttcgtgggcagacctgtggcagcagttcgtcgtcaacttccaaggaacttacaagcgccacgctatcaaagacgacctacatgcgttgacacaaaacccaggtgaatccttgagagattatgttcagcgctttaatgagtgcagaaatacaatccccgaaatcaccgacgcttctgtaatccgcgctttcaagtccggtgccagagatcgctatactacccaggagttggcaacgaggcgcatcacaactacttggagattattcgagattgtcgatcgatgcgcccacgcagatgacgcactgagacgcaagaacgacaagccgaagaccgcaggagagaagaaaccagccaaggacgcacctgagtcaagcaaaaagaaaaatcacaagagtgggaaaaagaaagctcaagcggaagttctcgcagcagaatacgcggaccctcccaaacgcccagacctacaaggtagtgacgcgaaggaagcatggtgcgctatacacaagtcggacagacactctctggaagattgcctcgtcttcaaaaagtcgctcggaaagcacatggcatcggaaaaaagcaagcgagtacgtgtggtagagaaggacactgagacggctacttaggaatcggactcatcatacccagactccgatctccatgtctcgcacatctttggaggttccacggcggcgatatccgatcgtggtcgaacctactattcggaatatcaaggtcgcacgagttctgatcgacggcggcagctcaatcaaccttctcttcgccagcacattggacgcgatggggatcccacgaagcgaattgacaccaaccgatcaacccttccatggaatcactccccagtcatcgtccgaaccattgggcaaaattacgttgcctgtgactttcggccaagcaagtaacttccgaacggagcagatcacctttcatgtcactgaattcgatacagcatacaatgccatcattgggagaactgcactcgcgaagtacatggccgcatctcactacgcgtatcaagtgctcaatatgccgggaccaaagggaacaatcactattcaagggaacgctaagctggcagtgcaatgcgacaagcggagcctcgacatggtcgagcacacgcccagcccacccgccacagctgagccactcaagaaagtgagcaaaacaaacaagacgccgaaaccagacggcgcaatcaggatcgttccactctccagtgctaaccccgacaggaccgaactcgcgctcatcaccttcctccgcgacaatgctggcgttttcgcttggcagccgtccgacatgccgggggttcccagggaggtgattgagcacaaactcatggtgcgacccgacgccaagccagtaaaacaaaaactacggagatttgcaccagattaaaaacaagacatatgagaagagctcgacaaacttctcaaagctagtttcatcagagaggtactccatccagagtggctagccaatccagtcatggtgcggaaggccaacgggaaatggagaatgtgcgtcgatttcaccgacctcaacaaggcgtgtcccaaggatcacttccctctttctcgaatagaccaacgggtggactcaacagccggttgtgagttgttgagttttctcgacgcttactccggttaccaccaaatcagcatggcaaaagaggacgaggagaaaacaacattcatcacgccattcggggtattctactatgttaagatgccgttcagactgataaccgcaggaaatactttccagcgcacggtccagggcgcacttagcgaccaacttggaaacaatgtcgaggcctacgtcgatgacattgttgtcaagaccaagacaagcgactcattgattgacgatctgcgggaaacgttcgacaacctccgacgatatcgcctcatgctcaatccagagaagtgcacgttcggagtaccatcgggcaagctactcggttttctcatctctagcagaggaatagaagcaaatcccgagaagatcaaggcaatcgataatatgaagtcgcccacaagactcaaggaagtacagaagctatccggatgcatggcggcactaagtaggtttgtcgctaggatgggagagcgaggacaacctttcttcgctctactcaagaaacaaaacaaatttatatggacataggaagccgaagaggcattcattgcactcaagtgctaactatcaaatccccctatacttgttgctccccaacctaatgaagaattatttctctatattgtcgccacgccatattccgttagcactgtcattgtcgtcgagagagagaaggtacaacgaccaatctactacatcagcgaagctctccacgacgcaaagacaagatatccacagatccaaaaactgctctacgcggtaatcatgacatcaagaaagctacgccactacttccaaacccacaggggagcaggggcaggattcatcttgacatcaccttcaggagatcaattcaagcatgcaattcacctcaacttcaaagcgaccaataacacagccgagtacgaaggactactcgccgggataagagctgcagccacactcgtcgtgaaaggggattccgaactagtcgcgaaccaggtgcacaaagactataagtgctctagccccgagttatccaagtatctcgcagaagtcaggaagctggaaaaaaggttcgatgggatcgaggtccgacacgtataccgtaaggacaacatcgagccggatgatctagcatggcgtgcatccagacgagagccactcgaacccggtactcttctggacgtcctgacaaagccatcagtgaaagaggcaagcgacgaagatagcccagtcgcccccgacatcagcttgggggctacagaggcagagcgcgccgttgccgatatcgagaccacagatgactggcgcaccccactgatgaaattcatatgcagcgaagagttgcccgaggacgacgaagaagccgacaaaataacctgtaaagcaaaaatctactgtatgatcggcaacgatctatacaagaaagcgccaaatggggtacttctcaaatgcgtctcgtccgacgacgatagacatctcctcctcgacatacatgaagggatctgcgggtcacacgcagccggtcgcacattggttggaaaagcttttcggcaagggtttttctggccaaccgccctcaaagacgcttgcgacatgtaaacacacaaagctaccagcgcaagcactccagactatccctcttacttggccgttctcgtcctgggggctcgacatactcggaccattcccacgaggatagggcggctacaggttcctattcgtggcgatcgacaaattcactaagtggatcgaagcgacacccacggggaaaatcaaggccgacgccatcaaattcatcaaagggatattttgcagatatggactgccgcaccacatcataaccgacaacggctcccagttcattagcgccgacttccaggattattgtatcgggctgggagtcaagatctgctttgcctcggtttctcaccctcagagcaacggataggtcgagagggcaaatggcatagtactagaaggaatgaagaccctactatgggccgtgcgtaccacaccgacaacgtctaacaaggaaacacccttcttcctcgtgtacagctcagaggccatgctccccaccgagctacgacatcaaagtacacgagtacagaagtatttcgatgagaatcaggaggagcagtgaaacgacgatgtgaatctactcgaggaacatcgtgaacgagttgtcgtccgagaaaccagctaccaacaggcccttcgccgttaccacgagaagcgcatccgagcacgcacgcttttgatcggtgactacgtcctccgacgggttcaaagccaagcagggcgaaacaagctctcacccaaatgggaaggaccgtacacgatcacacatgtcttgcggccaggcgcattcaaaattgcagacggcgatggtcgtgagatggcaaatttctggaacattgatcaattacgtaaattctatgta

SEQ ID NO: 35803 - DNA, 534 bp, Oryza sativa
  Clone ID: PAT_MRT4530_39690C.1
atggccttacctgagcacatgggctccagtatagccgtggcgatttctggatcactcgatccccacaaagattcgtgccgtgatagtttacatgatatgaatcaagcacgaccccggatcagccggggtcgcccgctggttgccaccacccccttgccgctgctactgagtgtcgtcatgctccctcaaccagatgccatcacatctattagcgagaaagacaggatcgtcggatccagtggccctaacttctttgctggtggatccgactggctggagacaagaagcacgagccatcgcgggattggccaaggaagatgggaagatgggaagtgtggtgtgagcaacaccggatacgagcgggatccaaacgacaatggcaacagtgagcaaatcccgacgatgatgactatgacgagcaggatccaaatggcaatggtggtaataagcggagcggctacggttggatcaggcgatcatggcattaagctctcccacagcggccagatccagcgagaaacggaggtagtatag

SEQ ID NO: 35804 - DNA, 375 bp, Oryza sativa
  Clone ID: PAT_MRT4530_39691C.1
ttttttttttttttttttttttttttttttttttttttttttttttttttttttttttttttttttttttttttttttttgaacaaacaaaaattgcgaatttaaaaaccaactccaggggagggggtttgcatggaccatggattactagccatccaaattcctcgaatttttttggcacaaccaactttgcaaagggggatttactgggggggaatgaaccccctccttgagggaaatggcccattcgacatttacagaggaagggggcaatgaaaattgcagggataacggccgatccccaaaagaacttatacaattttttttttcccctaggatatgattattagagcttgttaggatttccgaagggac

SEQ ID NO: 35805 - DNA, 356 bp, Oryza sativa
  unsure (1)..(356): unsure at all n locations
  Clone ID: PAT_MRT4530_39692C.1
gaagaacaacccaaatctcaatagctgctggttgctagtactaataagctctaataactatgggtttgagccatggatctggatcgaggagctgatgaacaaaagagaaggtaaaaaaaagaaaaaaaaactaacctgacaaatatatatgtgtttataagcagtacanactcatgtgtcactcgagtgtatagacatgccccagatccatggctcacacggctttacagtaacagatgatgcagcaccaccgggaaggtatgtatggttttttatatgtcaccccgtttgtttcacttcttcctcggcttggcgcggcgcgacgtcgccgacgacgacgagccggagccggagaa

SEQ ID NO: 35806 - DNA, 447 bp, Oryza sativa
  unsure (1)..(447): unsure at all n locations
  Clone ID: PAT_MRT4530_39693C.1
actcctggttactgtctggattggggcatggaactcgcgtcttgtatcggtagtcatgtaggtgttgatttttgtttgtccatgcatgtccacttatatatacacaggaaatccaaatttgccataaatctggataccttgtttatttgtttaccacggatgacnatggattaacatgcaaggctgtaaactagtaggggtgacatactatacnatcattttctcttgtggtcttgttgcacttgtatgaaattgctaaactcttttgctgattcatgctatagacatataggcggtggcaactagacatcaggctgactctctacatttatgtggatcatattttaagagaatgaattttatgtatagtatcatatgatgtaacatcttttttttctgaagattaatgtaacatgtaattggctcgctcaaaaaaaaaaaaaaaaa

SEQ ID NO: 35807 - DNA, 2526 bp, Oryza sativa
  Clone ID: PAT_MRT4530_39694C.1
atgtcgcagcactctttccgcctccaaaccactggagcagccgcagcaagcaacctcttcttcttgttctttcgccgcctcacaaatcacaatccccccggaaaagagaaaatgtcatctagttatgatgaagggaaaagttttgctcggagggaccttttgcttaagatccaatctgaagtgcaaaaatgttgggaagagaacaaggttttcgaagcaaaggctggtgatacacctccaagccctggtgaaaaattctttgggaatttcacatacccatacatgaatggcatgctacatttaggccatgccttcacactatcgaagcttgagtttgctgcagcataccacagactccatggctcaaatgtccttttaccctttgctttccactgtactggaatgccaatcaagccatcagctgataagcttggtaaagagatacaacagtatggaaatcctccagtgctcccacctgccaacaaaaactcaaaatttgagttgacaaatgatagaatttatggccagaccactgctagtgcccaagataagtacaggagcaagagatctaagtcagtagcaaaatctggctcatacaaatcccagtgggagatcatgaggagctttggcattgctgatggagagattgtggaatttcaaaatcttcatcattggttaagctactttcctccgctggccatggaagatctcgaggattttgggctaagttgtgattggaggcgttcatttataaccactgatatgaatccattttatgatgcttttgtccaatggcagatgagaaagttgaagaaaatgcacaggattgtcaaaggcaagcagtacatgatctactccccattagatcgccaaccttgtcttggccatgatcgggcatcaggtgaagaggtcgagccacaggaatatgtactgattaagatgaaggttattccgccatttccacccaagttgatggtcctggaaggcagaaatgtgtatttggccgcagcaacactcagacctgagacaatatatggtcaaaccgggggcgaagctacagcaagagctgcacgtaatcttgcttaccagatgctatccagagttccagaaaagccaacttgcttagttgagctgcttggcacagatctgattggtttgccattgaagtcacctcttgcctccaacgaagtcatatatgttcttccaatgcagaacatattagtagataaaggcactggaattgtgactagtgttccaagtgatacaccggatgatttcatcgcattacaagagttggtaaaaaatcaagattttagagtggcatgtggagtgaaagatgagtgggttttcccctttgaagttataccaataattgatgttccaagttttggaaataaatcagcagagaaggtttgttttgatctgaaaatggatagtccagatgagaaagaaaaacttgctaaagcaaaagagatcacatatttgaaaggcttcgatgatggcataatgattgttggtgagtttagcaaccgaaaggttcaagaagtgaagccattgataaaggaaaagctattgaaggcagatatggctgttttgtactatgagcctcaggagaaggtcatttccaggtcaggtgatgactgtgttgttgctctcacagatcaatggctcataacatatggtgaggctgaatggaaacaaaaggctatagaatgcttggacaagatgaatacattctcagttgaagcccgtaatagttttgagcacacattgaactggctgacttcacgggcccgttcatgttcttttggactaggtactcggattccatgggatgagaagtttcttgtagattctctttctgattcaactttgtacatggcctactacaccattgcacatatactgcaaaatggtaacatttatggatctgacaactcttatataaggccagaacaaatgactgatgaagtatgggattatgtgttctgtaatggtccggcaccaaaaactagcatcccctctactgttttgacaaaaatgaagcaagagtttgagtactggtatcccttcgatcttcgaatttcaggtaaggaccttatgcagaaccatctggccttctgtatcttcaatcacacaacacttcttccaaaacatcattggccccgcggattccgttgcaacagacaccttctgcttaattctgagaagatgtctaagtccacaggaaatttcaggacccttcgacaggccatagaggaattttcgtctgatgccactaggtttgcacttgctgatgttggtgacggtatggatgatgaaaactttgtctctgagactgcaaattctgctgcactaagactgacaaaagaaatttcatggatgaaagaagtttttgatgataaatcttcctttcgacttgggccaccatctacttatgctgatcgcgtctttgctaacgagataaactttgccatcaaagacacggaaataattatgatgcttccatgttttgagatgctctaa

SEQ ID NO: 35808 - DNA, 397 bp, Oryza sativa
  Clone ID: PAT_MRT4530_39695C.1
cgtttcctgtaaacccggaaccctaaccatagcgggctttctaacggtcaccgggggggttcgacggcggatcatctcgatggcctcctggaccacgacgacaaaagacgcactgcgccggatcgatgctagaaagggaagaggacgtggacacgcatgcgctggcagcactgtcgctgatggtggggttggaaactgaggtcaacgcctaggtggatgccgtggtcgaggtgctcaaggcgctcaaggtggaggcaagagccgccacacggaggcttgaggcggccatcggggctaccgggctagaaggcagagacctgctggaggacatgcgccagacgcgggggaacacgctggagaggaagctgatctacatatgttgctgaagatctacgag

SEQ ID NO: 35809 - DNA, 479 bp, Oryza sativa
  Clone ID: PAT_MRT4530_39696C.1
attggcccctactgttttctaaaccttataaaacgagctacacactccaattcacgagattaacaaaggatccggccttttctgtacgatatggataatacacccaaggaacgcgagtactcacccggcaattgctagtccgtaatgcttagaagtaacactggataactaacatactgtgaattatggaaaacagggcgctactgtttgacatacctcctgggaacggtgaatcagcacttgatatcatctatcaggcatttgcaacgttccactgatacgggttattggcgcctatgaatcctgtcattttaacaaatacacatgctctactgccggaatgggttgacagcacatcatctttcattccaatccactatttcgttggaggcttcacggtcttacatctatcccgatcaatgccacacatatgcactgctccaagttttgctaactgtatgctggtacagcacaaactt

SEQ ID NO: 35810 - DNA, 334 bp, Oryza sativa
  Clone ID: PAT_MRT4530_39697C.1
ggacattgattttgagaaatttaaagggagtttttttttaaacatgggcttttaaggaaaaaaacatttttataaaagtttcacctaaaaatttatttatatttccggaaaaggcgttttggcttattagaaaaaaagccaaacgattgggacctcggggtttcggacccttggtgacggggaggggccgtttgggcccttttaaccgggggggaactggggaggatcataaaaaacgggcaaaaggtccttcattatccaccacacacggggggaccaggcatgagttgaaggggtaaaacaagtaaaaatttggggtttggccattgggggg

SEQ ID NO: 35811 - DNA, 499 bp, Oryza sativa
  Clone ID: PAT_MRT4530_39698C.1
cccacgcgtccgaagaaccctcgcctccgttggacgccggagctccacctctccttcgtccgcgccgtcgacaggctcggtggccaagatcgcgcaactcctaagctcgttcttcagctgatgaatgttagagggcttagcataggccatgtcaagagccatctccagatgtataggagcaagaagatcgatgagtccggccaggtgataggtggtgagtcatggagatcagatgatcacctgcttgttggatcaaaaccctattacccaccagcagctgaagctgaagctcctttccgcagatcaagtgctagtgagggtagtaaccatcaagaaggccctcttaatctggatctctcactcgatatctgtccgcggggcgagaagaggaagagagaatgcagctggaggaaacaagaggaagatcatgatcatgctactgttgctattggtgctgatcaagaagcagagagttgtgctactgggctctctctttctt

SEQ ID NO: 35812 - DNA, 1518 bp, Oryza sativa
  Clone ID: PAT_MRT4530_39699C.1
cggcagcggcacggggaccgcagctccggcgcctcagctccagcttcagctttgggcttctcctatagcctcttttgacatcatatcagtgcagtggccggcggcgatatcatgcagcagcagcaacgagactagagctctcttcatcatcatatcgtcaagctgccatagatcgatcagagctggctgctggccggccggtgatccttcctataatttcctagctatgggaagtgcaggcaaggaggaggaggaggaggacggcggcggcggtgcaccggcggcggcggccaacaactacgggagctcgacgacgagcagtactacggaggaggagggatccggggagagcaggcggcgcacgtcgtcgtcgtcgtcggtgcgcccctacgtccgctccaagaaccctcgcctccgttggacgccggagctccacctctccttcgtccgcgccgtcgacaggctcggtggccaagatcgcgcaactcctaagctcgttcttcagctgatgaatgttagagggcttagcataggccatgtcaagagccatctccagatgtataggagcaagaagatcgatgagtccggccaggtgataggtggtgagtcatggagatcagatgatcatctgcaaatgcaaggtggtggccatgggggacaagcgtacaaccttggccatctttccctgcctgctctccatcatcgctctatcactgctggctccggtaccatcttccagtccaggtttggcaattcatggtccccatggagatgtcatggatcatactggctccctgcaggccatcacctgcttgttggatcaaaaccctattacccaccagcagctgaagctgaagctcctttccgcagatcaagtgctaggtatgtagctagagctaataccagcaaccatccagattttgtccaaggctcttcttcatctccagatgataatatcatgaaccatcaaagaccagttctgaaagagatgatctgcagtgagggtagtaaccatcaagaaggccctcttaatctggatctctcactcgatatctgtccgcggggcgagaagaggaagagagaatgcagctggaggaaacaagaggaagatcatgatcatgctactgttgctattggtgctgatcaagaagcagagagttgtgctactgggctctctctttctttgttctgatcatgtctcccctgttgaaagatgcaccatcactagtcctaccagtactatattgctgtactggcctggtgatatatcactagctagctatagtagctagatatcatatgttattgtggatgataaatcaaattagggaagaaaactcatgcagcagggacaagtactcttcatctcaccatatgactacactgtggtgatattttgtggtacttgtccttttatgcatgtatctagaggaagataaatatttattatgcatttcggttgttcattatccttcatatattttgactcattaatctagctgatatcccgattaatct

SEQ ID NO: 35813 - DNA, 1009 bp, Oryza sativa
  Clone ID: PAT_MRT4530_3969C.1
gcgcgacgacccaaaccgagcgcagcgcacggaccgagatctgcgcccggcagcggcggcgaactccggtgaaccaaccatggccgtggacctgatgggctgctacgccccgcgccgcgcagacgaccagctcgccatccaggaggcggccaccgccggcctccgcagcctggagatgctcgtgtcgtccctctcctcctcctctcaggccgccggggctcacaaggcctcgccgcagcagcagccgttcggcgagatcgccgaccaggccgtctccaagttccgcaaggtcatctccatcctcgaccgcaccggccacgcccgcttccgccgcggcccggtcgagtcgtctgctcccgccgcccccgtcgctgctgctccccctcctcctcctccaccaccggcgccggtcgctgccgccctcgcgccgacttcctcgcagccgcagaccctgacgctggacttcacgaagccgaacctgaccatgtcggccgcgacgtccgtgacatccacgtcgttcttctcgtcggtgacggccggcgagggaagcgtttccaagggccggagcctgctctcctccggcaagccgccgctgtctgggcacaagcggaagccctgcgccggcggccactccgaggccaccgccaacggcggccgctgccactgctccaagagaaggaagaaccgggtgaagaggacgatccgagtgccggcaatcagctcgaagatcgccgacatcccgccggacgaatactcgtggaggaagtacggccagaaacccatcaagggctccccttacccacggggctactacaagtgcagcacagtgagaggatgccccgcgcggaagcacgtggagcgcgccaccgacgacccggcgatgctggtcgtgacctacgagggcgagcaccgccacacgccggggcccctcccggcgccacccgccgccgccgccgtcgccgcgatgccggtgtccgtcgccgtgtccaccggcaacggacatgtctaa

SEQ ID NO: 35814 - DNA, 547 bp, Oryza sativa
  unsure (1)..(547): unsure at all n locations
  Clone ID: PAT_MRT4530_396C.1
cgtgcacgggggttcttccactcgtgccatccatggtggttgcatcacatgtcacatccttgcataccacgggtttgaataatgattggatgtgagtagagtaccatggttgtgttgattgtgcttgggacaatcaaggaccggttcgcgagttactgttgtcacagtattcatcgtactaaccataagctacccatgggtaatggctaaatctgtagtatgacatgtcccnatagaaggtgccatgatgtgttgtttcagatcgcagattataagatcatagtggcagaatataaatccatattatattttaggcgctaagtagtttccttgtctaagagtaattggccaccccctaatggaaacagatttgcttagtgcgtgttcactttgttgggtgtatagtgtgaagggtcttgtcacgtccttcatgttgagtatcaaagtcatgggttgtgagataaatacttgccttgtgggtaaatttgtatacctccgttcagaataaaattattcgaatagccgtgcctgtaaaaaaaaaaaaaaa

SEQ ID NO: 35815 - DNA, 815 bp, Oryza sativa
  Clone ID: PAT_MRT4530_39700C.1
ccggccggacggtaataaccaacttattctccattcctccgggaagaagaagaagaagaagctggcgactcgccattgattccggccgccgccgccccgctcccccctcgatcggtcgatccggtgatggggctgctgttcgtggagctgctcccgcggcacggcgacgggggaggccccgcgtcggcggtgctcaagtgccgccggtgccgcgtcgacgccgcctccgccgacgccatcctctcacgggacttccgcggccgattcggccgcgcctacctcttcgaccacgtggtgaatatatccttagggcctaatgaggatcggtatctgatgaccggactgcatacggtgaaagatatctactgtagctgttgccagcaaattctcggctggagatatgagaaagcatacgaagagagcgagaagtacaaggaaggcaagttcatcctggagaaggccaggatgtggaaagaagcccggtgaaaaagactggcgccatggaactcatcaacctgtatgtatgtattttgtgtagatccaaaacaattcaaagattgtaacaacaactttggcggcgatcaaagtttgtatgcatgctgtagttgctcatgcagtactagaccccctcaaaagaagagatgaaaacagctgcgtctgatttgggggggacgaagattgacaacagaagtagagcatcactgtctttttgatgcaaattctggcactttggtggtaacggttttaaccgaaaaatgatgaagtgccagagattaacatttgattagtgcttttggccactcatggcgcagttc

SEQ ID NO: 35816 - DNA, 552 bp, Oryza sativa
  unsure (1)..(552): unsure at all n locations
  Clone ID: PAT_MRT4530_39701C.1
cgttcttcagctgatgaatgttagagggcttagcataggccatgtcaagagccatctccagatgtataggagcaagaagatcgatgagtccggccaggtgataggtggtgagtcatggagatcagatgatcacctgcttgttggatcaaaaccctattacccaccagcagctgaagctgaagctcctttccgcagatcaagtgctaggtatgtagctagagctaataccagcaaccatccagattttgtccaaggctcttcttcatctccagatgataatatcatgaaccatcaaagaccagttctgaaagagatgatctgcagtgagggtagtaaccatcaagaaggccctcttaatctggatctctcactcgatatctgtccgcggngcgagaagaggaagagagaatgcagctggaggaaacaagaggaagatcatgatcatgctactgttgctattggtgctgatcaagaagcaaagagttgtgctactgggctctctctttcttggtctgatcatgtctnccctgttgaaagatgcaccatcactag

SEQ ID NO: 35817 - DNA, 1476 bp, Oryza sativa
  Clone ID: PAT_MRT4530_39702C.1
ttctcaatggttgcagaccattgatttgtttggatggttgccacattaatacaaagtatggtggacaattgctaactgcagttggtatggggccaaatgactgtatatatccaattgcctttgctgtagtggaggttgaatctctggctacatggaaatggttcttggagacactgaaaaatgatctaggcatcgaaaacacatatccttggactataatgactgataagcagaagcttcagtttaagggagaagtactgaagaatcaattgtgggcatgtgctaggtcatcttctgtccaagaatggaacaaaaatatggatgtgatgagaaatttgaacaagagtgcttatgaatggcttgaaaagttgcctccaaacacatgggtcagagctttcttctcagaattccctaagtgtgatatattactaaataataattgcgaggtttttaacaaatacattctagaagctagagaattacctattttgactatgctagagaagataaaaggacaactcatgactaggcatttcaataaacaaaaagagttggctgatcagttccaaggcttaatctgccccaaaattaggaagaaggtgctgaaaaatgcagatgcagctaatacatgttatgcattaccagctgggcagggaatatttcaagtgcatgaaagggaatatcagtacatagtggatatcaatgctatgtattgtgattgcaggaggtgggacttgacagggattccatgtaatcatgccatatcctgtcttaggcatgagaggataaatgctgaaagtattctccctaattgctacactacagatgcattcagtaaagcctatggtttcaacatttggccctgcaatgacaagagcaaatgggaaaatgtcaatggtcctgagattaagccacctgtgtatgagaagaaggctggcaggcccaaaaagtctaggagaaaggcaccatatgaagtaattggcaaaaatggtccaaagctgacaaaacatggagtgatgatgcactacaagtattgtggagaagaaaatcacaactcagggggttgtaaactaaagaagcagggcatcagttctgaggaggcaaagaggatggttgccacagcaaaagaatcacttgcaatggagattcaacaaaatatcattgaacaagaaccaaatgttatcaaccagtacttcatctcaactactatcacagctaggaagcactgtttttagtcagatggctgatcagccaaatcaaagttctgtgctatctcaacaacaaggcccattgccagatcctgcctttatcatgtctaacattccatcagcaaggccagctcctcttacaaccaacaccaaattagggaagtcagtggcactgaagaaaagaaagaccacaactggaaacaagaagtctgcaagtgccgcatcaaaaaagaagcctgcacctgggattggaacaaattaatgccta

SEQ ID NO: 35818 - DNA, 945 bp, Oryza sativa
  Clone ID: PAT_MRT4530_39703C.1
atggaaaaaactagtgcaggcaaggaggagggctccgagagtaagacggcggcggccaacaacgatgggagctcgacgagcagtactacggaggaggaggaatccggggagagccagcggcgcacgtcgtcgtcgtcgtcggtgcgcccctacatccgctccaagaaccctcgcctccgctggacgccggagctccatctctccttcgtccgcgccgtcgacaggctcggcggccaagatcgtgcaactcctaagctcgttcttcagttgatgaatgttagagggcttagcataggccatgtcaagagccatctccagatgtatagaagcaagaagatcgatgagtctggccaggtgataggtggtggctcatggagatcttcagatgaacagcagtatcatcatctgcaaatgcaaggtggtggtgacgggggacaagcgtacaaccttggccatctttccttgcctgcagctcttcatcatcgccacatcactgctggctccggtaccatcttgcagtccagggttgccaatgcatggtccccatggagatgccatggatcatactggctccgtgcaggccatcacctgcttgttggatcaaaaccctattacccaccaccaccagctgaagctagagctaataccagcagcaaccatccagattttgtccaaggctcttcttcatctccagatgatcataccatgaaccatcaaagaccagtagtgctgaaagagatgatctacaatgagggtagtaaccatcaaggaggtcctcttaatctcgatctctcactcgatatctgtccgcggggcgagaagaggaagagagaattgatcagctggaggaaacatgaggaagatcatgatcatactactattgctattggtggtgatcaagaagcagagagttgtgctactgggctctctctttctttgttctga

SEQ ID NO: 35819 - DNA, 2946 bp, Oryza sativa
  Clone ID: PAT_MRT4530_39704C.1
atggtggcaagattgcgtcgactaggtggagacgcgcctgtgtacggtgatgggtcagatgagttcacagtgaaggttcaccatgggggttttttcgttgggcatggtaatctccgttcttatttgaatggaaaagtgagttggtttgataatgtcgagatagacacttggtctccactatggctggaccagttcgttgaggatcttggataccttaggactcccaccttgaagatttattggctgttacctggtaaggacatttcagatgggttaagagtggtggttagtgatacttatacaaatgtgatggcatcaatggttgaaaagttcaggaccttagttgtatatattgaccatgatgacaaagttgcagggattgactgggatgatatcatagacaatccaggtacacctttaccaaaggtaatcagccccaataaggtgaattgtgtagagaagataataggtgagagcagcaaacagcaagagggtaatcttaaggagcagagtagcaggcaacaacaaggaagcaggcagcaacagagcaatctaaaagagcataacaacagggagcaacaagaagatgattgtgatgaagaagacagtgggacaaagagtgatgacagtgatgaggaattctatgatagtgactatgaattagatgatggtgatgatgacttgtttgttgattatgttgatgaaaatgtgatagatgagggggtggccaaaggaaagaaaatattgaagggaaagaaagccagaggaagcaggttgaagggaaatcttgcaattgtgcctagaggagatgaaagtgaagatactgatgaggaagagcttaatgcagcagattctgatgatgagggtgtcaggctcaagttcaagtcatttgcagaagaggacttgaacaatcctaatttcaaggttggtcttgttttcccatctgttaagaagttgagacaagcaattactgagtacagtgtaaggaatagggttgagatcaagatgcctagaaatgataggaggaggataagagctcattgtgaagaaggttgcccatggaatctttatacttcagaagacagtagagctaaagcttttgtggtgaagacttatgatgagagacatacctgtcaaaaagagtggattctcaaaaggtgcacatccaaatggttggctggaaagtatatagaagcatttagggctgatgagaaaatgagcctaactagttttgcaaagacagtgcaactgcagtggaacttgacaccatctaggagcaaattagctagagctagaaggattgcaatgaagaccatacatggagatgaggttgagcagtacaagcttttgtgggattatggcaaaaaattgaggagaagcaatcctgggacttctttcttcctaagcttgatgacaaagtatggtggacaattgctaactgcagttggtatggatccaaatgactgtatatatccaattgcctttgctgtagtggaggttgaatctctggctacatggaaatggttcttggagacactgaaaaatgatctaggcatcgaaaacacatatccttggactataatgactgataagcagaaggggttaataccagctgtccaacaggtcttcccagagtctgaacataggttctgtgttaggcatctgtactcaaactttcagcttcagtttaagggagaagtaccgaagaatcaattgtgggcatgtgctaggtcatcttctgtccaagaatggaacaaaaatatggatgtgatgagaaatttgaacaagagtgcttatgaatggcttgaaaagttgcctccaaacacatgggtcagagctttcttctcagaattccctaagtgtgatatattactaaataataattgcgaggtttttaacaaatacattctagaagctagagaattacctattttgactatgctagagaagataaaaggacaactcatgactaggcatttcaataaacaaaaagagttggctgatcagttccaaggcttaatctgccccaaaattaggaagaaggtgctgaaaaatgcagatgcagctaatacatgttatgcattaccagctgggcagggaatatttcaagtgcatgaaagggaatatcagtacatagtggatatcaatgctatgcattgtgattgcaggaggtgggacttgacagggattccatgtaatcatgccatatcctgtcttaggcatgagaggataaatgctgaaagtattctccctaattgctacactacagatgcattcagtaaagcctatggtttcaacatttggccctgcaatgacaagagcaaatgggaaaatatcaatggtcctgagattaagccacctgtgtatgagaagaaggctggcaggcccaaaaagtctaggagaaaggcaccatatgaagtaattggcaaaaatggtccaaagctgacaaaacatggagtgatgatgcactgcaagtattgtggagaagaaaatcacaactcagggggttgtaaactaaagaagcagggcatcagttctgaggaggcaaagaggatggttgccacagcaaaagaatcacttgcaatggagattcaacaaaatatcactgaacaagaaccaaatgttatcaaccaggatgtcatagatgaacatattgctgcttctcagacttcatctcaactactatcacagctaggaagcactgtttttagtcagatggctgatcagccaaatcaaagttctgtgctatctcaacaactaggcccattgccagatcctgcctttatcatgtctaacattccatcagcaaggccagctcctcttacaaccaacaccaaattagggaagtcagtggcactgaagaaaagaaagaccacaactggaaacaagaagtctgcaagtgccgcatcaaaaaagaagcctgcacctgggattggaacaaattaa

SEQ ID NO: 35820 - DNA, 948 bp, Oryza sativa
  Clone ID: PAT_MRT4530_39705C.1
atggtggcaagattgcgtcgactaggtggagacgcgcctgtgtacggtgatgggtcagatgagttcacagtgaaggttcaccgtgggggttttttcgttgggcatggtaatctccgttcttatttgaatggcaaagtgagttggtttgataatgtcgagatagacacttggtctccactatggctggaccagttcgttgaggatcttggataccttaggactcccaccttgaagatttattggctgttacctggtaaggacatttcagatgggttaagagtggtggttagtgatactgatacaaatgtgatggcatcaatggttgaaaagttcaggaccttagttgtatatattgaccatgatgacaaagttgcagggattgactgggatgatatcatagacaatccaggtacacctttaccaaaggttatcagccccaataaagttatatgtgtagagaagataataaggagcagaagtagcagccaacaacagggaacaaggcagccacagagcaatctaaaagagcataacaacagggagcaacaagaagatgattgtgatgaagaagacagtgggacagagagtgatgacagtgatgaggaattctatgatagtgactatgaattagatgatggtgatgatgacttgtttgttgattatgttgatgaaaatgtgatagatgagggggtggccaaaggaaagaaaatattgaagggaaagaaagccagaggaagcaggttgaagggaaatcttgcaattgtgcctagaggagatgaaagtgaagatactgatgaggaagagcttaatgcagcagattctgatgatgagggtgtcaggctcaagttcaagtcatttgcagaagaggacttgaacaatcctaatttcaaggttggtcttgttttcccatctgttgagaagttgagacaagcaattactgagtacagt

SEQ ID NO: 35821 - DNA, 228 bp, Oryza sativa
  Clone ID: PAT_MRT4530_39706C.1
attcgctccttctgcaggcgctacctaccgacagtcagggatgcgagctccgtggacgacaactacttgattcgcatcaaatcctctggcgtagtaccaagggcgacatacacagcttgcatctcgtaggtacaactaaacactacgttgtctttccgacatattagatcgatatagcagcgaatgtcgcatcttctattgtagcgaatctggacaagatgagcatat

SEQ ID NO: 35822 - DNA, 2982 bp, Oryza sativa
  Clone ID: PAT_MRT4530_39707C.1
atggtggcaagattgcgtcgactaggtggagacgcgcctgtgtacggtgatgggtcagatgagttcacagtgaaggttcaccatgggggttttttcgttgggcatggtaatctccgttcttatttgaatggcaaagtgagttggtttgataatgtcgagatagacacttggtctccactatggctggaccagttcgttgaggatcttggataccttaggactcccaccttgaagatttattggctgttacctggtaaggacatttcagatgggttaagagtggtggttagtgatactgatacaaatgtgatggcatcaatggttgaaaagttcaggaccttagttgtatatattgaccatgatgacaaagttgcagggattgactgggatgatatcatagacaatccatgtacaccttttccactggtaatcagccccaataagagtagcaggcaacaccagggaagcaggcagcaacagagcaatctaaaagagcataccaacagggagcaacaagaagatgattgtgatgaagaagacagtgggacagagagtgatgacagtgatgaggaattctatgatagtgactatgaattagatgatggtgatgatgacttgtttgttgattatgttgatgaaaatgtgatagatgagggggtggccaaaggaaagaaaatattgaagggaaagaaagccagaggaagcaggttgaagggaaatcttgcaattgtgcctagaggagatgaaagtgaagatactgatgaggaagagcttaatgcagcagattctgatgatgagggtgtcaggctcaagttcaagtcatttgcagaagaggacttgaacaatcctaatttcaaggttggtcttgttttcccatctgttgagaagttgagacaagcaattactgagtacagtgtaaggaatagggttgagatcaagatgcctagaaatgataggaggaggataagagctcattgtgcagaaggttgcccatggaatctttatgcttcagaagacagtagagctaaagcttttgtggtgaagacttatgatgagagacatacctgtcaaaaagagtggattctcaaaaggtgcacatccaaatggttggctggaaagtatatagaagcatttagggctgatgagaaaatgagcctaactagttttgcaaagacagtgcagctgcagtggaacttgacaccatctaggagcaaattagctagagctagaaggattgcaatgaagaccatgcatggagatgaggttgagcagtacaagcttttgtgggattatggcaaagaattgaggagaagcaatcctgggacttctttcttcctgaagcttgatggtagccttttcagccaatgctacatgtcaatggatgcttgcaagagagggtttctgaatggttgcagaccattgatttgtttggatggttgccacattaagacaaagtatggtggacaattgctaactgcagttggtatggatccaaatgactgtatatatccaattgcctttgctgtagtggaggttgaatctctggctacatggaaatggttcttggagacactgaaaaatgatctaggcatcgaaaacacatatccttggactataatgactgataagcagaaggggttaataccagctgtccaacaggtcttcccagagtctgaacataggttctgtgttaggcatctgtactcaaactttcagcttcagtttaagggagaagtactgaagaatcaattgtgggcatgtgctaggtcatcttctgtccaagaatggaacaaaaatatggatgtgatgagaaatttaaacaagagtgcttatgaatggattgaaaagttgcctccaaacacatgggtcagagctttcttctcagaattccctaagtgtgatatattactaaataataattgcgaggtttttaacaaatacattctagaagctagagaattacctattttgactatgctagagaagataaaaggacaactcatgactaggcatttcaataaacaaaaagagttggttgatcagttccaaggcttaatctgccccaaaattaggaagaaggtgctgaaaaatgcagatgcagctaatacatgttatgcattaccagctgggcagggaatatttcaagtgcatgaaagggaatatcagtacatagtggatatcaatgctatgcattgtgattgcaggaggtgggacttgacagggattccatgtaatcatgccatatcctgtcttaggcatgagaggataaatgctgaaagtattctccctaattgctacactacagatgcattcagtaaagcctatggtttcaacatttggccctgcaatgacaagagcaaatgggaaaatgtcaatggtcctgagattaagccacctgtgtatgagaagaaggctggcaggcccaaaaagtttaggagaaaggcaccatatgaagtaattggcaaaaatggtccaaagttgacaaaacatggagtgatgatgcactgcaagtattgtggagaagaaaatcacaactcagggggttgtaaactaaagaagcagggcatcagttctgaggaggcaaagaggatggttgccacagcaaaagaatcacttgcaatggagattcaacaaaatatcactgaacaagaaccaaatgttatcaaccaggatgtcatagatgaacatattgctgcttctcagacttcatctcaactactatcacagctaggaagcactgtttttagtcagatggctgatcagccaaatcaaagttctgtgctatctcaacaactaggcccattgccagatcctgcctttatcatgtctaacattccatcagcaaggccagctcctcttacaaccaacaccaaattagggaagtcagtggcactgaagaaaagaaagaccacaactggaaacaagaagtctgcaagtgccgcatcaaaaaagaagcctgcacctgggattggaacaaattga

SEQ ID NO: 35823 - DNA, 207 bp, Oryza sativa
  unsure (1)..(207): unsure at all n locations
  Clone ID: PAT_MRT4530_39708C.1
ccctttacaccgttgttaagccaaggccaggcctttgacgccagttgcatagttaagttagttgtcgtccnttgtttagtgtgtgttctcgtttggtgtcctgctgtattcaagagtcgcgcacacaagccatagcctgggcatgacaagtttttgttaataataatataatataaagatatgggctaaaaaaaaaaaaaaaaaaaa

SEQ ID NO: 35824 - DNA, 3093 bp, Oryza sativa
  Clone ID: PAT_MRT4530_39709C.1
atgttttgccgtacggcaaagctagggttttttgtttgcacaagtttacatgctgtatcgtggattgaaggatttgtttcttccttactaggtgatgggtcagatgagttcacagtgaaggttcaccatgggggttttttcgttgggcatggtaatctccgttcttatttgaatggcaaagtgagttggtttgataatgtcgagatagacacttggtctccactatggctggaccagttcgttgaggatcttggataccttaggactcccaccttgaagatttattggctgttacctggtaaggacatttcagatgggttaagagtggtggttagtgatactgatacaaatgtgatggcatcaatggttgaaaagttcaggaccttagttgtatatattgaccatgatgacaaagttgcagggattgactgggatgatatcatagacaatccaggtacacctttaccaaaggtaatcagccccaataaggtgaattgtgtagagaagataataggtgagagcagcaaacagcaagagggtaatcttaaggagcagagtagcaggcaacaacagggaagcaggcagcaacagagcaatctaaaagagcataacaacagggagcaacaagaagatgattgtgatgaagaagacagtgggacagagagtgatgacagtgatgaggaattctatgatagtgactatgaattagatgatggtgatgatgacttgtttgttgattatgttgatgaaaatgtgatagatgagggggtggccaaaggaaagaaaatattgaagggaaagaaagccagaggaagcaggttgaagggaaatcttgcaattgtgcctagaggagatgaaagtgaagatactgatgaggaagagcttaatgcagcagattctgatgatgagggtgtcaggctcaagttcaagtcatttgcagaagaggacttgaacaatcctaatttcaaggttggtcttgttttcccatctgttgagaagttgagacaagcaattactgagtacagtgtaaggaatagggttgagatcaagatgcctagaaatgataggaggaggataagagctcattgtgcagaaggttgcccatggaatctttatgcttcagaagacagtagagctaaagcttttgtggtgaagacttatgatgagagacatacctgtcaaaaagagtggattctcaaaaggtgcacatccaaatggttggctggaaagtatatagaagcatttagggctgatgagaaaatgagcctaactagttttgcaaagacagtgcagctgcagtggaacttgacaccatctaggagcaaattagctagagctagaaggattgcaatgaagaccatgcatggagatgaggttgagcagtacaagcttttgtgggattatggcaaagaattgaggagaagcaatcctgggacttctttcttcctgaagcttgatggtagccttttcagccaatgctacatgtcaatggatgcttgcaagagagggtttctgaatggttgcagaccattgatttgtttggatggttgccacattaagacaaagtatggtggacaattgctaactgcagttggtatggatccaaatgactgtatatatccaattgcctttgctgtagtggaggttgaatctctggctacatggaaatggttcttggagacactgaaaaatgatctaggcatcgaaaacacatatccttggactataatgactgataagcagaaggggttaataccagctgtccaacaggtcttcccagagtctgaacataggttctgtgttaggcatctgtactcaaactttcagcttcagtttaagggagaagtactgaagaatcaattgtgggcatgtgctaggtcatcttctgtccaagaatggaacaaaaatatggatgtgatgagaaatttaaacaagagtgcttatgaatggattgaaaagttgcctccaaacacatgggtcagagctttcttctcagaattccctaagtgtgatatattactaaataataattgcgaggtttttaacaaatacattctagaagctagagaattacctattttgactatgctagagaagataaaaggacaactcatgactaggcatttcaataaacaaaaagagttggttgatcagttccaaggcttaatctgccccaaaattaggaagaaggtgctgaaaaatgcagatgcagctaatacatgttatgcattaccagctgggcagggaatatttcaagtgcatgaaagggaatatcagtacatagtggatatcaatgctatgcattgtgattgcaggaggtgggacttgacagggattccatgtaatcatgccatatcctgtcttaggcatgagaggataaatgctgaaagtattctccctaattgctacactacagatgcattcagtaaagcctatggtttcaacatttggccctgcaatgacaagagcaaatgggaaaatgtcaatggtcctgagattaagccacctgtgtatgagaagaaggctggcaggcccaaaaagtttaggagaaaggcaccatatgaagtaattggcaaaaatggtccaaagttgacaaaacatggagtgatgatgcactgcaagtattgtggagaagaaaatcacaactcagggggttgtaaactaaagaagcagggcatcagttctgaggaggcaaagaggatggttgccacagcaaaagaatcacttgcaatggagattcaacaaaatatcactgaacaagaaccaaatgttatcaaccaggatgtcatagatgaacatattgctgcttctcagacttcatctcaactactatcacagctaggaagcactgtttttagtcagatggctgatcagccaaatcaaagttctgtgctatctcaacaactaggcccattgccagatcctgcctttatcatgtctaacattccatcagcaaggccagctcctcttacaaccaacaccaaattagggaagtcagtggcactgaagaaaagaaagaccacaactggaaacaagaagtctgcaagtgccgcatcaaaaaagaagcctgcacctgggattggaacaaattga

SEQ ID NO: 35825 - DNA, 696 bp, Oryza sativa
  Clone ID: PAT_MRT4530_3970C.1
atgacggggggaaatattccccgtgatcccctctccctttccccccaatttttcctcctctctcccttggattcgtttgaaaacctctcccctaatcccgccgacgccattgatggagcccgagaatgccgcgccagtttccttccttctccggccggccactcccccttccaaccctatttaaaccctccccgcacctcctccgtccgtttccgcctctcgccgcccttcctcctcgccggattcgagctcgcgacgtcgctctctctctccgccgtcgccgccgagctccggtccgccgccgtcgtcgccccggaccgcctcctacctcggcaccgcctccttcggcttcgccgcatcctcgccgacctcgtccacccctccgtttcggtcgccaaccgccggagcgccgccgaccccgttgacccgagccgcgccaccgcctccctccgctccggccgcctcctctgtcgccgccatcgccccggggtgagctgtggaccaccgcctcgtttcccccttcccttcccctctctcggccgctgctccgccgtgcctatggccgccgccggtgaccataggggtgcgggcgcgccgcctcccgccggccgcgccgacgtggccgtcttcgggcgcgccgagcggctgccgcgtggggcccggccgtcagccgcccgtgccctcgggtgcggctga

SEQ ID NO: 35826 - DNA, 150 bp, Oryza sativa
  Clone ID: PAT_MRT4530_39710C.1
atgtgtcacgcccgcatcactccagcggaattctaccttgtcacttctcaagggttgactggtgggccccacggtgaccggggtggagatcacctcgtcgccagcgccacttgtcaaccggagagcgaagctgttacatctgggcgctga

SEQ ID NO: 35827 - DNA, 5730 bp, Oryza sativa
  Clone ID: PAT_MRT4530_39711C.1
atggcgaggggcgtagcgcgcgcggcgtcgttcggtggccgcgccgcgaccgcgaggtggtgctcgtaccggcgcatcacggtagccgtctgcctcgggaacctcgtcgccgcgctcctcgtgctccgctccctcacctccctcgcccccacaccgcccaaacgtgaggaagtggtggagtatacggaggagcagattaggaaggcggaggagtcgatccggattcgccgcgaggcggagcccgtcgagcttgtcgaggcggtgaagaatctgcggaagattttcaggcgggaggagaagaggcggaaggagttgccactggagttgaagcagaaggtctcgtatgagattgtgcagctcctgctcgatttgggggataacagcagtttcgctcagcaacgagctcggttgagctctcagccagcagcagcaccggctgctcctccttcccctttccctcccccctctccacgcagcagccccccggaggtgcgccatttccgacgttcggttgcctcgagcactcggcgtcagcaggacgccgagctcgccgcagcagaagagcgcaggcgagcaacggctcagaccgctgcagcagcagcgagggcggctagactggcggcagcggagttggcagcagccagggcggaggcggaagcagaggtggcggaagatgcggcacgtgcggcggaggtagaggttgagaccttgcgcagcagcatcaatggctccatcgccggcgacatcaccgccgacagggagcttgaggagctagcaagaggaagggcacgggagcgggcagagcggtgggcagcagcccacctccacggcggcggcggcggccaaagggaccgtgcgcccgctgacgggaacccagatgggcgcgggcgtgtcggcggcagcacggagcccgcgcgctgccctcgcaggcagcgtgactctctctcccttgaccggcgccatggccaccacggcgtccagacggtggtcagggactttggtcccggcggtgggtggcctaccctcaccaaaaccaactacatcgagtgggccgcggtgatgagggtgaggctccaggtgcggcacatgtgggaggcagtatggtacggcgacgtcgactacgacgaggatcggcgggcactggatgccctcatcgctacagtcccgcccgagatgcagttctcgctttcccagaagcggactgccaaggaggcctgggatgccatcgctgcggcacgcatctgcagtgaccgcgcccgcaagtccacactgcaggcactccgcaaggagtgggagaacatggccttcaagccagagaagtacaggcagatcgctcgctcgatcgagtctcagctggacctctccacgatgtcgatcgaggaggcgttaggtcgcctcaaggtcgtcgacggtgatgagccacagcctctctcggggcctatcaccattggcgggaagctccatctcactcgggaccagtgggaggcctctcagggtgacgggaggaagggggagtcatcttccccgacaggcggccgtaagctgcgcaaggtgcggggaggtgtccagctacggtgggcgcgaagacgtgccgagggtggcgcccgcagaggcgcccaaggcggcgccaccggcaaccacaagccggcacgagacgacgcctaccgcaactgtggcaagcttggccattgggccaaagactgtcgacagccacgacgcggccaggcccacgtcgcacgtgtggaggaggaagagccggctctgctcctggctcacgcaagcatcgagctacctccaacggcaccggccgcagcagtttttctccaccttgatgagccgaaggtactcgtctccctctgcaacggctctagcaacgacaaggctgatgggtggtacctcgacaccggcgccacccatcacatgaccggccgacgggagttcttcaccgagttcgactccagcgtccgaggctccgtcaagtttggggacgcctccggcgtggagatcaagggcgttggctccgtcaccttcaccgccaagtccggtgagcacaggttgctcaccggagtctactacatccccgcgttgaggaattctatcatcagcgtgggacagctggatgagaacggctcacgcgtgttggtcgaggacggtctcatgaggatttgggatcgccgtcgtcgccttcttgccaaggttgcacaaccagtttgcctcgccgctcgtcgagacgatgaggcgtggcagtggcacgagcgcttcgggcacctccacttcgaggcgttgaagcggctcaatgccaaggagatggtgcgaggcatgccgtgccttgaccacgtggagcaactctgcgacgtctgcgtggtaacgaagcaacggcgactcccctttccccagcagacgagcttccgagccaaggagcggctcgagctcgtgcacggggacttgtgtggcccagtgacaccggccacaccaggaggacgacgttacttcctgctgctcgtcgacgacctctcccgctacatgtgggtgatggtcctcgacagcaagggagaggctgcggacgccatcaggcgcgcgcaggctgctgcagaggcggagtgtggccgcaagctgcgcgtgctgcgcaccgacaacggcggcgaattcacggcggctgaatttgcttcgtactgcgctgatgagggcattcagcgccactacatcgcgccgtacagcccgcagcagaacgacgtcgtcgagcggcgcaaccagacggtggtggggatggctcgggctctcctcaagcagagggggatgccggccatcttctggggagaggcggtggtgacggccgtctatatcctcaaccgctctcctaccaagaccctcgatggcaggacaccgtacgaggcatggcatgggcgcaagccggcggtctcccacctgcgggtcttcggctacctcgcgttcgccaaggagcttggccacatcggcaagctcgacgacaggagcaccccaggggtgttcatcggctacgcggagggctcgaaggcctaccgcatcctcgacccggagacacatcgtgtgcgcacagcgcgcgacgtagtgttcgacgaagggcgagggtgggtatgggacaaggcggtggacgatggttcgactccgacgtacgacgacttcaccatcgagtacgtccacttcgagggagctgggggagtaggcagctcttcttcaccgagcgtgtctaccccagtccccgagcctccaccgactccgacatcaacacatcctcgggccacgacttcgactacgacgagctcttcgccgacaccaccccagccggtgaccccacgcactccagcaccaacagccactcctccaggcacgtatactcagacgccagctcgtgttgagcgcagcccggtggagttcgctactccgctctcccacgacggggagcgcatcgacgcataccacgacggcgagcagctacggtaccgtacgatggaggatcttctcggcgaccagccggtgccgggactggtgcctcgcgacctggaggcgcagttacaccttgcgtgcgacgacggtgagcctcggtcttttgcagaggccgagaaacacgcggcatggcgtgccgcgatgcagtcggagatggacgcggttcaggagaaccgcacctgggagcttgttgacctccctcgtggtcaccgcacgatcacccttaagtgggtgttcaagctgaagagggatgaagccggagccatcgtcaagcacaaggctcgcttggtggcacgcggtttcgtgcagcaagaggggatcgactacgacgatgccttcgctcccgtggcacggatggagtccgtgcgactccttgcgctggctactcaggaaggctggggcgtccatcacatggacgtcaagtcggcgtttctgaacggcgacttgaaggaggaggtctacgtgcaccagccgccgggatttgtgatccctggcaaggagggcaaggatgcggaggtcgcggcgttcaaggaggagatgaaggccaccttccagatgagtgatctcgggcctctctccttctacatggggatcgagaccgcctacgccaagcgcatcgttgagctggctgggctcaccgattgcaacccagctctcactccgatggaggagagactaaagctgagccgcgatagcacgacggaggaagtggatgctacacagtaccggcatcttgtggggagccttcgctacctcacccacacacggccggacttggccttctccgtcggctacgtcagtcggttcatgcagcgaccgacgacggagcaccagcaggctgtgaagaggatcatccgctacgttgcggggactctcgaccacggtctctactacccgaggtgtcctggcaaggcacacttcatcggctgcgaggccgagtacatggcggccttcgccgcttcgacccaggcgctctggcttgctcgactgcttagtgatctcctcggcagagacactggagcggtggagctcagggtggatagcaagtccgctctggccttggcaaagaaccccgtttttcacgaacagagcaagcacatccgggtgaggtaccacttcatccgaagctacttggaggaagggagcatcaaggcgagctacatcaacaccaaggaccagcttgcggacttgctcaccaagcctcttgggaggatcaaactaggagggtgcagcaataggcttgcagccagctatggttatatatatgtatccaacctccctcgggaagaagcagtggaatcatggcgtttcgagaagttaaaagatataaaaagtgcatctattcagaactcaacaaagttagacctctccaacgaggaagcaagaaccttaaagcgagcactacagttcaactggcatgtgctgctggaagacattggtctttggataccatcagaagtctcacacactgaacatgatgacaaacctgagaatgaaccagaagaagaagagataatagctggtccacctttgccctcacaatgcaatgctgagctacatactgattacgatggtgctgctgttagatggggcttaacacaccccaaagaatctgctgccgattgctgtcaagcatgtctagaccaggctaagaatgccaggccaggtgaactaaggtgtaatatatgggtttattgcccatcagagtttggatgtttctctccagataaatatgagcataaacatcaggagtgctggttgaaacaggctgaccaccctaaactcaacttcaaagacaagtattccgagtcatacagagattctcatcccactgcccctgtcgttgtgccctggatgtcaggtgtcatcagcgcatgagctgttagtccccagaggctcatctgagattgggagatttgtaccgatgaaaaacttaaccaaagcaacttcatataccgattcttcctcgttttttttttcttttgccatgatacgtttctctttctcttgtcttgggtatatacgaatatgatgtaaaccttagattagtcgttctgatagcaaaaggttcatttgagggaggcttattttgtggccaagggaatgtgagtagactgattaaatacaatggttccatcaagagaaatgatggtgctcttgcacattttccgctccaattcttttgtctctgatcacgaactttcctaaagcaccattcggattactaatccaaaacggacttaatct

SEQ ID NO: 35828 - DNA, 3747 bp, Oryza sativa
  Clone ID: PAT_MRT4530_39712C.1
atgtgggaggcagtccggtacggcgacgtcgactacgatgaggatcggcgggcactggatgccctcatcgctgcagtcccgcccgagatgcagttctcgctttcccagaagcggactgccaaggaggcctgggacgccatcgctgcggcacgcatcggcagcgaccgcgcccgcaagtccacactgcaggcactccgcaaggagtgggagaacctggccttcaagccaggtgaggatgttgatgactttgctctccgtctcaacactctcttgcagaaaatagtgcagtacggcgacgacacctacgacgaggagagagctgtcgagaagctcttccgctgcgtccctgagaagtacagacagatcgctcgctcgatcgaatctctgctggacctctccacgatgtcgatcgaggaggcgttaggtcgcctcaaggttgtcgatggtgatgagccacagcctctctcggggtccatcaccatcggcgggaagctccatctcactcgggagcagtgggaggcctctcagggtgacgggaggaagggggagtcatcttccccgacaggcggcccggctttcctccaccttgatgagccgaaggtactcgtctccctctacaacggctccagcaatgacaaggctgatgggtggtacctcgacaccggcgccacccatcacatgaccggccgacgggagttcttcaccgagttcgactccagcgtccgaggctccgtcaagttcggggacgcctccggcgtggagatcaagggtgttggcaccgtcaccttcaccgccaagtccagtgagcacaggctgctcaccggagtctactacatccccgcgttgagaaattctatcatcagcgtgggacagctggatgagaacggctcacgcttgttggtcgaggacggactcatgaggatttgggatcgccgtcgtcgccttcttgccaaggtaaccagaggcactaatcgactctacatcctcagcgcgcaggtcgcacaaccagtttgcctcgccgctcgtcgggacgacgaggcatggcagtggcacgagcgcttcgggcacctccacttcgaggccctgaagcgcctcagtgccaaggagatggtgcgaggcatgccgtgccttgaccacatggagcagctttgcgacgtctgcgtggtaacgaagcagcggcggctcccctttccccagcagacgagcttccgagccaaggagcggctcgagctcatgcacggggacttgtgtggcccagtgacaccggccacaccaggaggacgaccaagggagaggctgcggatgccatcaggcgcgcgcaggccgctgcagaggcggagtgtggccgcaagctgcgcgtgctgcgcaccgacaacggcggctgaattcgcgtcgtactgcgctgatgagggcattcagcgccactacaccgcgccgtacagcccacagcagaacggcgtcgtcgagcggcgcaaccagacggttgtggggatggctcgggctcttctcaagcacagggggatgccggccatcttctggggggaggcggtggtgacagccgtctacatcctcaatcgctcgcctaccaaggccctcgatggcaagacaccgtacgaggcttggcatgggcacaagccggcggtctcccacctacgggtcttcggctgcctcgcgttcgccaaggagcttggccacatcggtaagctcgacgacagaagcaccccaggggtgttcatcggctacgcggagggctcgaaggcctaccgcatcctcgacccagagacacagcgtgtgcgcacagtgcgcgacgtagtgttcgacgaagggcgagggtgggtatgggacaaggcggtggatgatggttcgactccgacgtacgacgacttcaccatcgagtacgtccacttcgagggagctgggggagtaggcagctcttcttcaccgagcgtgtctaccccagtccccgagcctccaccgactccaacaccaacacaccctcgggccacgacttcgactacgacgagctcttcgtcgacaccaccccagccggtgtccccacgcgctccagcaccaacagccactcctccgggcacgtctactccgacgccagctcgtgttgagcgcagcccggtggagtttgttactccgctctcccacgacggggagcgcatcgacgcgtaccacgacggcgagcagctacggtaccgtacgatggaggatcttctcggcgaccagccggtgccgggactggtgcctcgcaacctggaggcgcagttgcaccttgcgtgccacgacggtgagcctcggtcttttgcagaggccgagaaacacgcggcatggcgtgccgcgatgcagtcggagatggacgcggttcaggagaaccgcacctgggagcttgctgacctccctcgtggtcaccgcgcgatcacccttaagtgggtgttcaagctgaagagggatgaagccggagccatcgtcaagcacaaggctcgcttggtagcacgcggctttgtgcagcaagaggggatcgactacgacgatgccttcgctcccgtggcacggatggagtccgtgcgactcctccttgcactggctgctcaggaaggctggggtgtccatcacatggacgtcaagtcggcatttctgaacggcgacttgaaggaggaggtctacgtgcaccagccgccgggattcgtgctccccggcaaggagggcaaggtgctacgcctgcacaaggccctctacggcttgcggcaggcaccgagggcgtggaatgccaagttggattccacgctcaaggggatgggcttcaagcaaagcccgcacgaggcggccatctaccggcggggcaatggaggaaatgccttgctggtgggtgtctacgtcgacgacttggtgatcactggcaccaaagatgcggaggtggcgacgttcaagaaggagatgaaggccaccttccagatgagtgatctggggcctctctccttctacctggggatcgaagtgcaccaggacgactccggaatcacgcttcgacagaccgcctacgctaagcgcgtcgttgagctggctgggctcaccgattgcaacccagctctcactccaatggaggagagactgaagctgagccgtgacagcacggcggaggagcaaccgacgacggagcaccagcaggctgtgaagaggatcatccgctacgttgcggggactctcgaccacggtctctactacccgaggtgtcctggcaaggcacacttcgtcgggtacagcgacagcgaccacgctggtgacatcgacaccagcaagagcacgagcgggattctcttcttcctcggcgagtgcctcgttagctggcagtcggtcaagcagcaggtggtggccctgtccagctgcgaggccgagtacatggcggcatccgccgcttcgacccaggcgctccggcttgctcgactgcttggtgatctcttcggcagagacactggagcagtagagctcagggtggacagcaagtccgctctggccctggcaaagaaccccgttttccacgaacggagcaagcacatccgggtgaggtaccacttcatccgaaactacttggaggaagggagcatcaaggcgagctacatcaacaccaaggaccagcttgcggacttgctcaccaagcctcttgggaggatcaagttcctcgagctctgctccaggatcgggatggcccaactttcccacaagacgacacacaagacttag

SEQ ID NO: 35829 - DNA, 168 bp, Oryza sativa
  Clone ID: PAT_MRT4530_39713C.1
atggggccggatgttgacatcggcggtgcggtggatgtgatggacgtcggcggtcaggtccggatcgtcgacaccgccagggaggacaaggcatgcatcgtggagaacatgaagcacaatgaaggcaacactataacatccctgctgtcactgaagacagctccttga

SEQ ID NO: 35830 - DNA, 573 bp, Oryza sativa
  Clone ID: PAT_MRT4530_39714C.1
gcccatcgaagcaccaattgtgcctctactaattttcatttaaagcaatacttcgaagcatttgtgcttacagttacagacgatagaatactcgctgcattctgccaatgaggcaaatctttcaggccaacgttggctaacaccaccaggcagcatcattccaacatcttcccaggaaatgagagaaatgacacccaaaggtgaaccttcagaaggagggcaattgcactttgattttccaggcgcaaaaaatggaacatccagccaggttaacaaacaagccattagagttcacgggtaatgctgcaacagaatcatctacatacaactagctctaagaaggtgcaaaactggagaggcctaaattactcagtacaaatctgaacatctagagtaagatgactgaagctaatcagccatctaaaaggttcaatatggatctaagctatatcagtaaacagaaagccttccacattgcataagaagctgtacagaggtgacggaggacggcctaactgcgataaccttgttagagcctcaaactgcaattgttttcttgccagcaagaatgcg

SEQ ID NO: 35831 - DNA, 3465 bp, Oryza sativa
  Clone ID: PAT_MRT4530_39715C.1
atgtcgatcgaggaggcgataggtcgcctcagggtcgtcgacggcgatgagccacaacctctctcggggcctatcaccattggcgggaagcttcatctcactcgggaacagtgggaggctagccagggtgaccggaggaaggaggagtcctcctcctcgacgggcgaccgcaaagcagcgcaaggcgcgcggaggcgtgcagctgcggctcgacgcagccaggcccacgttgcacgggtggaggaggaagagccggctctgctcctggcacacgcaagcatcgagctatctccagcggcaccggccacagcagttttcctccacctcgacgagccgaaggtacacgccttccttggcaacagctccagcaacgacaaggctgatgggcggtacctcgacaccggcaccacccatcacatgactggccgatgggagttcttcaccgagcttgactccagcgtccgaggctccgtcaagtttggggatgcctccggcgtggagatcaagggcgtcggctccgtcaccttcaccgccaagtccggtgagcacaggctgctcaccggagtctactacatccccgcgttgagaaactctatcatcagcgtggggaagctggatgaaaacggctcacgcgtgttggtcgagcacggagtcatgagaatttgggatcgtcgtcgtcgctttcttgccaaggtaaccagaggcactaatcgactctacatcctcagtgcgcagttggcacaaccagtttgcctcgccgctcgtcgggacgacgaggcgtggaagtggcacgagcgcttcgggcacctcctcttcaaggccctgaagcggctcagtgccaaggagatggtgcgaggtctgccgtgccttgaccatgtggagcagctctgtgacgtctacgtggtaacgaagcagaggcggctcccctttcccaagcagacgagcttccgagccaaggagcggctcgagctcgtgcacggggacttgtgtggcccagtgacaccggccacaccaggaggacgacgttacttcctgctactcgttgacgacctctcccgctacatgtgggtgatggtcctcggcagcaaggaagaggctacggacgccatcaggtgcgcgcaggctgctgcggaggcagagtgtggccgcaagttgcgcgtgctgcgcaccgacaacagcggcgaattcacggcggttgaatttgtgtcgtactgcgctgatgagtccattcagcgccactacaccgcgccatacagcccgcggcagaacggtgtcgtcgagcggcgcaaccagacgagggggatgctggtcatcttctggggagaggcggtagtgacggccgtctacatcctcaaccactcgcctaccaaggccctcgacggcaggacaccgtacgaggcttggcatgggcgcaagccggcggtctcccacctgcgggtcttcaactgcctcgtgttcaccaaggatcttggccacatcggcaagctcgacgacaagagcaccccaggggtgttcatcggctacgcggagggcccgaaggccgactgcattctcgacccggagacacagcgtgtgcgcacggcgcgcgacatagtgttcgacgaagggcgagggtgggcatgggagaaggcggtagacgacggttcgactccgatgtatgacgacttcactgtcgagtacgtccacttcaagggagctgggggagtaggcaattctccttcaccgagcgtgcctaccccagtccccgaacctccaccaaccccgacagcgacacactttcgagctacgacctcggctgcaatgagttattcaccgacaccaccacagtcggcgacccaacgcactccagagccagcagccacccctctgggcacgtccattccgacgccagctcgtgatgagcacagcccggtggagttcgctactccgctctcccacgacaaggagcgcatcgacgcgtaccacgacgacgagccgttgaggtaccgtacgatggaagaccttctcggtggccagccactgccaggctggtgcctcgtgacttggaggcgcagttgcaccttgcgtgcgacgacggagaaccgcacctgggagcttgctgacctccctcgtggtcaccgcgcaatcacccttaagtgggtgttcaagctgaagagggatgaagctggagccatcgtcaagcacaaggctcgcttggtggcacacggtttcgtgcagcaggagggtatcgacttcgacgatgccttcgcccccgtggcacagatggaatccgtgcgactcctccttgcgctggctgcacaggaaggctggtgcgtccatcacatggacgtcaagtcggcgtttctgaatggcgacttgaaggaggaggtctacgtgcaccagccaccgggttttgtgatccccagcaaggagggtaatgtgctacgcctgcacaaggccctctacggcttgcagcaggcaccacgggcatggaacgccaagttggattccacgctcaaggggatgggcttcgagcaaagcccgcacgaggtggccatctaccggcgaggcaatggaggaaatgccttgctggtgggtgtctacgtcgacgacttggtgatcaccggcaccaaggatgcgaaggtggcggtgttcaaggaagagatgaaggccgccttccagatgagtgatttggggcctctatccttctacctggggatcgaggtgcaccaggacgactccgggatcacacttcgacagaccgcctacgccaagcgggtcgtggagttggctgggctcaccgactgcaacccagctctcactctgatggaggagagactaaagctgagccgcgacagcacgacggagaatgtagacgctacacagtaccggcgtcttgtggggagccttcggtacctcacccacacacggccagacttggcattctccgttagctacgttagtcggttcatgcaacgaccgacgacggagcaccagcaggctgtgaagaggatcatccgctacgttgaggggactctcgaccacggtctttactacccgaggtgtcctggcaaggcacacttcgtcgggtacagcgacagcgaccacgccggcgacatcgacaccagcaagagcatgagtgggattctcttcttcctcggcgagtgcctggcgctctggcttgctcgattgctcagtgatctgctcggcagagacactggagcggtggagctcggggtggacagtaagtccgctctggccctggcaaagaaccccgtttttcacgaacggagcaagcacatccgggtgaggtaccacttcatccgaggctacttagaggaagggagcatcaaggcgagctacatcaacatcaaggaccagcttgcggatttgctcaccaagccccttgggaggatcaagttccttgagttttgctcccggatcgggatggctcaactttcccacaagacggcgcacaagacttag

SEQ ID NO: 35832 - DNA, 591 bp, Oryza sativa
  Clone ID: PAT_MRT4530_39716C.1
atggcggccggcggcggagaagcacacgctcttggcgatgccactgccgccgaggaggaggaggtgaggcggcagcccggcggcggcggcggtcacatcgtccttgccgaactgggtgctcttgtcatcggagtggtggcgcttgcgaggggatgcgccggcggtggtggtgaaggaggcgaagcgatgtactccagcaggcgaagcggcggcgtcgacgggcgagcgcggtggcggagtggcggcgtcggtgggcgagcacggctgcggagaggcggcgtcagcgggcgagagcggcggcggcggcgggcgagcgccgctgcggatggggatgcatcagccttgtcgtcgtcgacggctccaggcgaatgcggcggccgcttggattgtggcggcacgggcgccacgccgccggcgacgctgttcgaggtcacgctggggaagggcggcggcggcggcggcgccggtgacctggactactacgacgtgagcctcgtcgacgggtacagcctgcccatcgtcgccgtcccgcaggccggcggcggctgcgccaccaccggctgcacggccgacctcaaccgctgtacgtaa

SEQ ID NO: 35833 - DNA, 3561 bp, Oryza sativa
  Clone ID: PAT_MRT4530_39717C.1
atggggaggccgcggaagccggcgaagcccgcggccgcggcgtcctcctccgcctccgccgccgccgccttctcgatcggcaactgcaaggtggagatccacgggagcagcctgaggtgccagtccacggagcaggaggaggaggagctcaccatttctgggcccaggggcgcgaagatcgtcgtgtctgtcgacggggccaagagttcttcagttggtgacggttttgatttcatccttctcagtccgagtgatgtcaatgagcgaaacaaggcattgcttcaggtggttaaattatacagcttctgcattaatcatttccagtgcaccagcaaagcaagtgaaagtggttatgaagaggacgccgagctcgccgcagcagaggagcgcaggcgagcaacggctcagactgctgcagcagcagcgagggcggccagactggcggcagcggagttggcagcagccagggcggaggcggaggcagaggtggcggaagatgcggcacgtgcggcggaggtagaggttgagaccttgcgcagcagcatcaacggctccatcgccagcgacatcaccgctgacagggagcttgaggagctggcaagaggaagggcgcgggagcgggcagagcggtgggcagcagtccacccccacggcggcggcggcggcccaagggaccgcgcgcccgccgacgggaacccggacgggcgcgggcgtgccggcggcagcccggagcccgcgcgcggccctcgcaggcagcgcggctctccctcccctgaccggtgccatggtcaccacggcgtccagacggtggtcagggactttggtcccggcggtgggtggcctaccctcaccaaaaccaactacatcgagtgggccgcggtgatgagggtgaggctccaggtgcggcacatgtgggaggcagtctggtacagcgacgtcgactacgacgaggatcggcgggcactggatgccctcatcgctgcagtcccgcccgagatgcagttctcactttcccagaagcggactgccaaggaggcctgggacgccatcgctgcggcacgcatcggcagcgaccgcgcctgcaagtccacactgcaggcactccgcaaggagtgggagaacctggccttaaagccaggtgaggatgttgatgactttgccctccgtctcaacactcttttgcagaagatggtgcagtacggcgacaacacctacaacgaggagagagctgtcgagaagctcttccgctgcgtcctagagaagtacagacagattgctcgctcgatcgagtctctgctggacctctccatgatgtcgatcgaggaggcgttgggtcgcctcaaggtcgtcgacggtgatgagccacagcctctctcggggcctaccaccattggcgggaagctccatctcactcgggagcagtgggaggcctctcagggtgacagaagaaagggggagtcttctccctcgacaggcggcctcaagccacgcaaggcacgcggaggtgtccagctgcggtgggcgcgaagacgcgccgagggtggcgctcgcagaggcgcccagggcggcgccgccggcaaccacaagccggcacgagacgacacctgccgcaactgtggcaagcttggctattgggccaaagactgtcgacagccacgacgtggccaggcgcacgtcgcacaggtggaggaggaagagccggctctgctcctggcacacgcaagcatcgagcttcctccagcggcaccggccgcagtggctttcctccaccttgatgagccgaaggtactcgtctccctctgcaacggctccagcaacgacaaggctgatgggtggtaccttgacaccggcgccacccatcacatgaccggccgacgggagttcttcaccgagatcaagggcgttgtctccgtcaccttcaccgccaagtccggtgagcacaggctgctcaccggagtctactacatccccgcgttgaggaattctatcatcagcgtgggacagctggatgagaacggctcacgcgtgttggtcgaggacggactcatgaggatttgggatcgccgtcgtcgccttcttgccaagtggcacgagcgcttcgggcacctccacttcgaggccctgaagcgcctcagtgccaaggagatggtgcgaggcatgccgtgccttgaccacgtggagcagctctgcgacgtctgcctggtaacgaagcagcggcggctcccttttccccagcagacgaacttccgagccaaggagcggctcgagctcgtgcacggggacttcaagggagaggctgcggatgccatcaggcgcgcgcaggccgctgcagaggcggagtgcggccgcaagctgcgcgtgctgcgcaccgacaacggcggcgaattcacggcggctgaattcgcgtcatactgcgctgatgagggcattcagcgccactacaccgcgccgtacaacccgcagcagaacggcgtcgtcgagcggctcaaccagatggccctcgatggcaggacaccgtacgaggcttggcatgggcgcaagccggcggtctcccacctacgggtcttcggctgcctcgcgttcgccaaggagcttggccacatcggcaagctcgacgacaggagcaccccaggggtgttcattggctacgcggagggctcgaaggcctaccgcatcctcgacccggagacacagcgtgtgcgcacaacgcgcgatgtagtgttcgacgaagggcgagggcagctcttcttcaccgagcgtgtctaccccagtcctcgagcctccaccgactccaacaccaacacactctcgggccacgacttcgactacgacgagctcttcgtcgacaccaccccagccgctcgtgttgagcgcagcccggtggagttcgctacttcgctctcccacgacggggagcgcatcgacgcgtaccacgacggcgagcagctacggtaccgtacgatggaggatcttctcggcgaccagccggtgccgggactggtgcctcgcgacatggaggcgcagttgcaccttgcgtgcgacgacggtgagcctcggtcttttgtagaggtcgagaaacatgcggcatggcgtgccacgatgcagtcgaagatggacgcggttcaggagaaccgcacctgggagcttgctgacctccctcgtggtcaccgcgcgatcacccttaagtgggtgttcaagctgaagagggatgaagccggagccatcgtcaagcacaagactcgcttggtggcacgcggcttcatgcagcaggaggggatcgactacgacgatgccttctctcccgtggcacggatggagtccgtgcgactccttgcgctggctgctcaggaaggctggggtgtccatcacatggacgtcaagtcggcatttctgaacaacttgaaagaggaggtctacgtgcaccagccgccgggattcgtgctccctggcaaggagggcaaggtgctacgcctgcacaaggccctctacggcttgcggcaggcaccgagggcgtggaatgccaagttggattccacgctcaaggggatgggcttcgagtaa

SEQ ID NO: 35834 - DNA, 4779 bp, Oryza sativa
  Clone ID: PAT_MRT4530_39718C.1
atggggaagttgaaggaatctgaagaattattggaaagatgccttgaagtcagaaaaaggattttgtctgaggaacattttcagatcacttaccaggtatttgagtttttcaccacaagctctgctttattggcaattaacacagactgggaggtagctgttactttggtacacttggcaaggctaaccatgctaaactttattagtgacaaggaggacagtgacctagcaagatccaaacttgtcagggcaaggctacttgtcaatgattcaatcagcagccccccggaggtgcgccatgtccgacgctcggtctcggcgttcggtcgcctcgagcactcggcgtcagcaggacgccgagctcgccgcagcagaagagcgcaggcgagcaacggctcagaccgctgcagcagcagcgagggcggccagactggcggcagcggagttggcagcagccagggcggaggcggaggcggaggcggaggcggcggaagatgcggcacgtgcggcggagggagcttgaggagctggcaagagaaagggcacgggagcgggcagagcggtgggcagcagcccacctccacggcggcggcggcggcccaagggaccgcgcgcccgccgacgggaacccagacgggcgcgggcgtgccggcggcagcccggagcccgcacgcggccatcgcaggcagcgcggctctctcccctgatcggcgccatggtcaccacgtcgtccagacggtggtcagggactttggtcccgtcggtgggtggcctaccctcaccaaaaccaactacatcgagtgggccgtggtgatgagggtgaggctacaggtgcggcacatgtgggaggcagtccggtacggcgacgtcgactacgacgaggatcggcgggcactggatgccctcatcgctacagtcccgcccgagatgcagttctcgctttcccagaagcggactgccaaggaggcctgggacgccatcgctgcggcacgcatcggcagggaccgcgcccgcaagtccacactgcaggcactccgcaaggagtgggagaacctggccttcaagccaggtgaggatgttgatgactttgctctccgtctcaacactctcttgcagaaaatggtgcagtacggcgacgacacttacgacgaggagagagctgtcgagaagctcttccgctacgtccctgagaagtacaggcagatcgctcgctcgatcgaatctctgctggacctctccacgatgtcgatcgaggaggcgttaggtcgcctcaaggtcgtcgatggtgatgagccacaacctctcttggggcccatcaccatcggcgggaagctccatctcactcgggagcagtgggaggcctctcagggtaacgggaggaagggggagtcatcttccccgacaggcggccgtaagccgcgcaaggcgcggggaggtgtccagctacggtgggcgcgaagacatgccgagggtggcgcccgcagaggcgcccagggcgttgccaccggcaaccacaagccggcacgagacgacgcctgccgcagctgtggcaagcttggccattgggccaaagactgtcgacagccacgacgcggccaggtccacgtcgcacgggtggaggaagagccggctctgctcctagctcatgcaaacattgagctacctccagcggcaccggccgcagcggctttcctccaccttgatgagccgaaggtactcgtctccctctgcaacggctccagcaacgacaaggctgatgggtggtacctcgacaccggctccacccatcacatgaccgaccgacgggagttcttcaccgagttcgactccagcgtccgaggctccgtcaagttcggggacgcctccggcgtcgagatcaagggtgttggctccgtcaccttcactgccaagtccggtgagcacaggctgctcaccggtgtctactacatccccgcgttgaggaattctatcatcagcgtggaacagctggatgagaacggctcacgcgtgttggtcgaggacggactcatgaggatttgggatcgctgtcgtcgccttcttgccaaggtaaccagaggcactaatcgactctacatcctcagcgcgcaagtcgcacaaccagtttgcctcgccgctcgtcgggacgacgaggcgtggcagtggcacgagcgcttcgggcacctccacttcgaggccctgaagcagctcagtgccaaggagatggtccgaggcatgccgtgccttgaccgcgtggagcagctctgcgacgtctgcgtggtgacgaagcagcggcggctcccctttccccagcagacgagctttcgagccaaggagcagctcgagctcgtgcacggggacttgtgtggcccagtgacaccggccacaccaggaggacgacgttacttcctgctgctcgtcgacgacctctcccgctacatgtgggtgatggtcctcggcagcaagggagaggctgcagacgccatcaggcatgcgcaggctgctgcagaggcggagtgcggccgcaagctgcgcgtgctgtgcaccgacaacggcggcgaattcacagcggctgaattcgcgtcgtactgcgctgatgagggcattcagcgccactataccacgccgtacagcccgcagcagaacggcgtcgtcgagcggcgcaaccagatggttgtggggatggctcgggccctcctcaagcagagggggatgccggccatcttctggggggaggcggtggtgacggccgcctacatcctcaaccgctcgcctaccaaggccctcgatggcaggacaccgtacgaggcttggcatgggcgcaagccggcggtctcccacctgcgggtcttcggctgcctcgcgttcgccaaggagcttggccacatcggcaagctcgacgacaggagcaccccaggggtgttcatcggctacgcggagggctcgaaggcttaccgcatcctcgacccggagacagcgtgtgcgcactgcgcgcgacgttgtgttcgacgaaggccgagggtgggtatgggacaaggcggtggacgatggttggacttcaccgtcgagtacgtccacttcgagggagctgggggactaggcagctcttcttcaccgagcgtgtctacccaagcccccgaatctccaccgactccgacaccaacacaccctcgggccacgacttcgactacgacgagctcttcgtcgacaccacctcagccagtgactccacatgctccagcaccaacagccactccaagcacgtctactccgacgccagctcgtgttgagcgcagcccggtggagttcgctactccgctctcccacgacggggagcgcatcgacgcgtaccacgacggcgagcagctacggtaccgtacgatggaggatcttctcggcgaccagccggtgccgggactggtgcctcgcgacctagaggcgcagttgcaccttgcgtgcgacgacggtgagcctcggtcttttgcagaggccgagaaacacgcggcatggcgtgccgcgatgcagtcggagatggacgcggttcaggagaaccgcacctgggagcttgctgacctccctcgtggtcaccgcgcgatcacccttaagtgggtgttcaagctgaagagggatgaagccggagccatcgtcaagcacaaggctcgcttggtggcacgcggtttcgtgcagcaggaggggatcgactacgacgatgcctgcgctcccgtggcatggatggagtccgtgcgactccttcttgcgctggttgctcatgaaggctggggcgtccatcacatggacgtcaagtcggtgtttctgaatgtcgacttgaaggaggaggtctacgtgcaccagccgccgggatttgtgattcccggcaaggagggcaaggtgctacgcttgcacaaggccctctacggcttgcggcaggcaccgagggcgtggaatgccaagttggattccacgctcaaggggatgggctacgagcaaagcctgcacgaggcggccatctaccggcggggcaatggaggaaatgccttgctggtgggtgtctacatcaacgacttggtgatcatcggcaccaaggatgcggaggttgcggcgttcaaggaggagatgaaggccaccttccaaatgagtgatctggggcctctctccttctacctggggatcgaagtgcaccaggacgactccgggatcacgcttcgacagaccgcctacgccaagcgcgtcgttgagctggctgggctcaccgattgcaacccagctctcactccgatggaggagagactgaagctgagccgcgacagcacggcggaggaggtggatgctacacagtaccggcgtcttgtggggagccttcgctacctcacccacacacggccggacttggccttctccgtcggctacgtggtggccctgtccagctgcgaggccgagtacatggcggcctccgccacttcgacccaggcgctctggcttgctcgactgcttagtgatctcctcggcagagacactggaacggtggagctcagggtggatagcaagtccgctctggccctggcaaagaaccccgtttttcacgaacggagcaagcacatccgggtgaggtaccacttcatccgaagctacttggaggaagggagcatcaaggcgagctacatcaacaccaaggaccagcttgcggacttgctcaccaagcctcttgggaggatcaagttcctcgagctctgctctaggatcgggatggcccaacttccccacaagacgacgcacaagacttag

SEQ ID NO: 35835 - DNA, 1347 bp, Oryza sativa
  Clone ID: PAT_MRT4530_39719C.1
atggaaaagtctgagctcttgctaggatcgtattcatatgcagctctatgtggtgtcacactcatcataggatggttagctcactgggtatacaaatggatgaatcctccatgcattgggaggcttcctcctggctccatgggcttccctattattggtgagaccttccagttcttcagagcaagcccatcaatagacatgccaagctactacaagcaaagactggagaggtatgggcctctattcaagactagcttagttggacggccagtgatcatttcccttgacccagaggtgaaccgattcatatttcaacaagagggtaaattgttccaaagttggtatccagaaactgcaattaatatctttggcaagaagagcctcaccacatacaacggaaccattcacaagtttatccggggtgtcgcggccaagctctttggccttgaaaacctgaaagaatcactccttcctgagctagaaaactctatgagggagagcttcgcatcatggactgggaaacccagcgtcgaggtacaggacggcgtgtcagacatgatctttgacctagttgccaagaagttgatcggactcgatgtcaccaactcaagagaattgagaaagaactttcaggacttctttcaggggatggtttccttcccaatatattttccagggacatcattctaccgatccatgcagggtaggagaaatgtgcggaacacacttactgatataatgaaagagaggctaagtgcacctggaaagaagtatggtgaccttgtagacctcattgttgaagagctacagagcgaaaagccaatgatcgatgaaaactttgctatagacgcacttgctgcgctcttgtttacgagctttgcaacactgtcatcaaccttgactgtagcttttaagtacctaaccgacaatccaaaagttgttgaagagctcaaggaggagcacgggacaattctaaagaagcgagaaggtgtgaattccgggttcacatgggaggagtacaggtccttgaaattcagtactcaggttatgaatgaaattactcgaattagtaacgtcacacctggagttttcaggaaaacattaacagatgtgcaagtgaaaggatatacaattccatccgggtggttagtcatgataagccccatggcagttcacctaaacccaaaattgttcgaggatccacttaaatttgatccatggaggtggaggactgtgtcaaaaagtattattggaacaaagggtggaaaatctaaggcatctgaagctagagcacctcctttatctagcattcggaccctatgcaactatgcagcccttggttattaa

SEQ ID NO: 35836 - DNA, 1560 bp, Oryza sativa
  Clone ID: PAT_MRT4530_3971C.1
ctttgcgttctaccgttttggtctcctcccaagctctcccgtggtctctagccacctccccaccgtcgccctctccctcccacgttgccggccggcctccagccgcctctcccgcctcgccggagagtcgtccggccgcgccatcgcctcctacagcgtcgccgccacctcctccacgccggcctgccctccgtttcgcgaggagacccccggaactacgttcccgccgtcgccctcctctttccttcgcgccggccacctccagccgccttcctctcctcgcccgagcgccgcccggccgcgccgtcttctccctcggcctcgcagctgcctcctctttcccggcttcgcctccgtttcgcggggaaatcaccggagacgcgtcctcgccggtgtccagtggcgtcgccaccacttctccgcctccggccgcctctgccgcgtccccggtgcaccggccgacgtcgccaccacctctcccggcaccggagtgccgtcctctctcccggccaggccacggcgtcgcccgaatttcgccggaacgccgtcgtctccgcgccggcctctccttcctcctcgtcggctcgtcgccccgctgcaccaccaccttcaccaacatcgtagcggcgtgttccacgtcgtcctcgtccccgtgcagccgctgccggctgtcctcgtcgcctcctcgccggtcccggtcgtcgtcgtcgtcgtcgtcgtcgtcctctcgtcgttcccggtcgtcgtggcgttcgtccctccgtcaagccgttctcgttcgtcgtcctcgcttcgtcaagatcgctgcagccccgtcctcgtgttcgtcctcggctccgcgtcgtcaagcctcgtgccggccgcgtctcgccttcgcccaaggatcgccgccgaagccgtcccctcgccgttcgtctccgttgtgcccgtctgtctccgccgcgcccgttcgtcgttgtcgttcccacgcctcgtcgcgtggtggtaaggtttcctcctctcgcttccccgccctcgtcctttcggtgtcgccccgtacccgttgtgcggtcgtcgaccccggtacccgtgtaccggtgtcggtagtcgttcacgtgtgcgggtggtgaccgtgtagtgtccgtgttagtgtgcccgctcggtagccgcgtggtttccacgtgtgcaacccgtgtggtgtctagtggagtccgtttgtcggccactcgcctcggttgacacacggggtccgcttccgtcgacccgtggaccatctctgtgtactcggtctaccgtggtcctttaggttgacatgtggggcttgtagctttgcttgtgtgcttcgcgtagcttctgttgttccggaggttcccgaagcgtggttcgcggtcgtcgccgaagtggctcggctcggcttctcttcttcctcctctcgctatgctcgacccagccggggcacaggcggcacgccgcggcggcgaggtgcggctccacgaccggcggccggggaaggcggcgactaccttcggcggagctccgccggcgatggcggcacatgaaggcggggcgcggtggctctag

SEQ ID NO: 35837 - DNA, 1117 bp, Oryza sativa
  Clone ID: PAT_MRT4530_39720C.1
agctgagctgcttgctgctcaagtggtgagaaggtagagagagagagagagagagagagctgagctgcaagaaaggctcacccatcgaggacaccaaaacaagtcaagaacgaacgactcgtgatccgtccatgggttgctctcctgtcaggcgcatgagattctgaggcggaggaagaggagagaaaggaggaagaagagcaagatagcggcggcggcgatgagctggaggaaaggaggaggaggggatggaggggtgtcgaggagatgggccgtgctgctctgcctcgggagcttctgcctcggcctgctcttcaccaacagaatgtggacactgcctgaggcaaacgagattgctcgaccaaacggaaatggagacgaaggcaacacgctgattgccgccgagtcatgcacgcgaacgtaagctcatcccgattacaaagacgtcgcgatgtagaacgatactcatcatggtgtacaaacactagataagacaatagcaagcttagagacagaactctcagctgcaagatctctacaagaatccttgctcaatggttccccagttgcagaagagttcaaactttccgagtcaatcgggaggcggaagtaccttatggtgatcggtgtcaatactgcatttagcagtcggaagagaagagattccatacgttacacctggatgcctcaagggtgaaaaaaggaagagaacttgaagaagagaaggggatcatcattcgtttcgtcattggccacagctgctatatcaggtggaatttgttgatagagcaattgaagcagaggacagaaaacatggtgacttcatgagaattgatcatgttgaaggataccttgcgctatctggcaaaaccaagacatactttgctacggctgtttcattgtgggatgcagacttttatgtgaaggttgatgatgacgtgcatgtaaacatagcaacacttggacagattttatccaaccatgcattgaagcccagagtatatattggatgccatgaaatctggacctgtcctaactgagaagggtgtgagatactatgaacctgagcattggaaattttggcgatccaggaaacaaatatttttcggcattgcta

SEQ ID NO: 35838 - DNA, 5793 bp, Oryza sativa
  Clone ID: PAT_MRT4530_39721C.1
atggccaccattgagacacactaccactgctactctctccatcagtccacaaagaggaaggtggaggaagaagacctgcaaggtgagaggaggccaatggtgaagttctccaagcagttcgagggccagcttgtgcccgaatggaaggacgccttcgtggactactggcagctcaagaaggacatcaagaggctgcaggctgcggaggcggaggcggccggggtggcggcgacgacgccgctgtcgcagtgccaggcgccggtgcataggaagctggccagcggcggaggcggcggcggcggcgcggtggccggagaggtgtacgaaacggagctcgtggacggcggcgccgggttcgcggacggcgaggcggcgagggccttcttcgcgaggctggacgagcagctcaacaaggtgaaccgcttctacgagcggaaggaggccgagttcgtggagcgcggcgagtcgctccgccgccagctgcagatcctcgccgagctccgggccgccgtcgtcgccgagcagcagcgcgacgggcgccgccgccgatgcggcaacggcggcgactcctcgccgccggacacggaggatccctccgtctcctgctccatcctccacggagatcagtccctcagaggcacttctgagcaagaacaggaaggccaggaaaagctcaccaaagacatgattgcaaggagccctgacgaaggagacgatgatcagctcaccatccctcaagaattgggcgattcagggaggcttggcaggccaagagaagaagccgccaacaccaggccgaggacgacgctcccaggaggcagggcggtcacctgccaaggcagaagcgtcaggatcaacatcccggtgaccacgccgacgaggaccgtcaccgccatccgtgagcttctgttcgacgacatgctaagccagtcgaggaggagcggtagcgccaacggtacaaaatgcggcgacaagctgagcatcaacaagaggaaggtgcatcaggcagagaagatgataaggggtgccctgattgagctgtacaagggattggggtatctcaagacataccggagcttaaacatgatggcgtttgtgaagattttgaagaaatttgacaaggttacagcaaaggaagctcagtcaatataccttaaagtagtggagagctcctacttcaatgtctctgacaaggtaattaggctaatggacgatgtggatgagctgtttgtgaggcattttgcagaaggtgacaaacggaaagcaatgaagtatcttaagccaaatcagagggaagaatcacacaccacaacatttttcatagggctattcactggtggctttgcagcattattcattggttattgtatcatggcacacattgctgggatgtacacccagcagtcaaacaaggtctacatggcaacatcatatcctgtcctgagcatgttcagcctcttctttctgcatctcttcctctacggatgcaacatcttcatgtggagaaagacacgcataaactacacattcatatttgaattcacgcctaccaaagagctgaagtatcgtgatgtgttcctgatttgcactacttccatgacaattgtcattggtgttatgtttgcacacctgacactcattgtcaaagggtattcgtcatgtgcagtccaagcaataccaggagctctacttctggttttcttgctaatattggtctgccctttcaacatactctaccgatcatgtcgttaccacttcctaacagtgatcagaaacatcattctaacccctttctacaaggttgtcatggttgatttcttcatggctgatcagctttgcagccaggtaccactgcttaggagcctagagtatctggcgtgctattacataaccagcagctacaagacacaagactatggctactgcaccagagtgaagcactttagagatttggcttatgcagtatccttcctaccttactactggagggccatgcagtgcgcaaggagatggtttgacgagggggacataaatcacattgtcaaccttgggaagtatgtgtcagcaatgcttgctgctggaacaaaagtggcatacgagaatgataacagtgctggatggctgtcacttgttgtcattgtgtcgagtctcgccactatctaccaactatactgggactttgtcaaggattggggtcttctgcagtttaactccaagaacccttggctccgtaatgatctgatactcaaacaaaagtacatctatttcctttccatgggtctgaaccttatcttgaggctggcatggcttcagaccgtcatccaccctaacatcggaagcctggattccagagtaactttgttcatcttggcagctcttgaggtgattcgacgaggccactggaacttctacaggttggaaaacgagcacctaaacaatgcagggaaattcagagctgtgaagtatatttcaagtcatgaaaaagtcagcaaactctgcaaaagggagaatgactatattgaaaacaatagacagcaccctcttgccctagcatggctgctacacgcaagcatcgagctacctccagtggcaccggccgcagcggctttcctccaccttgatgagccgaaggtgctcgtctccctctgcaacagctccagcaacgacaaggctgatgggtggtacctcgacaccggcgccacccatcacatgactggccagcgggaggtcttcaccgagcttgactccagcgtccgaggctccgtcaagtttggggatgcctccggcgtggagatcaagggcgtcggctccgtcaccttcaccgccaagtccggtgagcacaggctgctcaccggagtctactacatccccgcgttgagaaactctatcatcagcgtgggacagcttgatgagaacggctcacgcgtgttggtcgagcacggagtcatgaggatttgggatcgccgccgtcgccttcttgccaaggtcgcacaaccagtatgcctcgccactcgtcgggacgatgaggcgtggcagtggcacgagcgtttcgggcacctccactttgaggccctgaagcggctcagtgccaaggagatgcagacgagtttccgagccaaggagcggctcgagctcgtgcacggggacttgtgtggcccagtgacaccagccacaccaggaggacgacgttacttcctgctgctcgtcgacgacctctcccgctacatgtgggtgatggtcctcggcagcaagggagaggctgcggacgccatccggcacgcgcaggctgctgcagaggcggagtgcggccgcaagctgtgcgtgctgcgcaccgacaacggcggcgaattcacggcggctgaattcgcgtcgtactgcgctgatgagggcattcagcgccactacaccgcgccgtatagcccgcagcagaacggcgtcgtcgagcggcgcaaccagacggttgtggggatggctcgggctctcctcaagcagagggggatgccggccatcttctggggagaggcggtggtgacggccgtctacgtcctcaaccgctcgcctaccaaggccctcgatggcaggacaccgtatgaggcttggcatgggcgcaagccgggggcctcccacctgcgggtcttcggctgcctcgcgttcgtcaaggagcttggccacatcgacaagcttgacgacaggagcaccccaggggtgttcatcggctacgcggagggctcgaaggcctaccgcatcctcgacccggagacacagcgtgtgcgcacagcgcacgacgtagtgttcgacaaagggcgagggtgggtatgggacaaggcggtggacgatggttcgactccgacgtacgacgacttcaccgtcgagtacgtccacttcgagggagctgggggagtaggcagctcttcttcacctagcgtgtctaccccagtccccgagcctccaccgactccgacaccaacacactcttgggccacgacttcgactacgacgagctcttcaccgacaccaccacagccggcgaccccacgccctccagcaccaacagccactcctccgagcacgtctactccgacgccagctcgtgttgagcgcagcctggtggagttcgctactccgctctcccacgacagggagcgcatcgacgcgtaccacaacggcgagcagctacgccggtgccgggactggtgccttgcgacctggaggcgcagttgcaccttgcgtgcgacgacagtgagcctcggtctttcacagaggccgagaaacacgtggcatggtgtgccgcgatgcagtcggagatggacgcgattcaggagaaccacacctgggagcttgctgacctccctcgtggtcaccgtgcgatcaccctttaagtgggtgttcaagctgaagagggatgaagccggagccatcgtcaagcacaaggctcgcttggtggcacgcggtttcgtgcagcaggaggggatcgactacgacgatgccttcgctcccgtggcacggatggagtccgtgcgactccttcttgcgctggctgctcaggaaggctggggcgtccatcacatggacgtcaagttggcgtttctgaacggcgacttgaagaaggaggtctacgtgcaccagccgccgggatttgtgatccccggcaaggagggcaaggtgctacgcctgcacaaggccctttacggcttgcggcaggcaccgagggcgtggaatgccaagttggattccacgctcaaggggatgggcttcgagcaaagcccgcacgaggtggccatctaccggcggggcaatggaggaaatgccttgctggtgggtgtctacgtcgacgacttggtgatcaccggcaccaaggatgcggaggtcgcggcgttcaaggaggagatgaaggccaccttccagatgagtgatctggggcctctctctttctacttggggattgaggtgcaccaggacgactccgggatcacgcttcgacagaccgcctacgccaagcgcgtcgttgagctggctgggctcaccgattgcaacccaactctcactccgatggagagactgaagctgagccgcgatagcacgacggaggaagtggatgctacacagtaccggcgtcttgtggggagccttcgctacctcacccacacacggccggacttggccttctccgtcggctacgtcagtcggttcatgcagcgaccgacaacggagcaccagcaggctgtgaagaggatcatccgctacgttgcggggactctcaaccacggtctctactacccgaggtgtcctggcaaggcacacttcatcgggtacagcgacagcgaccacgccggcgacatcgacaccagcaagagcacgagcgggattctcttcttccttggcgagtgccttgttagctggcagtcagtcaagcagcaggtggtggccctgtccagctgcgaggccgagtacatggcggcctccgccgcttcgacccaggcgcactggcttgctcgactgcttagtgatctcctcggcagagatactggagcggtgaagctcagggtggatagcaagtccactctggccctggcaaagaaccccgtttttcacgaacggagcaagcacatccgggtgaggtaccacttcatccgaagctacttggaggaagggagcatcaaggcgagctacatcaacaccaaggaccagcttgcggatttgctcaccaagccccttgggaggatcaagttccttgagctctgctcccggatcgggatggctcaactttcccacaagacggcgcacaagacttag

SEQ ID NO: 35839 - DNA, 492 bp, Oryza sativa
  Clone ID: PAT_MRT4530_39722C.1
atggcggcgaccggctggcgcgacgggcttgtcggcggtgacggcgaccttctgctgcgcgcgtatggcggcagcgagcggcgggcgtgtgaggcctcggcaagcggcggcgtttacggcagcgacaaccagcagatcatggcgacgagggaaggggcgccgcgagcggcgggctgctcagagacggcgctgggcgagctggtgaggggcgccggcggctggcaagcgcagggtgacggcggttggcgggcgcagggcgacggcggcaagcgaggggcggcggccacgcgcggggagacggcggcggacaaaaggccccgcgcacgccggaggaggaaggcggcgggcgcagagcggcggccacgcgtggggagacggcggcggacaaaaggccccgcgcacgccggaggaggaaggcggcgggcgcagagcggcggccacgcgtggggagacggcggcggacaaaaggccccgcgcacgcccccagatctg

SEQ ID NO: 35840 - DNA, 4491 bp, Oryza sativa
  Clone ID: PAT_MRT4530_39723C.1
atgtccgacgctcggtctcggcgttcggtcgcctcgagcactcagcgtcagcaggacgccgagctcgccgcagcagaagagcgcaggcgagcaacggctcagaccgctgcagcagcagcagcgagggcggccagactggcggcagcggagttggcagcagccagggcggaggcggaggcggaggcggcggaagatgcggcacgtgcggcggaggtagaggttgagaccttgcgcaacagcatcaacggctccatcgccggcgacatcaccgccgacagggagcttgaggagctggcaagaggaagggcacgggagcgagcagagcggtgggcagcagcccacctccacggcggcggcggcggcccaagggaccgcgcgcccgccaacgggaacccagacgggcgcgggcgtgccggcggtagcccggagcccgcacgcggccctcgcaggcagcacggctctctctcccctgaccagcgccatggtcaccacggcgtccagacggtggtcagggactttggtcccggcggtgggtggcctaccctcaccaaaaccaactacatcgagtgggccgcggtgatgagggtgaggctccaggtgcggcacatgtgggaggcagtccggtacggtgacgtcgactacgacgaggatcggagggcactggatgcccttatcgctgcagtcccgcccgagatgcagttctcgctttcccagaagcggactgccaaggaggcctgggacgccatcgctgcggcacgcatcggcagcgaccgcgcccgcaagtccacactgcaggcactccgcaaggagtgggagaacctggccttcaagccaggtgaggatgttgatgactttgctctccgtctcaacactctcttgcagaaaatggtgcagtacggcgacgacacttacgacgaggagagagctgtcgagaagctcttccgctgcgtccctgagaagtacaggcagatcgctcgctcgatcgaatctctgctggacctctccacgatgtcgatcgaggaggcgttaggtcgcctcaaggtcgtcgatggtgatgagccacagcctctctcggggcccatcaccatcggcgggaagctccatctcactcgggagcagtgggaggcctctcagggtgacgggaggaagggggagtcatcttccccgacaggcggcccggctttcctccaccttgatgagccgaaggtactcgtctccctctgcaacggctccagcaacgacaaggctgatgggtggtacctcgacaccggcgccacccatcacatgatcggccgacgggagttcttcaccgagttcgactctagcgtccgaggctccgtcaagttcggggacgcctccggcgtggagatcaagggtgttggctccgtcaccttcaccgccaagtccggtgagcacaggctgctcaccggagtctactacatccccgcgttgaggaattctatcatcagcgtgggacagctggatgagaacggctcacgcgtgttggtcgaggacggactcatgaggatttgggatcgccgtcgtcgccttcttgccaaggtaaccagaggcactaatcgactctacatcctcagcgcgcaggtcgcacaaccagtttgcctcgccgctcgtcgggacgacgaggcgtggcagtggcacgagcgcttcgggcacctccacttcgaggccctgaagcagctcagtgccaaggagatggtgcgagacatgccgtgccttgaccacgtggagcagctctgcgacgtctgcgtggtgacgaagcagcggcggctcccctttccccagcagacgagcttccgagccaaggagcggctcgagctcgtgcacggggacttgtgtggcccagtgacaccagccataccaggaggacgacgttacttcctgctgctcgtcgacgacctctcccgctacatgtgggtgatggtcctcagcagcaagggagaggctgcggacgccatcaggcatgcgcaggctgctgcagaggcggagtgtggccgcaagctgcgcgtgctgcgcaccgacaacggcggcgaattcacagcggctgaattcgcgtcgtactgcgctgatgagggcattcagcgccactacaccacgccgtacagcccgcagcagaacggtgtcgtcgagcgccgcaaccagacggttgtggggatggctcgggccctcctcaagcagagggggatgccggccatcttctggggggaggcggtggtgacggccgcctacatcctcaaccgctcgcctaccaaggccctcgatggcagaacaccgtacgaggcttggcatgggcgcaagccggcggtctcccacctgcgggtcttcggctgcctcgcgttcgccaaggatcttggccacatcggcaagctcgacgacaggagcaccccaggggtgttcatcggctacgcggagggctcgaaggcctaccgcatcctcgacccggagacacagcgtgtgcgcactgcgcgcgacgttgtgttcgacgaagggcgagggtgggtatgggacaaggcggtggacgatggttcgactccgacatacgacgacttcaccgttgagtacgtccacttcgagggagctgggggagtaggcagctcttcttcacctagcgtgtctaccccagcccccgaatctccaccgactccgacaccaacacaccctcgggccacgacttcgactacgacgagctcttcgtcgacaccaccccagccagtgactccacatgctccagcaccaacagccactcctccaagcacgtctactccgacgccagctcgtgttgagcgcagcccggtggagttcgctactccgctctcccacgacggggagcgcatcgacgcgtaccacgacggcgagcagctacggtactgtacgatggaggatcttctcggcgaccagccggtgccgggactggtgcctcgcgacctagaggcacagttgcaccttgcgtgcgacgacggtgagcctcggtcttttgcagaggccgagaaacacgtggcatggcgtgccgcgatgcagtcggagatggacgcggttcaggagaaccgcacctgggagcttgctgacctccctcgtggtcaccgcgcgatcacccttaagtgggtgttcaagctgaagagggatgaagccggagccatcgtcaagcacaaggcttgcttggtggcacgcggtttcgtgcagcaggaggggatcgactacgacgatgccttcgctcccgtggcacggatggagtccgtgcgactccttcttgcgctggctgctcaggaaggctggggcgtccatcacatggacgtcaagtcagcgtttctaaacggcgacttgaaggaggaggtctacgtgcaccagccgccgggatttgtgatccccggcaaggagggcaaggtgctacgcctgcacaaggccctctacggcttgcggcaggcaccgagggcgtggaatgccaagttggattccacgctcaaggggatgggcttcgagcaaagcccgcacgaggcggccatctaccggcggggcaatggaggaaatgccttgctggtgggtgtctacgtcgacgacttggtgatcaccggcaccaaggatgtggaggtcgcagcgttcaaggaggagatgaaggccaccttccagatgagtgatctggggcctctctccttctacctggggctcgaagtgcaccaggacaactccgggatcacgcttcgacagaccgcctacgccaagcgtgtcgttgagctggctgggctcaccgattgcaacccagctctcactccgatggaggagagactgaagctgagccgcgacagcacggcggaggaggtggatgctacacagtaccgacgtcttgtggggagccttcgctacctcacccacacacggccggacttggccttctccgtcggctacgctgtgaagaggatcatccgctacgttgcggggactctcgaccacggtctctactacccgaggtgtcctggcaaggcacacttcgtcgggtacagcgacagcgaccatgccggcgacatcgacaccagcaagagcacgagcgggattctcttcttcctcggcaagtgcctcgttagctggcagtcggtcaagcagcaggtggtggccctgtccagctgcgaggccgagtacatggcggcctccgccgcttcgacccaggcgctctggcttgctcgactgcttagtgatctcctcggcagagacactggaacggtggagctcagggtggatagcaagtccgctctggccctggcaaagaaccccgtttttcacgaacggagcaagcacatccgggtgaggtaccacttcatccgaagctacttggaggaagggagcatcaaggcgagctacatcaacaccaaggaccagcttgcggacttgctcaccaagcctcttgggaggatcaagttcctcgagctctgctccaggatcgggatggcccaacttccccgcaagacgacgcacaagacttag

SEQ ID NO: 35841 - DNA, 489 bp, Oryza sativa
  Clone ID: PAT_MRT4530_39724C.1
atggcgccggtcagggaagggagaattgcgctgcctgggagggccgcgcgcgggctccgggctgccgccggcacgcccgcgcccgtctgggttcccgtcggagggcgcgcggtcccttgggccgccgccgccgccgtggagctcctcaagctccctgtcggtggtgatgttgccggcgatggagccgttgatgctgctgcgcaaggtctcaacctctacctccgccacacgtgccgcatcttccgccgcctctgcttccgcctccgccctggctgctgccaactccgctgctgccagtctggccgccctcgctgctgctgcaacggtctgagccgttgctcgcctgcgctcttctgctgcggcgagctcggcgtcctgctgacgccgagtgctcgaggcgaccgaacgccgagaccgaacgtcgaacatggcgcacctccggggggctgctgcgtggagaggaggaagggaaaggggaaggaggagtag

SEQ ID NO: 35842 - DNA, 380 bp, Oryza sativa
  Clone ID: PAT_MRT4530_39725C.1
gaggcctcagattcgaagtacctggggaacatgaagtggcctgcgccattctgccgctggtgcgggggacgccgggggcggtgaggcgcgggcgacgcgacggcgtgcatcggggcggcggatggggaagtgcgacgaccactgagcggctcctgcttcgccggctaggaggcgcacccaagggcggcgcaaagccgtgccacgacgtcggcggtccggctaggtgggcgtgcaaacggcgacgagcgccaagcggcctggacctcgtcggcggtaggggcgatgccaagccgacgcttcccgtcttcggcaaaggacggtggaggggtgctccaggacagcgcgcgcgcagggaacccgacacgactgcgaggaggtga

SEQ ID NO: 35843 - DNA, 3861 bp, Oryza sativa
  Clone ID: PAT_MRT4530_39726C.1
atgtgggaggcagtctggtacggcgacgtcgactacgacaaagatcgacgggcgctggatgccctcatcactgcagtcccgcccgagatgcagttctcgctttcccagaagcggactgccaaggaggcctgggacgctatcgctgcggcacgcatcggcagcgaccgcgcccgcaagtccacgctgcaggcactccgcaaggagtgggagaacctggccttcaagccaggtaaggatgttgatgactttgccctccgtctcaacaatcttttgcagaagatggtgcagtgcgacgacgacacctacgacgaggagagagctgtcgagaagctcttccactgcgtcccagagaagtacaggcagatcgctcgctcgatcgagtctctgctggacctctccacgatgtcgattgaggaggcgttgggtcgcctcaaggtcgtcgacgatgatgagccacagcctctctcggggcctatcaccattggcgggaagctccatctcactcgggagcagtgggaggcctctcagagtgacggaagaaagggggagtcttctccctcgataggcggccgcaagccgcgcaaggcatgcggaggtgtccagctgcggtgggcgcgaagacgcgccgagggtggcgctcgcagaggtgcccagggcggcgccgccagcaaccacaagccggcacgagacgacacctgccgcaactgtggcaagcttggccattgggccaaagactgtcgacagccacgacgtggccaggcccacgtcgcacaggtggaggaggaagagccggctctgctcctggcacacgcaagcatcgagcttcctccagcggcaccggccgcagcggctttcctccaccttgatgagccgaaggtactcgtctctctctgcaacagctccagcaacaacaaggctgatgggtggtacctcgacaccggcgccacccatcacatgaccggccgacgggagttcttcaccgagttcgaccccggcgtccgaggctccatcaagtttggggacgcctccggcgtggagatcaagggcgttggctccgtcaccttcaccgccaagtccggtgagcacaggctgctcaccggagtttactacatccccgcgttgaggaattctatcatcagcgtgggacagctggatgagaacggctcacgcgtgttggtcgaggacagactcatgaggatttgggatcgccgtcgtcgccttcttgccaaggtaaccagaggcactaatcgactctacatcctcggcgcgcaggtcgcacaaccagtttgcctcaccgctcgtcgggacgacgaggcatggcagtggcacgagcgcttcgggcacctccacttcgaggccctgaagcacctcagtgccaaggagatggtgcgaggcatgccgtgccttgaccatgtggagcagctctgcgacgtcttcatgacgagcttccgagccaaggagcggctcgagctcgtgcacggggacttgtgtggcccagtgacaccggccacaccaggaggacgatgttacttcctgctgctcgtcgacgacctctcccgctacatgtgggtgatggtcctcggcagcaagggagaggctgcggatgccatcaggcgcgcgcaggccgctgcagaggtggagtgcggccgcaagctgcgcgtgctgcgcaccgacaacggcagcgaattcacggcggctgaattcgcgttgtactgcgttgatgagggcattcagcgccactacaccgcgccgtacagcccgcagcagaacggcgtcgttgagcggcacaaccagacggttgtggggatggctcgggctctcctcaagcagagggggatgccggccatcttctggggggaggcggtggtgacagccgtctacatcctcaaccgctcgcctaccaaggccctcgatggcaggacaccgtacgaggcttggcatggacgcaagccggcggtctcccacctacgggtctttggctgcctcgcgttcgccaaggagcttggccacatcggcaagcttgacgacaagagcaccccaggggtgctcatcagctacgcggagggctcgaaggcctaccacatcctcgacccggagacacagcgtgtgcgcacagcgcgcgacgtagtgttcgacgaagggcgagggtgggtatgggacaaggcggtggatgatggtttgactccgacgtacgacgacttcaccatcgagtacgtccacttcgagggagctgggggatcggtgtccccacgtgctccagcaccaacagccactcctccgggcacgtctactccgacgccagctcgtgttgagcgcagcccggtggagttcgctactccactctcccacgacggggagcgcatcgacgcgtaccacgacggcgagcagctacggtaccgtacgatggaagatcttctcagcgaccagccggtgccgggactggtgcctcgcgacctagaggcgcagttgcaccttgcgtgtgatgacggtgagcctgggtcttttgcagaggccgagaaacatgcggcatggcgtgccacgatgcagtcggagatggacgcggttcaggagaaccgcacctgggagtttgctgacctccctcgtggtcaccgcgcgatcacccttaagtgggtgttcaagctgaagagggatgaagccggagccatcgtcaagcacaaggctcgcttggtggcacgcggcttcgtgcagcaggaggggatcgactacgacgatgccttcgctcccgtggcacggatggagtcctcggcatttctgaacggcgacttgaaggaggaggtctacgtgcaccagccgccgggattcgtgctccccagcaaggagggcaaggtgctacgcctgcacaaggccctctacggcttgcggcaggcaccgagggcgtggaatgccaagttggattccacgctcaaggggatgggcttcgagcaaagcccgcacgaggcggccatctaccggcggggcaatggaggaaatgccttgctggtgggtgtctacgtcgacgacttggtgatcactggcaccaaggatgcggaggtggcggcattcaaggaggagatgaaggccaccttccagatgagtgatctggggcctctcttcttctacctggggatcgaagtgcaccaggacaacttcgggatcacgcttcgacagaccgcctacgccaagcgcgtcgttgagctggctgggctcaccgattgcaacccagctctcactccgatggaggagagactgaagctgagccacgacagcacggcggaggaggtggatgctacacagtaccggcgccttgtggggagccttcgctacctcacccacacacggccggacttggccttctccgtcggctacgtcagtcggtgtcctggcaaagcacacttcctcaggtacagcgacagcgaccacgccggcgacatcgacaccagcaagagcacgagcgggattctcttcttcctcggcgagtgcctcgttagctggcagtcggtcaagcagcaggtggtggccctgtccagctgcgaggctgagtaccaggcgctctggcttgctcgactgcttggtgatctcctcggcagagacactggagcggtagagctcagggtggacagcaagtccgctctggccctggcaaagacccccgttttccacgaacggagcaagcacatccgggtgaggtaccacttcatccgaagctacttggaggaagggagcatcaaggcgagctacatcaacaccaaggaccagcttgcggacttgctcaccaagcctcttgggaggatcaagttcctcgagctctgctccaggatcgggatggcccaactttcccacaagacgacacacaagacttag

SEQ ID NO: 35844 - DNA, 813 bp, Oryza sativa
  Clone ID: PAT_MRT4530_39727C.1
caagattacaaccctggagggtcgtaaccaggaaaaagaaaaaaaatataccaccacccacgcaccggcagcgccaacacacacgacaggagaaggttagcactagaccggccgctgctaagcgtgaccggccgccgcacctgcgaatccacggctgacgcaccaatgctccaccaccactcaaactctgccgacatgtggggcccctgcaccgatgccccccccccccgctggccaaccttcgtacgccgaagaccgtgccacacccaccagtagctccaccacgcaccgaggtcgcctcctcctccaccggacgcgcctctcgcgccaatccggcctccctccatcggccgcgcctctcacgccaagccgacctccatctccgctactcgcgcctctcgcgtcgagtcggcctccactgccatcggttgcgccactctgcgtcaagctggtctccgacccctcctccaaacgatgctgcgccggtccgatgtagccgtctgcgacgccctcggcaagccgtccgaggccgccatgcctcctcccaccaccgtcatggtcaccaccacctcactgtcgccgccgtcacctcacacccgactccttccctgcctccactgccgcatctgccgatgtcgccgccgcctcctcagtcatggccgccgcaagccggccgccgttgccgctgctgctgtcatcagccaccgacgccagcagccgccgatgcaaaaccgccgccacctccaacgcagccgaggatatgttgtttgtttatttggagatgaagtgagcatatttcaaggccaaacgtga

SEQ ID NO: 35845 - DNA, 4452 bp, Oryza sativa
  Clone ID: PAT_MRT4530_39728C.1
atgtccgacgctcggtctcggcgttcggtcgcctcgagcactcggcgtcagcaggacgccgagctcgccgcagcagaagagcgcaggcgagcaacggctcagaccgctgcagcagcagctagggcggccagactggcggcagcggagttggcagcagccagggcggaggcggaggcggaggcggcggaagatgcggcacgtgcggcggaggtagaggttgagaccttgcgcatcagcatcaacggctccatcgccggcgacatcaccgccgacagggagcttgaggagctggcaagaggaagggcacgggagcgggcagagcggtgggcagcagcccacctccacggcggtggcggcggcccaagggaccgcgcgcccgccaacgggaacccagatgggcgcgggcgtgccggcggcagcccggagcccgcacgcggccctcgcaggcagtgcggttctttctcccctgaccgacgccatggtcaccacggcgtccagacggtggttagagactttggtcccggcggtgggtggcctaccctcaccaaaaccaactacatcgagtgggccgcggtgatgagggtgaggctccaggtgcggcacatgtgggaggcagtccgtcccgcccgagatgcagttctcgctttcccagaagcggactgccaaggaggcctaggacgccatcactgcggcatgcatcggcagcgaccgcgcccgcaagtccacactgcaggcacccgcaaggagtgggagaacctggccttcaagccaggtgaggatgttgatgactttgctctccgtctcaacactctcttgcagaaaatggtgcagtacggcgacgacacctacgacgaggagagagctgtcgagaagctcttccgctgcgtccctgagaagtacagacagatcgctcgctcgatcgaatctctgctagacctctccacgatgtcgatcgaggaggcgttaggtcgcctcaaggtcgtcgatggtgatgagccacagcctctctcggggcccatcaccatcggcgggaagctccatctcactcgggagcagtgggaggcctctcagggtgacgggaggaagggggagtcatcttccccgacaggcggccgtaagccgcgcaaggcgcggggaggtgtccagctacggtgggcgcgaagacgtgccgagggtggcgcccgcagaggcgcccagggcgttgccaccggcaaccacaagccggcacgagacgacgcctgccgcaactgtggcaagcttggccattgggccaaagactgtcgacagccacgacgtggccaggcccacgtcgcacgggtggaggaagagccggctctgctcctggctcacgcaagcatcgagctacctccagcggcaccggccgcagcggctttcctccaccttgatgagccgaaggtactcgtctccctctgcaacggctccagcaacgacaaggctgatgggtggtacctcgacaccggcgccacccatcacatgaccggccgacgggagttcttcaccgagttcgactccagcgtccgaggctccgtcaagttcggggacgcctccggcgtggagatcaagggtgttggctccgtcaccttcaccgccaagtccggtgagcacaggctgctcaccggagtctactacatccctgcgttgaggaattctatcatcagcgtgggacagctggatgagaacggctcacgcgtgttggtcgaggacggactcatgaggatttgggatcgccgtcgtcgccttcttgccaaggtaaccagaggcactaatcgactcgacatcctcaacgtgcaggtcgcacaaccagtttgcctcgccgctcatcgggacgacgaggcgtggcagtggcacgagcgcttcgggcacctccacttcgaggccctgaagcagctcagtgccaaggagatggtgcgaggcatgccgtgtcttgaccacgtggagcagctctgcgacgtctgcgtggtgacgaagcagcggcggctcccctttccccagcagacgagcttccgagccaaggagcggctcgagctcgtgcacggggacttgtgtggcccagtgacaccagccacaccaggaggacgacgttacttcctgctgctcgtcgacgacctctcccgctacatgtgggtgatggtcctcggcagcaagggagaggctgcggacgccatcaggcatgcgcaggctgctgcaaaggcggagtgcggccgcaagctgcgcgtgctgcgcactgacaacggcggcgaattcacagcggctgaattcgcgtcgtactgcgctgatgagggcattcagcgccactacaccacgccgtacagcccgcagcagaacggcgtcgtcgagcggcgcaaccagacggttgtggggatggctcgggccctcctcaagcagagggggatgccggccatcttctgggggcaggcggtggtgacggccgcctacatcctcaaccgctcgcctaccaaggccctcgatggcaggacaccgtacgaggcttggcatgggcgcaagccggcggtctcccacctgcgggtcttcggctgcctcgcgttcgccaaggagcttggccacatcggcaagctcgacgacaggagcaccccaggggtgttcatcggctacgcggagggctcgaaggcctaccgcatcctcgacccggagacacagcgtgtgcgcactgcgcgcgacgttgtgttcgacgaagggcgagggtgggtatgggacaaggcggtggacgatggttcgactccgacgtacgacgacttcaccgtcgagtacgtccacttcgagggagctgggggagtaggcagctcttcttcacctagcgtgtctaccccagcccccgaatctccaccgactccgacaccaacacaccctcgggccacgacttcgactacgacgagctcttcgtcgacacaaccccagccagtgactccacatgctccagcaccaacagccactcctccaagcacgtctactccgacgccagctcgtgttgagcgcagcccggtggagttcgctactccgctctcccacgacggggagcgcatcgacgcgtaccacgacggcgagcagctacggtaccgtacgatggaggatcttctcggcgaccagccggtgccgggactggtgcctcgcgacctagaggcgcagttgcaccttgcgtgcgacgacggtgagcctcggtcttttgtagaggccgagaaacacgcggcatggcgtgccgcgatgcagtcggagatggacgcggttcaggagaaccgcacctgggagcttgctgacctccctcgtggtcaccgcgcgatcacccttaagtgggtgttcaagctgaagagggatgaagccggagccatcatcaagcacaaggctcgcttggtggcacgcggtttcgtgcagcaggaggggatcgactacgacgatgccttcgctcccgtggcacggatggagtctgtgcgactccttgcgctggctgctcgggaaggctggggcgtccatcacatggacgtcaagtcggcgtttctaaacggcgacttgaaggaggaggtctacgtgcaccagccgccgggatttgtgatccccggcaaggagggcaaggtgctacgcctgcacaaggccctctacggcttgcggcaggcaccgagggcgtggaatgccaagttggattccacgctcaaggggatgggcttcgagcaaagcccgcacgaggcggccatctaccggcggggcaatggaggaaatgccttgctagtgggtgtctacgtcgacgacttggtgatcaccggcaccaaggatgcggaggacaactccgggatcacgcttcgacagaccgcctacgccaagcgcgtcgttgagctggctgggctcaccgattgcaacccagctctcactccgatggaggagagactgaagctgagccgcgacagcacggcggaggaggtggatgctacacagtaccgacgtcttgtggggagccttcgctacctcacccacacacggccggacttggccttctccgtcggctacgtcagtcggttcatgcagcgaccgacgacggagcaccagcaggctgtgaagaggatcatccgctacgttgcggggactctcgaccacggtctctactacccgaggtgtcctggcaaggcacacttcgtcgggtacagcgacagcgaccacgccggcgacatcgacaccagcaagagcacgagcgggattctcttcttcctcggcaagtgcctcgttagctggcagtcggtcaagcagcaggtggtggccctgtccagctgcgaggccgagtacatggcggcctccgccgcttcgacccaggcgctctggcttgctcgactgcttagtgatctcctcggcagagacactagaacggtggagctcagggtggatagcaagtccgctctggccctggcaaagaaccccgtttttcactaa

SEQ ID NO: 35846 - DNA, 684 bp, Oryza sativa
  Clone ID: PAT_MRT4530_39729C.1
gtggctggtgacagcggcagcggcgacggcggctggcttgcgacggccgtgactgaggaggcggcggcgacgtcagcagtggaggcggggaaggagtcgggtgtgaggtgacggcggcgacagtgaggtgatggtgaccgtgacggtggtgggaggaggcatggcggcctcggacggcttgccgagggcgtggcagacagctacatcggaccggcgcagcatcgtttggaggaggggtcggagaacggcttgtcgcagagtggcgcaaccgatggcagcggaggctcggcgcgagaggtgcgggcggcggagatggaggccggcttggcgcgagaggcgcagccgatggagggaggccggattggcgcaagaggcgcgtccggtggaggaggaggcgacctcggtgcgtggtggagctgccggtgggtgtggcgcggtcttcggcgcgcgaaggctggccggcggggggcgtcggtgtaggggccccacatgtcggcagagtttgagtggtggtggagcatcggtgcgtcagccgtggattcgcaggtgcggcggccgatcacgcttagcggtggccggtccggtgctaaccttctcctgtcgtgtgtgttggcgctgccggtgtgtgggtggtggtatattttttctttttcctggttatgacactccagggttgtaaataga

SEQ ID NO: 35847 - DNA, 1145 bp, Oryza sativa
  Clone ID: PAT_MRT4530_3972C.1
atgagtagagggtccactagttggagttttgtttaatctagattgcgtcagccgagggagcgggcgcgcgggccgggtccacgggaagtggggcccacgcgtcagccccacggtccacggtggaccgggcgcacgcggctggcggcggtcggcgccgtgggtcccgcgcgtcagccgcacccgcgggcgcgggcggctgacggccgggcccacctggcagccgcgagggcgcgcccgaaggcggcctcgccggcacggccgacgggagcggcgcgcccgcgccccgatggtcaccgccggcgaccatcggcgcggcggagcggcgcccgagacagaggagggaagggggaaggcgaacggcggtcctcggctcaccccgggacaacgacgacgacgagaacggcggccggagcggaggaaagcggcggcgcgggtcgggatgacgatgacgacgacgctccgacggtcggcgggcgaagcggagcggcggacggggtcgacggggatgcggcgatgccgagggaggtggcgccgagccgggaggaagcccggagtggcgacggcggcggaacggaactcggcggcgatggcggagagggcggagcacggcgcgagcacgaatccgacggcgagagcgagcggtgagcggcggaaacggaagagcggagcacggggagggtttaaatagcgccggggaagggaaagagcggccggagagggaggaatcggtcgcggaggatccggccgccattgattgcgccggcgagggtttcgggaaggaaatcggacgaatccgagggagagagagagggaaaagcgggggaaacgggagagggaatcacggggagtgattcccctctctttaatgcgcgcggggacggcgggagcgagcggatttggcggcggcggcggcgctagggcacgggcgcggcggcgggcgcggcgggaggaggaagacgacgggtgggccccacccgtcagcgagggcaggcgggcgggcccgcccgtcagcggcgcgcgcggggaggagccgatgggccgtgggggaagagagagagagagggagggattgggccgagccggcccaagaagagaaaagggggggaaaagaacttcttttaagattttctttttataaacctttt

SEQ ID NO: 35848 - DNA, 997 bp, Oryza sativa
  Clone ID: PAT_MRT4530_39730C.1
gaaaaaggagttggtgccgctggtataccgtcctctccaatctccatggctcacgtttaaccctcacgtttggccttgaaatatgctcacttcatctccaaataaacaaacaacatatcctcggctgcgttggaggtggcggcggttttgcatcggcggctgctggcgtcggtggctgatgacagcagcagcggcaacggcggccggcttgcggcggccatgactgaggaggcggcggcgacatcggcagatgcggcagtggaggcagggaaggagtcgggtgtgaggtgacggcggcgacagtgaggtggtggtgaccatgacggtggtgggaggaggcatggcggcctcggacggcttgccgagggcgtcgcagacggctacatcggaccggcgcagcatcgtttggaggaggggtcggagaccagcttgacgcagagtggcgcaaccgatggcagtggaggccgactcgacgcgagaggcgcgagtagcggagatggaggtcggcttggcgtgagaggcgcggccgatggagggaggccggattggcgcgagaggcgcgtccggtggaggaggctggcttggcgcgagaagcgcggccggcggtggaagaggcgacctcggtgcgtggtggagctactggtgggtgtggcacggtcttcggcgtacgaaggttggccagcggggggggggggcatcggtgcaggggccccacatgtcggcagagtttgagtggtggtggagcattggtgcagggcgatctcgtatgtgttcatttgttggtctagcggcggccggtcacgcttagcagcggccggtctagtgctaaccttctcctgtcgtgtgtgttggcgctgccggtgcgtgggtggtggtatattttttttctttttcctggttacgaccctccagggttgtaatcttgtaatctttttcctgctctatcaatagaatatcgcaccgtctcgtgcgggttgttaaagaaaaatttaagctt

SEQ ID NO: 35849 - DNA, 866 bp, Oryza sativa
  Clone ID: PAT_MRT4530_39731C.1
atggagatggtggcggggatggaggtggcggcgaggttgacaacggcgggtggctctggcggcgagaccggcgacggcggccggatcaggtgctgcaggccattttggccccccggagggcggatctggcatgctgcaggccgatttgcccccctccccccgcatggcaacgacgtcggggcggctgcattggaggtggcgacggttttgcgacggcggctgctggcgtcggtggctggtgacaacggcagcggcgacggcggccggcttgcgacggccgtgactgaggaggcggcggcgacgtcggcagtggaggcggggaaggagtcgggtgtgaggaggcatggcggcctcggacggcttgccgagggcgtggcagacggctacattggaccggcgcagcatcgtttggaggaggggtcggagaacgtcttgtcgcagagtggcgcagccgatggcagcggaggccggctcggcgcgagaggcgcgggcggcggagatggaggccggcttggcacgagaggcgcagccaatggagggaggccgaattggcgcgagaggcgcgtccggtggaggagaccggcttggcgcgagaggcgcggctggtggtggaagaggcgacctcgggccacatgtcggcagagtttgagtggtggtggagcatcggtgcatcagccgtagattcgcaggtgcggcggccggtcacgcttagcggcagccggtccggagctaaccttctcctggtcgtgtgtgttggcgctgccagtgtgtgggtggtggattattatgcgttcagtcgatccagcaagaaaataaaagtttttagccagggtggagtcagaccgggtgagaatcctctatcataa

SEQ ID NO: 35850 - DNA, 264 bp, Oryza sativa
  Clone ID: PAT_MRT4530_39732C.1
atggcccacctccgccgccgccgcgtcaaccgccaacccccgggcgaaggatccagcaaacgaacagcaacccgcgacgcgcgccgggatccgggggctagggttttgggagaatggatgcggagtttgcttccacggcaaggaactcgagattggagacgacgacgacgaggtctcaggaggaaccacattgttgcacggctcgaggaggaggagatcggatggacgggccttgctgacaccgacgaggccaaggggcagtga

SEQ ID NO: 35851 - DNA, 334 bp, Oryza sativa
  Clone ID: PAT_MRT4530_39733C.1
atggactgccagaagctgtcgcgcgaggcgtgcgcgcacgcggcgcagaacgaccgcctgccggtgcagacggttgtgcaggtgctgtaccacgagcagcggcgcctccgcgcgccatcgcagccgccgagcgccgcgccgtcgtacgccggcggcgagtcgccggcgctgtcgtacaggccgacactgagcttcaacggcgctgtcgtagagcatgatgagtgtcccatggtgatccccatggcgatgcccagaagaaggcggggagttggacgctgcggccgcgcgcacggctacgatggtggcggcgcgtcgtggcggagagaaggaggcg

SEQ ID NO: 35852 - DNA, 891 bp, Oryza sativa
  Clone ID: PAT_MRT4530_39734C.1
atggagctgtcccccgcgaccgccgccaccacacgtcacctccaccttatcctagctgtcgctggctacccaccttgccatcgtaccgcgctgcaacagccagcgggcttcatccacgaccacacgtcacccgcgtacgagattaagggcaccaatggtcattcctgtcaccaccctccttgctcaccgcacggtttttccagtggcggcaggatagatggtgggaaggaggccaggcaacgctggatctgcggtcgcctccggatcgcgcacatagagatctgccagggaggtggccgggtggcgggggctgacggtggtggtggcggcgctggtggcggttgtggcggcggcggcactggtggcggatatggcgacgacgtcggcgggccgcggcgcgtgttgcgacaccggccgggctcgtcaaggacctcgccgcatgacctctggcgcgacaccctcgtcgacgctccctccacgacgccgacgacccgcgcggcgcgctgcacctccagatccgcgccacccaggccggatctggccggctggcggcgacgtctggcgatggtggcagctgacggtggcggatggcgacggtggcggtggcggtggcggctggcgacggtggcgcctgttgcggtgatggttggcaggccatcacaaccgaaggggctgacggtgtgtcggcggcggcggcaacatgtggaggtggggaaggagaccgggtgtaggcgcaacgtcgacggcgggaagatatgtggcagtggcctaggccggatcgctgaagggacaatgtgtcgaccgacgacagtccttcttgtgcggattggttgtggggctttggacagggaatcgctggcgaaagcctcgccgagccgtttggccggctga

SEQ ID NO: 35853 - DNA, 656 bp, Oryza sativa
  Clone ID: PAT_MRT4530_39735C.1
atggctgccatgcgcggaggatggagaatgcggggaatcggcagcgtgccgtggtggcagatgtgcaatgcggtgaagacgggagaaaccattggaatgaggatgtgggatgtgggctgggcttcacatgtgcgtggaggcggcgggggcctggtagcagcgctctcccctccgtcagatccggcaggaggggaggtggcaacggcgccctacatctgccagatcaggaaggagaacagactgccggagcggatgcgccggcgcactctcccttccactccatccagcgggaaggaaggctcgtgcctcctcctctccatcgggcgaccgcgacgtcagcggcttctgcggcaacagcggcggtggtggtgcagaaggcggcggcgccgtcctcctcctctccatccgacgatgatggtggagctggagaaggccagcatggtgggtgaggtgacggctagcgacgggaaggaagaggctccttttagatcatgatgttcttgatgtattactgaaattcttcgatgtgttcttgatatgctcaggtcggcttgatttgtgctctgtgtttgcgatgttcttgatgtgttcttgaagttcttgatgtgctcgggtcggtttgattcgagcaaagccggcaaaaaaaaaaaaaaaaa

SEQ ID NO: 35854 - DNA, 293 bp, Oryza sativa
  Clone ID: PAT_MRT4530_39736C.1
atagtgaaccgtgattccttcactatctcaacatatgcctcccattcggtctctccattcaactctagcatttgcttatgtgaaataggctctccccccatatcatatctatcttgaatggataccaccttgtccgaccaacccagaatatccttcgtacgacacaaaagctcctcgaaggtaggcttagattgaaaaacaatcatcttcaccgacatcccatcgaactgactaccaccattactcgactctaggacacttccaccatagtgcacatgaacaactctctccat

SEQ ID NO: 35855 - DNA, 473 bp, Oryza sativa
  Clone ID: PAT_MRT4530_39737C.1
cggacgcgtggcggacgcgtgggcggacgcgtggggttccttgtgcggccctgtaaatcttgttggagaacagtgttattgatgcactgagggtactgagttacagccagatgttggttctgaagtttcttcctatcaatcatacagagtatggaacaggcagtttctttctggtttttggtggatgaacatgcagtttcttaggtagtgtatctgtcagagtaacccttctacacaggccagtaggttaccattggtaatttctggcaaggctaataatctataagtgaccttcatatataagttcccaatagtttctagtaaggcgagcatggacatatttaagtgaccttcgtcaataagcagtttacatcactggcatagctggcataatgtgggcatagctggcatattgtggctcaagcagtacaaggttaggaactaggatccctttcctgtgtgcgaccttgtag

SEQ ID NO: 35856 - DNA, 282 bp, Oryza sativa
  Clone ID: PAT_MRT4530_39738C.1
atgcgcatccccgccgcgttgagaccagaggcagagggctgtgcgaccagaggggagaggggacagggaaacatgaggggagaggacgacggcgagaagtggagagcggtgagagagagacgagatccgaagcggcgagagagagcggcatgggggctcggtcactcgggggaggataaggtagggcgatgcaatgagtggcaaggagacatcgcgatgacgagcgatgagatggcgctaagtggtgatgagtggctttacggcgcagaggagcaacaatag

SEQ ID NO: 35857 - DNA, 392 bp, Oryza sativa
  unsure (1)..(392): unsure at all n locations
  Clone ID: PAT_MRT4530_39739C.1
cactaaagggaacaaaagcnggagcnccaccgcggtggcggccgctctagaactagtggatcccccgggctgcaggaattcggcacgagccctgtcggtggnatatgagcccgacaaggagttacaagagaggaggcatgctgagtacagtaagacagtttacccgcaatacttggagaaactcagcagtatcatcactgagaacaacggccatatcgcactcggaaagttaacctggggagatttcgtggtagcaggtctgatagactacctgaagcgtatgatgcggatgcntgacctcattgagaagtaccctgaccttccagaacagtggtggacaaggtgtatgccatccctcaagtgaaaggcctaggctgaatgctggcatctaa

SEQ ID NO: 35858 - DNA, 777 bp, Oryza sativa
  Clone ID: PAT_MRT4530_3973C.1
tcagatcttcaagatcttgcggccctggcagctatcaacgacctggagcactgcaaggcctgcctcgtggcctggatcctccatgaaatgattagaaaagagctcataggcttcttttgacagcccggtctgaaccagtacgaagtaaatagaccaaacacgagagcaggacgcctggacgagcatgctctgcggctgcagctgacgctggggcgcgcgctctgatcggtggtggtgcgccgccgcctgcgccgtgggagagtactgctgcttcttcctgcggtgcctgttcctgtccatctcgatctgctccctcctgcactcctcgctgcagaacggcgtgtcccctctgtacatgaagatgtcgccggcgaggcccttgcgacacagggtgcactcgtcgaggaagtggtgcgcctcctccacctccgcgtcctggacgcagaacacggacggggcgccctgcctcgccgcgccgcccctgccaacgttcaccgccttcgcgccgccgctgctgctggtggtggtgcccggccggatggcctgcgcgctgccgccgccggagaagaccgcggcgaagtcggggttgccgaaggcgtggaagtaggacgaggtgaagtccatcgatcgggtcgtcgatcggcgccgccgcgcgcacgtctcgccgcggcacacctacgcagtccggcctgccggatccggatcaggcaggcgagcgagcgaccgagcgacgacggcgatcgacctcggactctcggaggaggggaagaacagcaa

SEQ ID NO: 35859 - DNA, 321 bp, Oryza sativa
  Clone ID: PAT_MRT4530_39740C.1
atggggaagctccagagcgtgtggacacgaggtgaaggagatgcaacaaatcgtgagctgcatcttaaacaccttgaaaatgtagatcttgtaggtcttgactatcttcttggtaccatgaagatcccaaagggggccgcgcccgaaggtggatgtgctctaaggacagcccacaggggccgcatctggggacggatgtgccccaagcaaccgaagatggggattctagttcccgtttctctaatagagggggctgagagcaaaagtgttgcctacgtggcatgccacgttggcggtcaaacgcagtcaaaggacgtttag

SEQ ID NO: 35860 - DNA, 3250 bp, Oryza sativa
  Clone ID: PAT_MRT4530_39741C.1
ctaacacccccccgcagtcgcaacgtcagaacaacggacgttaagactggatcgaaattcattaaaaactggactaggcaagcctttagtgaatacgttagcgtattgtgatgtagttggtacatgtagaactcgaactgctcccacatcaactcgttcatgaacaaagtggagatcgatctcgacatgcttcgttcgttgatgctgaactggatttgttgaaagatatacagcactgacgttgtcacagtaaactaaggttgccttggagggtggagcatataattcatggagtaattgtcgaagccaagaggtttctgctactgcattggcaactgctcgatattctgcttcagcactagaacgagatacagtattctgacgcttagaggaccatgagatgagattgtcaccaagaaacacagcatatccaaaggtagatttacgtgtgtcgggacaaccagcccaattcgcatcagaatatgccatgagatcaaaggacgatgatcgttgaatatgtaaaccatactccaaagtgccacgaatataacgtaaaatccgtttgagagcagtaagatgggactcacggggatcgtgcatatgcaagcaaacttgttgaacggcatatgaaatgtcaggtctggtgaaagtcagatattgcaaagcaccagcgagactacggaaatccgttggatcagagacagacggacttccttcagtggagaacttggccgaagtgtcaacaggtgtaagacaaggtttgcaatctgacatgcctgcacgctccaagatttctagacagtattgtcgttgagtgagtaacaagccacctgaatgaggagtaacattgatgccgagaaaatgattgagaggtccaaggtccttcatggaaaactccttttgtagtgaagtaattgtccaacgaagaatgttagatgaagaagctgttagaacaatgtcatccacatatagcaagagatagacagtgtcggaaccgtgacgatagacaaagagagatgtatcggacttagcttcagtgaaaccaatggacagcaaaaacatagcgaacctgttgtaccaagcacgaggggtttgtttgagtccataaagtgatttgttgaggctgaatgcagtaaactgtctagtagcaggcttgaccactgggctgaatgtttcatcgtagtcgatgccaggacgctgtgtgaatccacgcaaaacccagcgtgccttgtacatgtcaagagtaccgtcggattggaacttgtgtcgaaagatccacttgccagtgacgacattggcatttggtagtggtggcacaaggtcccatgtattgttagccataagagcagtgtactcgtcttccatagcagcgcgccagttgggatcagcaagagcagccttatcctgaatcttggtagtaaaccctggaggtgcagccggctggtcctgtaaagaaaaatcctccaaaaaatcgagattagcagcacagctatcaacaaaaggcttttcggcaaatggaaacgaatgctcatcaaacaccacatgacgtgaaatgtaaaccctattgtaaataggatcaaaacaccggtaccctttatgatcagtaggatagctacggaagacacacaaggtagaacgaggggaaagcttgttggcggcagtagcagagaggttaggatagcacttgcaaccaaaaactcgaagatgatcatatgaggggtgcgtaccatagagtgcaaagaagggtgtgtgatgtttaagagttttagtggggtggcggtttataaggtgagtggctgtgtacaaggcctcaacccaaaaagaggcggggagactggcttgaaagagtagagagcgaacaatgttgttcagagaacggagcgtgcgctcggctttgccgttttgaggagaagtgtgagggcatgacatccgtatggagacgccattgcggaggaagaaatcacgtgcggcagagttgtcgaattcacgaccgttgtcacattggatagaacggatggtggtggaaaagtgtgtttttatataagcaaaaaaacgtaacaaagtgggaaatgtgtcagatttgagacgaagaggaaaagtccagacaaaatgggagcagtcgtcaagaataactaagtagtcccccgtaatcagaacggttgccgccgcttgctgtggaggcaatgaaggcggtggccggagagctggagagccggtgagacttggtgagttcctaaggcgagcggtggcgtttggcgtcatgacggtttccagaagatcgacggagatagagccatatagccaacccaaaatgacacagtccatttgaagccaatgcgcatggttggggtagaacgcattggagaagacgtggtcggtgagggcgtatttgccgagcgtgacgaggaagaggccacgccacttggaatagtttgctgcggcaatgtcgagagtaatagggacgagagccttcacatttaggacagagacagcctgggagtgaagagaggcagtcgtctctgcatctagtactggtgcagcctgaggaacagtaggtagactgccggtgagatggcctcggtggtggcgggtggcacagtagaggtcagggcagccgcagagccagaaaccgagtcggccgcaggagaagagtcgatcggtgcggaggagataagtgtatccagcagggatggaagtcggagacggactgcgggcggaagcaatgcgcgccgcagagtccgcaacgttgctggcggtgacagggtcaatatcgacagaagtggacggcttgatgaaggcagcccggatggcttcagctgcgactttggagatttcatcaacagcggcttgatgagcagtggccgttggtggaagagaacccgttgaaggcggcggagttttggaagagggcgactccgcattagacgacatcgcggcgtcgcgaggagaaccggcggagaagttagagggcgcacgcgtcgaaaaaggaaatgatcgtggcgagaaagcggaagcgagaatcgaaactaatctgataccatgtgagacaattacacagaaaacaatatcgattcataccgaaaacgccagtacatatagcagcgtgaatccgatcgtatccatctcgaaccggcttatagaatcacaaccgggagaggaaagcgaagggaatctgcataagaaaccatctagaatataactctaacattgtgttccactttacactgatgagctcatctcagtgccaacc

SEQ ID NO: 35861 - DNA, 4068 bp, Oryza sativa
  Clone ID: PAT_MRT4530_39742C.1
atgagggtgaggctccaggtgcggcacatgtgggaggcagtccggtacggcgacgtcgactacgacgaggatcggcaggcactggatgccctcatcgctgcagtcccgcccgagatgcagttctcgctttcccagaagcggactgccaaggaggcctgggacgccatcactacggcacgcatcgacagcgaccgcgcccgcaagtccacactgcaggcactccgcaaggagtgggagaacctggccttcaagccaggtgaggatgttgatgactttgctctccgtctcaacactctcttgcagaaaatggtgcagtacggcgacgacacctacgacgaggagagagctgtcgagaagctcttccgctgcgtccctgagaagtacaggcagatcgctcgctcgatcgaatctctgctggacctctccacaatgtcgatcgaggaggcgttaggtcgcctcaaggtcgtcgatggtgatgagccacagcctctctcggggcccatcaccatcggcgggaagctccatctcactcgggagcagtgggaggcctctcagggtgacgggaggaagggggagtcatcttcctcgacaggcggccgtaagccgcgcaaggtgcggggaggtgtccagctacggtgggcgcgaagacgtgccgagggtggcgcccgcagaggcgcccagggcgttgccaccggcaaccacaagccggcacgagacgacgcctgccgcaactgtggcaagcttggccattgggccaaagactgtcgacagccacgacgcggccaggcccacgtcgcacgggtggaggaggaagagccggctctgctcctggctcacgcaagcatcgaactacctccagcggcaccggccgcagcggctttcctccaccttgatgagccgaaggtactcgtctccctctgcaacggctccagcaacgacaaggctgatgggtggtacctcgacaccggcgccacccatcacatgaccggccgacgggagttcttcaccgagttcgactccagcgtccgaggctccgtcaagttcggggacgcctccggcgtggagatcaagggtgttggctccgtcaccttcaccgccaagtccggtgagcataggctgctcaccggagtctactacatccccacgttgaggaattctatcatcagcgtgggacagctggatgagaacggctcacgcgtgttggttgaggacggactcatgaggatttgggatcgccgtcgtcaaaaaaatgccaaggtaaccggaggcactaatcgactctacatcctcagcgcgcaggtcgcacaaccagtttgcctcgccgctcgtcgggacgacgaggcgtggcagtggcacgagcgcttcgggcacctccacttcgaggccctgaagcagctcagtgccaaggagatggtgcgaggcatgccgtgccttgaccatgtggagcagctctgcgacgtctgcgtggtgacgaagcagcggcggctcccctttccccagcagacgagcttccgagccaaggaacggctcgagctcatgcacggggacttgtgtggcccagtgacaccggccacaccaggaggacgatgttacttcctgctgctcgttgacgacctctcccgctacatgtgggtgatggtcctcggcagcaagggagaggctgcggacgccatcaggcatgcgcaggctgctgcagaggtggagtgcggccgcaagctgcgcgtgctgcgcaccgacaacggcggcgaattcacagcggctgaattcacgtcgtactgcgctgatgagggcattcagcgccactacaccatgccgtatagcccgcagcagaacggcgtcgtcgagcggcgcaaccagacggttgtggggatggctcgggccctcctcaagcagagggggatgccggccatcttctggggggagacggtggtgacggctgcctacatcctcaaccgctcgcctaccaaggccctcgatggtaggacaccgtacgaggtttggcatgggcgcaagccggcggtctcccacctacgggtcttcagctgcctcgcgttcgccaaggagcttggccacatcggcaagctcgacgacaggagcaccccaagggtgttcatcggctacgcgaagggctcgaaggccttccgcatcctcgacccggagacacagcgtgtgcgcactgcgcgcgatgttgtgttcgacgaagggcgagggtgggtatgggacaaggcggtggacgatggttcgactccgacgtacgacgacttcaccgtcgagtacgtctacttcgagggagctgggggagtaggtagctcttcttcaccgagcgtgtctaccccagcccccgaatctccaccgactccgacaccaacacaccctcgggccacgacttcgactacgacgagctcttcgttgacaccaccccagccagtgactccacatgctccagcaccaacagccactcctccaagcacgtctactccgacgccagctcgtgttgagcgcagcccggtggagttcgctactccgctctcccacgacggggagcgcatcgacgcgtaccacgacggcgagcagctacggtaccgtacgatggaggatcttctcggcgaccagccggtgccggtgcctcgcgacctagaggcgcagttgcaccttgcgtgcaacgacggtgagcctcggtcttttgcagaggccgagaaacacgcggcatggcgtgccgcgatgcagtcggagatggacgcggttcaggagaaccgcacctgggagcttgctgacctccctcgtggtcaccgcgcgatcacccttaagtgggtgttcaagctgaagagggatgaagccggagccatcgtcaagcacaaggctcgcttggtggcacgcggtttcgtgcagcaggaggggatcgactacgacgatgccttcgctcccgtggcacggatggagtccgaaggctggggcgtccatcacatggacgtcaagtcggcgtttctgaacgacaacttgaaggaggaggtctacgtgcaccagccgccgggatttgtgatccccggcaaggagggcaagcggggcaatggaggaaatgccttgctggtgggtgtctacgtcgacgacttggtgatcgccggcaccaaggatgcagaggtcgcggcgttcaaggaggagatgaaggccaccttccagatgagtgatctggggcctctctccttctacctggggatcgaagtgcaccaggacgactccgagatcacgcttcgacagaccgcctacgccaagcgcgtcgttgagctggctgggctcaccgattgcaacccagctctcactccgatggaggagagactgaagctgagccgcgacagcacagcggaggaggtggatgctacacagtaccggtgtcttgtggggagccttcgctacctcacccacacacggccggacttggccttctccgtcggctacgtcagtcggttcatgcagcgaccgacgatggagcaccagcaggctgtgaagaggatcatccgctacattgcggggactctcgaccacggtctctactacccgaggtgtcctggcaaggcacacttcgtcgggtacagcgacaacgaccacgccggcgacatcgacaccaacaagagcacgagcaggattctcttcttcctcggcaagtgcctcgttagctggcagtcggacaagcagcaagtggtggccctgtccagctacgaggccgagtacatagcggcctccgccgcttcgacccaggcgctctggcttgctcgactgcttagtgatctcctcggcagagacactggaacggtggagctcagggtggatagcaagtccgctctggccctggcaaagaaccccgtttttcacgaacggagcaagcacatccgggtgaggtaccacttcatccgaagctacttggaggaagggagcatcaaggcgagctacatcaataccaaggaccagcttgcggacttgctcaccaagcctcttgggaggatcaagttcctcgagctctgctccaggatcgggatggcccaacttgcccacaagacgacgcacaagacttag

SEQ ID NO: 35862 - DNA, 189 bp, Oryza sativa
  unsure (1)..(189): unsure at all n locations
  Clone ID: PAT_MRT4530_39743C.1
atgacgggcgatgaggcgacgacttggtgcggcgccgacgaggatggtgagcgctcggccggcaggggagatgccgcctcctgctcccgcatcgccgcgccaccatgttctncttccacgggccgccgccgcggatggagagtgacggcgctcggccttgtcggcggcggggcaccccttccctcatga

SEQ ID NO: 35863 - DNA, 520 bp, Oryza sativa
  Clone ID: PAT_MRT4530_39744C.1
ggcgggttgccctccccttcccctctctgtattcctcccgttcctccccttcccctctctgtattcttctatagctgcggctgagcggggagcggtgtgcccgggcgggtgggcgcggcggccgggcgggcgggcgggcaggagggcgggcgtggcgggcaggagggcgtgcgcggcggaggccgagcgggcggcgcggctgtcgggctgtcgcggcgggcaggagggcgtgcgcggcggaggccgagctggcgcggggcggaagccgggctggcgcggcagcagccgggcgggcggagcggaggccgggctggcgcggctgcagccgggcgggcgcggcggaggccaagctggcgcggaggcctagaggacggagaccaggaggccggcggcgccctctcatctgctgccggatttttttttaatttgtgattttttttgaatttgaggatcattggatttgatctgggatgtatgtgatattggatttggtctgtgatggtattggagtgggatgttt

SEQ ID NO: 35864 - DNA, 1116 bp, Oryza sativa
  Clone ID: PAT_MRT4530_39745C.1
atggccattattattcaatctagaaaaagaaagagatgtgcacggagacaaggtgttaagtatggcccaatggatgaaagggatcgaatgagatttgaatacctagacacaaaaatttggaggaatgatacaacttgtatcgacatgcttagacttagaaaagattctttctttcgattttgtaagctgtttagagatcggggtttgcttgaggataccatccacatgcgtgttgaggagcaggttgctatgtttctaaatacagtgggacacaaccttagaaataggttagttcgcactaattttgataggtccggagaaacagttagtcgttatttcaacaaagtacttcatgctattggtgagctacgagatgaactaatcaggcccccctcattggacaccccaaataaaatagccgggaaccccagatgggatccttactttaaggattgtattggagctattgatggtacacacattagagcctctgtccggaagaatatggagtcttcatttcgtggtaggaagtctcatgccacgcaaaatgtaatggcggccgtagattttgatcttcggttcacttatgtcttggttggttgggaggggacagcacatgatgctgtagttttaagagatgcattggaacgtgaaaatggccttcgtattccacaaggaaaatactacctagttgatgctggatatggagccaaacaaggattccttcctccctttcgtgctgtccggtaccacttgaatgagtgggggaataatccggtgcaaaatgagaaggagttgttcaaccttaggcactcatcccttcgaatcacggttgagcgtgcatttgggtcactaaagagaagattcaaaattcttgatgatgccactccattcttccctttcccaactcaagtagatattgtagcagcttgctgcattattcataattgggtcataaatgatgggattgatgagcttttcataggtccaaatgaaataattgaacccaatgaaacatctattggcgaagcaaatgaacatgcattgatggttcaattcaggcaagcccttgctgatcaaatgtgggaggaccgtcaaaaccatcgtggacactaa

SEQ ID NO: 35865 - DNA, 2845 bp, Oryza sativa
  Clone ID: PAT_MRT4530_39746C.1
tcagagccacactttcctgtaggctaaacatctcttgttccaccccttcccaagctcgattgagctctcagccagcagcagcagcagcaccggttgctcctccttcccctttcccttccccctctccacgcagcagccccccggaggtgcgccatgtccgacgctcggtctcggcgttcggtcgcctcgagcactcggcgtcagcaggacgccgagctcgccgcagcagaagagcgcaggtgagcaacagctcataccgctgcagcagcagcgagggcggccagactggcggcagcggagttggcagcagccagggcggaggcggaggcggcggaagatgcggcacgtgcggcggaggtagaggttgagaccttgcgcagcagcatcaacggctccatcgccggcgacatcaccgccgacagggagcttgaggagctggcaagaggaagggcacgggagcgagcagagcggtgggcagcagcccacctccacggcggcgacggcggcccaagggaccgcgcgcccgccgacgggaacccagacgggcgcgggcttgctggcgggcgcgggcttgctggcggcagcccggagcccgcacgcggccctcgcaggcagcacggctctctctcccctgaccggcgtcatggtcaccacggcgtccagatggtggtcagggactttggtcccggcggtgggtggcctaccctcaccaaaaccaactacatcgagtgggccgcggtgatgagggtgaggctccaggtgcggcacatgtgggatgcagtccggtacggtgacgtcgactacgacgaggatcggcgggcactggatgccctcatcgctgcagtcccgcccgagatgcagttctcgctttcccagaagcggactgccaaggaggcctaggacgccatcgctgcggcacgcatcggcagcgaccgcgcccgcaagtccacactgcaggcactccgcaaggagtgggagaacctggctttcaagccaggtgaggatgttgatgacttgcagaaaatggtgcagtacggcgacgacacctacgatgaggagagagctgtcgagaagctcttccgctgcgtccctgagaagtacaggcagatcgctcgctcgatcgaatctctgctggacctctccacgatgtcgatcgaggaggcgttaggtcgcctcaaggtcgtcgatggtgatgagccacagcctctctcggggcccatcaccatcggcgggaagctccatctcactcaggagcagtgggaggcctctcagggtgatgggaggaagggggagtcatcttccccgacaggcggccataagccgcgcaaggcgcggggaggtgtccagctatggtgggcgcgaagacgtgccgagggtggcgcccgcagaggcgcccagggcgttgccaccggcaaccacaagccggcacgagacgacgcctgccgcaactgtgacaagcttggccattgggccaaagactgtcgacaaccacgacgtggccaggcccacgtcgcacgggtggaggaagagccggctctgctcctggctcacgcaagcatcgagctacctccagcggcaccggccgcagcagctttcctccaccttgatgagccgaaggtactcgtctccctctgcaacggctccagcaacgacaaagctgatgggtggtacctcgacaccggcgccacccatcacatgaccggccgacgggagttcttcaccgagttcgactccagcgtccgaggctccatcaagttcggggacgcctccggcgtggagatcaagggtgttggcttcgtcaccttcaccgccaagtccggtgagcacaggctgctcacccgagtctactacatccccgcgttgaggaattctatcatcagcgtgggacaactggatgagaacggctcacgcgtgttggtcgaggatggactcatgaggatttgggatcgccgtcgtcgccttcttgccaaggtaaccagaggcactaatcgactctacatcctcagcgcgcaggttgcacaaccagtttgcctcgccgctcgtcgggacgacgaggcgtggcagtggcacgagcgcttcgggcacctccacttcgaggccctgaagcagctcagtgccaaggagatggtgtgaggcatgctgtgccttgaccacgtggagcagctctgcgacgtctgcgtggtgacgaagcagcggcggctcccctttccccagcagacgagcttccgagccaacgagcggctcgagctcgtgcacggggacttgtgtggcccagtgacaccggccacaccaggaggacgacgttacttcctgctgctcgtcgacgacctctcccgctacatgtgggtgatggtcctcggcagcaagggagaggctacggacgccatcaggcatgagcaggctgctgcagaggcggagtgcggccgcaagctgtgcgtgctgcgcaccgacaacggcggcgaattcacagcggctgaattcgcgtcgtactgcgctgatgagggcattcagcgccactacaccacgccgtacagcccgcagtagaacggcgtcgtcgaacggcgcaaccagacagttatggggatggctcgggccctcctcaagcagagggggatgccggtcatcttctggggggaggcggtggtgacggccgcctacatcctcaaccgctcgcctaccaaggccctcgatggcaggacaccgtacgaggcttggcatgggcgcaagccggcggtctcccacctgcgggtcttcggctgcctcgcgttcgccaaggagcttggccacatcggcaatggtcagtatagatatagacattcgttctgttttgcatatgctatgaaag

SEQ ID NO: 35866 - DNA, 632 bp, Oryza sativa
  Clone ID: PAT_MRT4530_39747C.1
gaacagtagaagcagggcggcgacgacgcacggggtaggagctcgccggccgtccacgctcgggggaggatctcgccggccggccgtgcgcatggggaggagctcaccggcgtccgcgcgcgggggaggagcccgccggccgtccgcctgccgggtgaggagctcgtgggcggccgtgcgcgggggaggagctcgctggccgtcccgcgagctcgccggccgtccgtgcgcaaggggaggagctcgccggcgtccgcgcgcgggagaggagcccgccggccgtccgcctgccggttgaggagcccgctggctgtcccgcgagctcgccggcggtccgtgcgtgggggaggagctcgcctgccgtccgcgcgccggggaggagctcgccagcgtcggcgcgcgggtatggagctcgcctgccgtacgcgcgccgggagaggagctcgccggcgtccgcgcgcgggggtggagcccgccggccgtccgcgcgcgggggtggagcccgccggccgtccgcgcgcctggggaggagctcgccggccgttcgcctgccgggggaggagctagccgtgctttaatttgggcatacgtatatatcgatcgatcgatgcatatgcatgcttgcatatgct

SEQ ID NO: 35867 - DNA, 5118 bp, Oryza sativa
  Clone ID: PAT_MRT4530_39748C.1
atggagagggtggtcgggcgcggaggcccggccggcgcagcgtgcggtgaggcggcggccggcatgcagatccaggtccatcaagatatagaagggttgcaaacttgcagcaactactatgtttcggtgctgattttggttttattgttttttgtcttgtcccttgcagagaacgtgagggcactggacgagggggacggccgcctcgccgacaaggttggggccgtgagggacagcgacggcctcggcgcgctgcacctcgccgccgcccgtgagaagctgcccgtttgccattatcttgtggaggagctccgcgtggatgttgatgccgtcgacaacaaaggtgaaacggcattgacatttgcgatcaattgtgggaatgaggacatggtgcggtatcttcttgatcatggggctgatactgaaaagatcaacaacgatggacttactgctctccattttgctgctggtgaaggaaagtgcaaaatagttgaaattttgctgtctaaaggagcttatattgattcgttgactactggtggaacagcactgcactgtgctgcttataatgggagggatgctgttgtgaagattttattagaccaccatgcagatcacaagaaggtatcttggggtgcctatacacctctttttgttgctgtcgagtctggctcactgaaatgtctgaagctcctgattgaggctggcgcagatgtgaaaggaattggtaaagaaatacctttaataactgctgcttctaagggcttaactgacatcataaagtgcttacttgaggctggtgcagaccctaatgttcgtgactgtcttggacacatgcctatagaagttgctgcacgctgcggtgagcggaaagctattgagatcctatttccagtcacttctcgtattcagtctgtgtctgattggactgttgatggaatcattaatcacgtaaagtcactacctgaggtgaaggaggaagatttttgtgaagctacgcttgatatgggaaaattccaaggccgtgaagcagtcaagaataaagattatcttggtgccatgaacatttatactgcggctattgctctcaatcctagagatgcatctttattctcaaataggagcctttgttggcttcacttgggtgaggggaagaaggctttgatggatgctgaagcttgcaggatgatgcgaccagactggccgaaagcttgctaccgtaaaggaactgctctaatgttactgaaggacagcatctaccctttagcatatttttcagttgctaggacaactgcggtgcggcacatgtgggaggcagtccggtacggtgacgtcgactacgacgaggatcggcgggcactggatgccctcatcgttgcagtcccgcccgagatgcagttctcgctttcccagaagcggactgccaaggaggcctgggacgccatcgctgcggcacgcatcggcagcgaccgcgcccgcaagtccacactgcaggcactccgcaaggagtgggagaacctggccttcaagccaggtgaggatgttgatgactttgctctccatctcaacactctcttgcagaaaatggagagagctgtcgagaagctcttccgctgcgtccctgagaagtacaggcagatcgctcgctcgattgaatctctgctggacctctccacgatatcgatcgaggaggcgttaggtcgcctcaaggtcgtcgatggtgatgagccacagcctctctcggggcccatcaccatcggcgggaagctccatctcactcgggagcagtgggaggcctctcagggtgacgggaggaagggggagtcatcttccccgacaggcggcccggctttcctccaccttgatgagccgaaggtactcgtctccctctgcaacggctctagcaatgacaaggctgatgggtggtacctcgacaccggcgccacccatcacatgaccggccgacgggagttcttcaccgagttcgactccagcgtccgaggctccgtcaagttcggggacgcctccggcgtggagatcaagggtgttggctccgtcaccttcaccgccaagtccggtgagcacaggctgctcaccggagtctactacatccccgcgttgaggaattctatcatcagcgtgggacagctggatgagaacggctcacgcgtgttggtcgaggacggactcatgaggatttgggatcgccgtcgtcgccttcttgccaaggtaaccagaggcactaatcgactctacatcctcagcgcgcaggtcgcacaaccagtttgcctcgccgctcgtcgggacgacgaggcgtggcagtggcacgagcgcttcgggcacctccacttcgaggccctgaagcagctcagtgccaaggagatgctctgcgacatctgcgtggtgacgaagcagcggcggctcccctttccccagcagacgagcttccgagccaaggagcggctcgagctcgtgcacggggacttgtgtggcccagtgacaccggccacaccaggaggacgacgttacttcctactgctcgtcgacgacctctcccgctacatgtgggtgatggtcctcggcagcaagggagaggctgcggacaccatcaggcatgcgcaggctgctgcagaggcggagtgcggccgcaagctgcgcgtgctgcgcaccgacaacggcggcgaattcacagcggctgaattcgcgtccccgcagcagaacggcgtcatcgagcggcgcaaccagacggttgtggggatggctcgggccctcctcaagcagagggggatgccggccatcttctggggggaggcggtggtgacggccgcctacatcctcaaccgctcgcctaccaaggccctcgatggcaggacaccgtacgaggcttggcatgggcgcaagccggcagtctcccacctgcgggtcttcggctgcctcgcgttcgccaaggagcttggccacattggcaagctcgacgacaggagcaccccaggggtgttcatcggctacgtggagggctcgaaggcctaccgcatcctcgacccggagacacagcgtgtgcgcactgcgggcgacgttgtgttcgacgaagggcgagggtgggtatgggacaaggcggtggacgatggtttgactccgatgtatgacgacttcaccgtcgagtacgtccacttcgagggagctgggggagtaggcagctcttcttcacctagcgtgtctaccccagcccccgaatctccaccgactccgacaccaacacaccctcgggccacgacttcgactacgacgagctcttcgtcgatacaaccccagccagtgactccacatgctccagcaccaacagccactcctccaagcacgtctactccgacgccagctcgtgttgagcgcagcccggtggagttcgctactccgctctcccacgacggggagcgcatcgacgcgtaccacgacggcgagcagctacggtaccgtacaatggaggatcttctcggcgaccagccggtgccgggactggtgcctcgcgacctagaggcgcagttgcaccttgcgtgcgacgacggtgagcctcggtcttatgtagaggccgagaaacacgcggcatggcgtgccgcgatgcagtcggagatggacccggttcaggagaaccgcacctgggagcttgctgacctccctcgtggtcaccgcgcgatcacccttaagtgggtgttcaagctgaagagggatgaagccggagccatcgtcaagcacaaggctcgcttggtggcacgcggtttcgtgcagcaggaggggatcgactacgacgatgatttcgctcccgtggcacggatggagtctgtgcgactccttcttgcgctggctgctcaggaaggctggggcatccatcacatggacgtcaagtcggcgtttctaaacggtgacttgaaggaggaggtctacgtgcaccagccgccgggatttgtgatccccggcaaggagggcaaggtgctacgcctgcacaaggccctctacggcttgcggcaggcaccgagggcgtggaatgccaagttggattccacgctcaaggggatgggcttcgagcaaagcccgcacgaggcggccatctaccagcggggcaatggaggaaatgccttgctggtgggtgtttacgtcgacgacttggtgatcaccggcaccaaggatgcggaggtcgcggcgttcaaggaggagatgaaggccaccttccagatgagtgatctggggcctctctccttctacctggggatcgaagtgcaccaggacaactccgggatcacacttcgacagaccgcctacgccaagcgcgtcgttgagctggctgggctcaccgattgcaacccagctctcactccgatggaggagagactgaagctgagccgcgacagcatggcggaggaggtagatgctacacagtaccgacgtcttgtggggagccttcgctacctcacccacacacggccggacttggccttctccgttggctacgtcagtcggttcatgcagcgaccgacgacggagcaccagcaggctgtgaagaggatcatccgctacgttgcggggactctcgaccacagtctctactacccgaggtgtcttggcaaggcacacttcatcgggtacagcgacagcgaccacgccggcgacatcgacaccagcaagagcacgagcgggattctcttcttcctcggcaagtgcctcgttagctggcagtcggtcaagcagcaggtggtggccttgtccagctgcgaggccgagtacatggcggcctccgccgctttgacccaggcgctctggcttgctcgactgcttagtgatctcctcggcagagacactggaacggtggagctcagggtggatagcaagtccgctctggccctgccaaagaaccccgtttttcacgaacggagcaagcacatccgggtgaggtaccacttcatccgaagctacttggaggaagggagcatcaaggcgagctacatcaacaccaaggaccagcttgcggacttgctcaccaagcctcttgggaggatcaagttcctcgagctctgctccaggatcgggatggcccaacttccccacaagacgacgcacaagacttag

SEQ ID NO: 35868 - DNA, 2454 bp, Oryza sativa
  Clone ID: PAT_MRT4530_39749C.1
atggacgtcaagtcgacgtttcagaacggcgacttgaaggagaaggtctacgtgcaccagccgccgggatttgtgatccccggcaaggagggcaaagtgctacgcctgcacaaggccctctatggcttgcggcaggcaccgagggtgtggaatgccaagttggattccacgctcaaggggatgggcttcgagcaaagcccgtacgagacggccatctaccgacggggcaatggtggaaaagccttgctggtgggtgtctacgtcgacgacttggtgatcaccggcaccaaggatgcggaggtcgcagcgttcaaggaggagataaaggccaccttccagatgagtgatctggggcctctccttctacctggggatcgagctctcactctgatggaggagagactgaagctgagccgcaatagcacgacggaggaagtggatgctacacagtaccgacgtcttgtggggagccttcgctacctcacccacacacggccagacttggccttctccgttggctacgtcagtcggttcatgcagcgaccgacgacggagcaccagcaggctgtgaagaggatcatccgctacgttgcggggactcttgaccacggtctatactactcgaggtgtcctggcaaggcacacttcgtcgggtacagcgacagcgaccacgccggcgacatcgacaccagcaagagcacgagcgggattctcttcttcctcggcgagtgcctcgttagctggcagtcggtaaagcagcagatggtggccctgtccagctgcgaggccgagtacatggcggcctccgccgcttcgacccaggcgctctggcttgctctactgcttagtgatctcctcggcagagacattggagcggtggagctcagggtggatagcaagtccgctctagccctggtaaagaaccctggttttcacgaacggagcaagcacatccgggtgaggtatcacttcatccgaagctacttggaggaagggagcatcaaggcgagctacatcaacaccaaggaccagcttgcggatttgctcaccaagccccttgggaggatcaagttccttgaggtttgctcccggatcgggatggctcaactttcccacaagacggcgcacaagacttagggggagaatgtatgaataagtcttggtcttggtcttgtggtgctttttcttgctttttagctctgcaaaatcaccataagcacgaaagccatggatcgaccaaagatatgctgctctcatagtcaagttttccttcttcgaagcatcccatgtggttacatcatcccatatctgaagtaactcatccaccaaaggttccaatagtgtgctcaagttctttccaggatgttgaggaccagggataacaagggcaagcattatgttctctggtttcatgcaaatgtctggtgggagattgtatggtactataaagacaggccaacaggagtatgacgcagcagtcatgttgaaaggtgtgaatccatctatagctagaccaagccggacatttcttggatcttgtgcaaaagtagaaaaatctacatcaaattgaatccatgcttcaccatcacgtgggtgcatcatcacatttagcttatgtgtagggtgttctttgtgccatctcatttggactgctatctcttcattactatacaacctttgcagtctaggtatgatagggagataccttagaaccttacgtggaactttgctattgtcattctcataccgagatgttttgaaaaagtcacatctaactttctcggcattgtctttgtagtaaagcatgcaattgttgtagcacacataaattttttcatatggcatccctatgccagcaagagttttctttgaacgatagaagttatcatccaactttgacccagcagggaggagctcatggatcaattgcatcacatcatcatagcatgctgatggcatgttgtactgtgacttgatggcaagcagacgagctatggtagataaacaggtgtgtgttgtttgatcgtgtaccttttcatctgcactagccaccatcttgtagtaggcctgagcagaagctgtgggttcttcctcagaaagctggtaatcgctggctatgtcagccaacatgtcatccatccgatccggttcatcaaaatcttcattaccttctgaagttgtggcttgatcttgaccaatacactcaccatgttctgtccaattcatgtaattctccttgaaaccctcacgacacaaatgcatctcgatcatttgccgtttgtgcgaaacgtagttccaacataaggagcatgggcacttaatttttccactaacaacgatatttggaagggaaaaggcgtgatcgaagaaacccttagtttgttctacccactcatcagtcagtgcacaaccacgtttccaccgagcatacatccactcacggttattcgccat

SEQ ID NO: 35869 - DNA, 357 bp, Oryza sativa
  Clone ID: PAT_MRT4530_3974C.1
atgtcggaaggacaaggtttggccgtatcagaatccttctcgagcttggatgtcgtcgatgttccgttcttcgtctcgacgggaggatttttcgacatggaatcgccttggttcgtagccactgcattcttgtctccggtcattggaggaccggttgagatcggcgtcgtgaaccttgagtaccaaggccccctacctggcgcgccactgtcaacgggtgatacccgtagaccggatatagagggtattggggttacaaagggaacaagggaacttgtcggatccggcgagattgtagtcgagttgtctcgactagttctcgatgacttggctcctcatctggaggtctccaagtag

SEQ ID NO: 35870 - DNA, 205 bp, Oryza sativa
  Clone ID: PAT_MRT4530_39750C.1
agacaaaccaatatttatatttcacagagtgagatttaaaatcatagacggaccaatatttatatttcacaaacaacattttacataaagctataatcctcatttatttccagccacggacttttgacaccttattttttcatttttgagacaaacacacacacacacatgtatgagccatcacactggattgactctttattta

SEQ ID NO: 35871 - DNA, 5217 bp, Oryza sativa
  Clone ID: PAT_MRT4530_39751C.1
gcggcccgtacccttcccaaggagaggcggcggcagcggcggcggaggtggcggcggccgtatgcgggagagagaaagagctcagctcgcatggccatcgcggtgaggtcggctgcggcggtggcgaggcactccctgcgccctccgctggccgcgcccggcagcatccgcggcgcctcgctcctgccgccgcagcgcgctcgcggcgtgggcccgtgtcgcgcccgcgctcgcgcggcgagctcctccgcgactggaggtggcgggcaccttcctccgctgttcagcgtggcgccgatgatggactggacggacaaccactaccggacgctcgcgcggctgatctcgaagcacgcgtggctctacacggagatggtggtcgcggagaccatcgtgcatcagaaagataacttggatagatttttagcgtttcctgctgaacagcatcctattgtgttgcaaattggtggaagtaatctggataacttagcgaaggcaactgaactggcaaatgcttattcgtacgatgagatcaacctaaactgtggctgccccagtggcaaagttgctggtcatggttgcttcggtgctcgcttaatgtttgatccagagtttgtaggggatgctatgtcagctattgctgccaattgtaatgtcccagtcagcgttaagtgcagaattggtgttgatgatcgtgactcctacgaagaactttgtgaatttgtagataaggttgtttcaaaatcaccaactaggcatttcattattcatgcccggaaggcattgctaagtggcctcagtcctgcagaaaatcggaacgttcctcctttaaaaaaaccagaaaattgccccatctcgagtgccatcctcttctcaatgagagtaaccattgaagttctaacatctgggagcttgaggagctggcaagaggaagggcacgggaacgggcagagcggcggcggcggcccaagggaccgcgcacccgccgacgggaacccagatgggcgcgggcgtgccggcggcagcccggagcccgcgcgcggccctcgcaggcagcgcggctctccctcccctgaccggtgccatggtcaccacggcgtccagacggtggtaagggactttggtctcggcggtgggtggcctaccctcaccaaaaccaactacatcgagcgggccgcggtgatgagggtgaggctccaggtgcggcacatgtgggaggcagtccggtacggcgacgttgactacgatgaggatcggcgggcactggatgccctcatcgctgcagtcccgctcgagatgcagttctcgctttcccataagtggactgccaaggaggcctgggatgccatcgctgtggcacgtatcggcagcgaccgcgcccgcaagtccacactgcaggcactccgcaaggagtgggagaacctggccttcaagccaggtgaggatgttgatgactttgccctccgtctcaacactcttttgcagaagatggtgcagtacggcgacgacacctacgacgaggagagagctgtcgagaagctctttcgttgcgtcccagagaagtacaggcagatcgctcgctcgatcgagtctctgctggacctctccacgatgtcgatcgaggaggcgttaggtcgcctcaaggtcgtggacggcgatgagccacagcctctctcggggcctatcaccattggcgggaagctccatctcactcgggagcagtgggaggccagccagggtgacgggaggaagggggagtcctctccctcgacaggcggccgcaagccgtgcaaggcgcgcggaggcgtccaactgcggtgggcgcgaagacgcgccgagggtggtgctcgcagaggcgcccagggcggcgccgccggcaaccacaagccggcacgagacgacgcttgccgcaactgtggcaagcttggccattgggccaaagactgtcgacagccacgacgcggcatcgagctatctccagcggcaccggccgcaacggctttcctccacctcgatgagccgaaggtacacgccttcctcggcaacagctccagcaacgacaaggctgatgggtggtacctcgacaccggcgccacccatcacatgactggccggcgggagttcttcaccgagcttgactctagcgtccgaggctccatcaagtttggggatgcctccggcatggagatcaagggcgtcggctccgtcaccttcaccgcaaagtccggtgagcacaggctgctcaccggagtctactacatccccgtgttgaggaactctatcatcagcgtgggacagctggatgagaacggctcacgcgtgttggtcgagcacggagtcatgacgatttgggatcgccgccgtcgccttcttgccaaggtaaccagaggcactaatcgactctacatcctcagcgcgcaggtcgcacaaccagtttgcctcgccgctcgtcgggacgacgaggcgtggcagtggcacgagcgtttcgggcacctccactttgaggccctaaagtggctcagcgccaaggagatggtgcgaggcctgccgtgccttgaccacgtggagcagctctgcgacgtctgcgtcctaacgaagcagaggcggctcccctttccccagcagacgagtttccgagccaaggagcagctcgagctcgtgcacggggacttgtgtggcccagtgacaccggccacaccaggaggacgacgttacttcctgctgctcgtcgacgacctctcccgctacatgtgggtgatggtcctcggcagcaaggcagaggctgcggacgccatccggcgcgcgcaggctgctgcagaggtggagtgcggccgcaagctgcgcgtgctgcgcaccgacaacggcggcgaattcacggcggctgaatttgcgtcgtactgcgctgatgagggcattcagcgccagtacaccgcgccgtacagcccgcaacagaacggtgtcaagcggcgcaaccagacggttgtagggatggctcgggctctcctcaagcagagggggatgccggccatattctggggagaggtggtggtgacggccgtctacatcctcaaccgctcgcctacgaaggccctcgatggcaggacaccgtacgaggcttggcatgagcgcaagccgggggtctcccacctgcgggtcttcggctgccttgcgttcgtcaaggagcttggccacatcggcaagctcgacgacaggagcaccccaggggtgttcatcggctacgcggagggctcgaaggcctatcgcatcctcaactcggagacacagcgtgtgcgcacagcgcgcgatgtagtgttcgacgaagggcgagggtgggtatgggacaaggcggtggacgatggttcgactccgaagtacgacgacttcaccgtcgagtacgtccacttcgagggagctgggggagtaggcaactcttcttcaccgagcgtgtctaccccagtccccgagcctccaccgactccgacaccaacacactctcgggccacgacttcgactacgacgagctcctcgcctacaccaccacagccggtgaccccacgcgctccagcaccaacagccactcctccgagcacgtctactccgacgccagctagtgttgagcgcaacccggtggagttcgctactccgctctcccacgacggggagcgcatcgacgcgtaccacgacggcgagcagctacggtaccgtacgatggaggatcttctcggcgaccagccggtgccgggactggtgcctcccgacctggaggcgcagttgcaccttgcgtgcgacgacggtgagcctcggtctttcgcagaggccgagaaacacgtggcatggcgtgccgcgatgcagtcggagatggacgcagttcaggagaaccgcacctgggagcttgctgaccttcctcgtggtcaccgcgcgatcacccttaagtgggtgttcaagctgaagagggatgaagccggagccatcgtcaagcacaaggctcgcttggtggcacgcggaaggctgggcgtccatcacatggacgtcaagtcggcgtttctaaacggcgacttgaaggaggaggtctacgtgcaccagccgccaggatttgtgatccccggcaaggagggcaaggtgctacgcctgcacaaggccctctacggcttgcggcaggcaccgagggcgtggaatgccaagttggattccacgctcaaggggatgggcttcgagcaaagcccgcacgaggcggccatctaccggcggggcaatggaggaaatgccttgctggtgggtgtctacgtcgacgacttggtgatcaccggcaccaaggatgcggaggtcgcggcgttcagggaggagatgaaggccaccttccatatgagtgatcaggggcctctctctttctacctggggattgaggtgcaccaggacgactccgggatcacgcttcgacagaccgcctacgccaagcgcgtcgttgagctggctaggctcaccgattgcaacccagctctcactccaatggaggagagactgaagctgagccgtgatagcacgacggaggaagtggatgctacacagtaccggcgtcttgtgggaagccttcgctacctcacccacacggctggacttggccttctccgtcggctacgtcagtcggctgtgaagaggatcatccgctacgttgcggggactctcgaccacggtctctactacccgaggtgtcctggcaaggcacacttcgtcgagtacagcaacagcaaccacgccggtgacatcgacaccagcaagagcacgagcgggattctcttcttcctcggcgagtgcctcgttagctggcagtcagtcaagcagcaggtggtggccctgtccagctgcgaggccgagtacatggcggcctccgccgcttcgacccaggcgctctggcttgctcgactgcttagtgatctcctcggcagagatactggagcggtggagctcagggtggatagcaagtccgctctggccctggcaaagaaccccgtttttcacgaatggagcaagcacatctgggtgaggtaccacttcatccgaagctacttggaggaagggagcatcaaggcgagctacatcaacaccaaggaccagcttgcggacctgctcaccaagcctcttgggaggattaagttcctcgagctctgcttcaggatcgggatggctcaacttccccacaagacgacgcacaagacttag

SEQ ID NO: 35872 - DNA, 5271 bp, Oryza sativa
  Clone ID: PAT_MRT4530_39752C.1
ctaccgccggccggcgccagatccacgccgcccaccgccggcctccgcgccgccacgcgtgcaccggccgccacccacgcgcgcgccagactccgccgccttgcgccgcagcagccctctccaccaccgaccgagccgctcaacatgcgccgccccacggtgccgccgccagcactccggccgaaaggcggagggactggctagatccggcgacggcgccgccggatccgcctgccgtcgccacccaccgaagccgtcgcggcagtcgagcccgctgccttcgcccgtcgcagcccgccgcgcgagcctgcccgccgccgccgcccgtcgccgcccgccgcgtgttgcgccgctctcggccggccgccggctgccgcgcgccccgccctggaaattgtcaaaagacctagcaggtatgttgtcgtcaaattccttcatcatatcccatggaccatctccaactccaaccaaaattatagacaagggaaattcacccttcccaagctcggttgagctctcagccagcagcagcagcagcaccggttgctcctccttcccctttcccttccccctctccacgcagcagccccccgcaggtgcgccatgtccgacgctcggtctcggcgttcggtcgcctcgagcactcggcgtcagcaggacgccgagctcgctgcagcagaagagcgcaagcgagcaacagctcagaccgctgcagcagcagcgagggcggccagactggcggcagcggagttggcagcagccagggaggaggcggaggcagaggcggcggaagatgcggcacatgcggcggaggtagaggttgagaccttgcgcagcagcatcaacggctccatcgccggcgacatcaccgccgacagggagcttgaggagctggcaagaggaagggcacgggagcgggcagagcggtgggcagcagcccacctccacggcggcggcggcggcccaagggaccgcgcgcccgccaacgggaacccagatgggcgcgggcgtgccggcggcagcccggagcccgcacgcggcccttgcaggcagcgcggctctctctcccctgaccggcgccatggtcaccacggcgtccagacggtggtcagggactttggtcccggcggtgggtggcctaccctcaccaaaaccaactacatcgagtgggccgcagtgatgagggtgaggctccaggtgcggcacatgtgggaggcagtccggtacggcgacgtcgactacgacgaggatcggcgggcactggatgccctcatcgctgcagtcccgcccgagatgcagttctcgctttcccagaagcggactgccaaggaggcctgggacgccatcgctgcggcacgcatcggcagcgaccgcgcccgcaagtccacactgcaggcactccgcaaggagtgggagaacctggccttcaagccaggtgaggatgttgatgactttgctctccgtctcaacactctcttgcagaaaatggtgcagtacggcaacgacacctacgacgaggagagagctgtcgagaagctcttccgctgcgtccctgagaagtacagacagatcgctcgctcgatcgaatctctgctggacctctccacgatgtcgatcgaggaggcgttaggtcgcctcaaggtcgtcgatggtgatgagccacagcctctctcggggcccatcaccatcggcgggaagctccatctcactcgggagcagtgggaggcctctcagggtgacgggaggaagggggagtcatcttccccgacaggcggccgtaagccgcgcaaggcgcggggaggtgtccagctacggtgggcgcgaagacgtgccaagggtggcgcccgcagaggcgcccagggcgttgccaccggcaaccacaagccggcacgagacgatgcctgccgcaactgtggcaagcttggccattgggccaaagactgtcgacagccacgacgcggccaggcccacgtcgcacgggtggaggaggaagagccggctctgctcctagctcacgcaagcatcgagctacctccagcggcaccggccgcagcggctttcctccaccttgatgagccgaaggtactcgtctccctctgcaacggctccagcaacgacaaggctgatgggtggtacctcgacaccggcgccacccatcacatgaccggccgacgggagttcttcaccgagttcgactccagcgtccgaggctccgtcaagttcggggacgcctccggcgtggagatcaagggtgttggctccgtcaccttcaccgccaagtccggtgagcacaggctgctcaccggagtctactacatccccgcgttgaggaattctatcatcagcgtgagacagctggatgagaatggctcacgcgtgttggtcgaggacggactcatgaggatttgggatcgccgtcgtcgccttcttgccaaggtaaccagaggcactaatcgactctacatcctcagcgcgcaggtcgcacaaccagtttgcctcgccgctcgtcgggacgacgaggcatggcagtggcacgagcgcttcgggcacctccacttcgaggccctgaagcgcctcagtgccaaggagatggtgcgaggcatgccgtgccttgaccacatggagcagctttgcgacgtctgcgtggtaacgaagcagcggcggctcccctttcctccgcagatgagcttccgagccaaggagcggctcgagctcatgcacggggacttgtgtggcccagtgacaccggccacaccaggaggacgacgttacttcctgctgctcgtcgacgacctctcccgctacatgtgggtgatggtcctcggcagcaagggagaggctgcggatgccatcaggcgcgcgcaggccgctgcagaggcggagtgcggccgcaagctgcgcgtgctgcgcaccgacaacggcggcgatgagggcatccagcgccactacaccgcgtcgtacagcccacagcagaacggcgtcgtcgagcggcgcaaccagacgggggaggcggtggtgacagccgtctacatcctcaatcgctcgcctaccaaggccctcgatggcaggacaccgtacgaggcttggcatgggcacaagccggcggtctcccacctacgggtcttcggctgcctcgcgtttgccaaggagcttggccacatcggtaagctcgacgacaggagcaccccaggggtgttcatcggctacgcggagggctcaaaggcctaccgcatcctcgacccggagacacagcgtgtgcgcacagtgcgcgacgtagtgttcgacgaagggcgagggtgggtatgggacaaggcggtggatgatggttcgactccgacgtacgacgacttcaccatcgagtacgtccacttcgagggagctgggggagtaggcagctcttcttcaccgagtgtgtctaccccagtccccgagcctccaccgactccaacaccaacacaccctcgggccacgacttcgactacgacgagctcttcgtcgacaccaccccagccggtgtccccacgcgctccagcaccaacagccactcctccgggcacgtctactccgacgccagctcgtgttgagcgcagcccggtggagttcgttactccgctctcccacgacggggagcgcatcgacgcgtaccacgacggcgagcagctacggtaccgtacgatggatgatcttctcggcgaccagccggtgccgggactggtgcctcgcaacctggaggcgcagttgcaccttgcgtgcgacgacggtgagcctcggtcttttgcagaggccgagaaacacgcggcatggcgtgccgcgatgcagttggagatggacgcggttcaggagaaccgcacctgggagcttgctgacctccctcgtggtcaccgcgcaatcacccttaagtgggtgttcaagctgaagagggatgaagccggagccatcgtcaagcacaaggctcgcttggtagcacgcgacttcgtgcagcaagaggggatcgactacgacgatgccttcgctcccgtggcacggatggagtccgtgcgactccttgcgctggctgctcaggaaggctggggtgtccatcacatggacgtcaagtcggcgtttctgaacggcgacttgaaggaggaggtctacgtgcaccagccgccgggattcgtgctccccggcaaggagggcaaggtgctacgcctgcacaaggccctctacggcttgcggcaggcaccgagggcgtggaatgccaagttggattccacgctcaaggggatgggcttcgagcaaagcccgcacgaggcggccatctaccggcggggcaatggaggaaaatgccttgctgatgcggaggtggcgacgttcaagaaggagatgaaggccaccttccagatgagtgatctggggcctctctccttctacctggggatcgaagtgcaccaggacgactccggaatcacgcttcgacagaccgcctacgctaagcgcgtcgttgagctggctgggctcaccgattgcaacccagctctcactccgatggaggagagactgaagctgagccgtgacagcacggcggaggaggtggatgctacacagtaccggcgtcttgtggggagccttcgctacctcacccacacacgatcggacttggccttctccgtcggctacgtcagtcgattcatgcagcaaccgacgacggagcaccagcaggctgtgaagaggatcatccgctacgttgcggggactctcgaccacggtctctactacccgaggtgtcctggcaaggcacacttcgtcgggtacagcgacagcgaccacgccggcgacatcgacaccagcaagagcacgagcgggattctcttcttcctcggcgagtgcctcgttagctggcagtcggtcaaacaacaggtggtggccctgtccagctgcgaggccgagtacatggcggcatccgccgcttcgacccaggcgctctggcttgctcgactgcttggtgatctcctcggcagagacactggagcagtagagctcagggtggacagcaagtccgctctggccctggcaaagaaccccgttttccacgaacggagcaagcacatccgggtgaggtaccactttatccgaaactacttggaggaagggagcatcaaggcgagctacatcaacaccaaggaccagcttgcggacttgctcaccaagcctcttgggaggatcaagttcctcgagctctgctccaggatcgggatggcccaactttcccacaagacgacacacaagacttag

SEQ ID NO: 35873 - DNA, 1225 bp, Oryza sativa
  Clone ID: PAT_MRT4530_39753C.1
gaagagttactgcaacgtcgcatgggtagaggaactatgctgtgaggttcaacgtgatttggaacatttgaaccttggtatagttgagcacggattcgtggctgccctagaggcacagcccacactggtggagcaggttcgcatagctcaagcaagtgatcctgaaatagcagagctcaaaaagaacatgagggttggaaaagcccgaggttttgttgaggacgaacaaggaacaatctggatgggagaaagatttaccaaaatgtaccaagacctcaaagaaaagttctggtgggtcagcatgagaagggaaatagctgagttcgtagcactctgtgacatggcaccatttgaagcactgtatggacgaaaatgtcgtactccgctcttctgggatcagacaggggaacgccaattgtttggtacagaagttttaaatgaggcagaagagaaagtcagagctgttagggaaagattgagaatcgcgcagtctcggcagaaaagctatgcagacaaccgccgaagggagctcgctttcgaaacaggggattatgtgtatctccgtgtcactccgctcaggggagtacatcgcttccaaaccaaaggaaagttggcaccacgctttgtgggaccatacaggatcttggaacgtagaggtgaagttgcttaccagctcgagcttccctccaacatgcttggcatccacaacgtgttccacgtctctcagttgaagaaatgtttgagagttcctgaggaacaggcaagtccggatcacatcgaaattcaggaagatctgacgtatgtggagaagccgactcgtatcctcgaaaccagcgagagaaggaccagaaacaaagtaataagattctgcaaggttcagtggagccaccactcagaggaagaggccacttgggaaagagaagatgagttgaaggccacccacccgcacctcttcgccagctcttccgaatctcggggcaccggtggcgagggtgggcgtgatggagttgggtcggccggggtgtccggttgtccagctgccggattcaccgcggcgcaagaggggaccgcccactgccttttgaggggtggggagctgaagatcttccttgttggagctgttttgccaaagtttgtttcgtcgctgccatcaaggagaaagaacgtggacgcgctgttgcggagggaatcgtgggaacgtgggttagtggctgcaaaaggatag

SEQ ID NO: 35874 - DNA, 5481 bp, Oryza sativa
  Clone ID: PAT_MRT4530_39754C.1
cttttttttttttttttttttttttttttttttttttttttttaaacaggtaatggtatagattcatggaactcgacaaggcggaacaatcatatccatagttccatacaacggatggacctctgcactctcttcactatacagaggatttctactgcttaacaactctcagttacccaatcctccaaaatggatatgggatcatcagcttatagcagcatgagtccactcgaatgcgatctttccttcaagcagctcgcctaagccgactatgtctaaatgacaggtttcctcttttggtgtatcaacagctatcaaggacccaaaacaaaccgctacaagggttcaaagggtagggagtaaaaaagaaaaagaagatgtcaacctatcaagtatcatatcaaccagtaagagctcagttttccttccatttgttgacatacttgaggaataacatcgaagggttatcccttggttgggcctgtacacgagaggatcgccgcagtgcagcctcttggagtagcattttctgggtgacgtccttcgttcttttttccaaagcattgcttatcgtattataaaacttatcaagctgccgtttcagggctctctcccttatgcctttaacatttaacgatccaataagcgcatcaagctcttccttagtgctgtagtaaccccattctttggaatctgcactttcgacaaaaagtcgtccttcatgcatctcttgttccaccccttcccaagctcggttgagctctcagccagcagcagcagcagcagcaccggttgcccctccttcccctttcccttccccctctccacacagcagccccccggaggtgcgccatgtccgacgctcggtctcggcgttcggtcgcctcgagcactcggcgtcagcaggacgccgagctcgccgcagcagaagagcgcaggcgagcaacggctcagaccgctgcagcagcagcgagggcggccagactggcggcagcggagttggcagcagccagggcggaggcggaggcggaggcggcggaagatgcggcacgtgcggcggaggtagaggttgagaccttgcgcagcagcatcaacggctccatcgccggcgacatcaccgctgacagggagcttgaggagctggcaagaggaagggcacgggagcgagcagagcggtgggcagcagcccacctccacggcggcggcggcggcccaagggatcgtgcgcccgccgacgggaacccagacgggcgcgggcgtgccggcggcagcccggagcccgcacgcggccctcgcaggcggcacggctccctctcccctgaccggcgctatggtcaccacggcgtccagacggtggtcagggactttggtcccggcggtgggtggcctaccctcaccaaaaccaactacatcgagtgggccgcggtgatgagggtgaggctccaggtgcggcacatgtgggaggcagtccggtacggcgacgtcgactacgacgaggatcggcgggcactggatgccctcatcgttgcagtcccgcccgagatgcagttctcgctttcccagaagcggactgccaaggaggcctgggacgccatcgctgcggcacgcatcggcagcgaccgcgcccgcaagtccacactgcaggcactccgcaaggagtgggagaacctggccttcaagccaggtgaggatgttgatgactttgctctccgtctcaacactctcttgcagaagatggtgcagtacggcgacgacacctacgacgaggagagagctgtcgagaagctcttccgctgcgtccctgagaagtacagacggatcgctcgctcgatcgaatctctgctggacctctccacgatgtcgatcgaggaggcgttaggtcgcctcaaggtcgtcgatggtgatgagccacagcctctctcggggcccatcaccatcggcgggaagctccacctcactcgggagcagtgggaggcctctcagggtgacgggaggaagggggagtcatcttccccgacaggcggccgtaagccgcgcaaggcgcggggaggtgtccagctacggtgggcgcgaagacgtgccgagggtggcgcccgcagaggcgcccagggcgttgccaccggcaaccacaagccggcacgagacgacacctgccgcaactgtggcaagcttggccattgggccaaagactgtcgacagccacgacgcggccaggcccacgtcgcacgggtggaggaggaagagccggctctgctcctagctcacgcaagcatcgagctacctccagcggcaccggccgcagcggctttcctccaccttgatgagccgaaggtactcgtctccctctgcgacggctccagcaacgacaaggctgatgggtggtacctcgacaccggcgccacccatcacatgaccggccgacgggagttcttcaccgagttcgactccagcgtccgaggctccgtcaagttcggggacacctccggcgtggagatcaagggtgttggctccgtcaccttcaccgccaagtccggtgagcacaggctgctcaccagagtctactacatccccgcgttgaggaattctatcatcagcgtgggacagctggatgagaacggctcacgcgtgttggtcgaggacggactcatgaggatttgggatcgccgccgtcgccttcttgccaaggtaaccagaggcactaatcgactctacatcctcagcgcgcaggtcgcacaaccagtttgcctcgccgctcgtcgggacgacgaggcgtggcagtggcacgagcgcttcgggcacctccacttcgaggccctgaagcagctcagtgccaaggagatggtgcgaggcatgccgtgcctcgaccacgtggagcagctctgcgacgtctgcgtggtgacgaagcagcggcggctcccctttccccagcagacgagcttccgagccaaggagcggctcgagctcgtgcacggggacttgtgtggcccagtgacaccggccacaccaggaggacgacgttacttcctgctgctcgtcgacgacctctcccgctacatgtgggtgatggtcctcggcagcaagggagaggctgcggacgccatcaggcatgcgcaggctgctgcagaggcggagtgcggccgcaagctgcgcgtgctgcgcaccgacaacggcggcgaattcacggcggctgaattcgtgtcgtactgcgctgatgagggcattcagcgccactacaccgcgccgtacagcccacagcagaacggcgtcgtcgagcggcgcaaccagacggttgtggggatggctcgggccctcctcaagcagagggggatgctggccatcttctggggggaggcggtggacaccgtacgaggcttggcatggcgcaagccggcggtctcccacctgcgggtcttcggctgcctcgcgttcgccaaggagcttggccacatcggcaagctcgacgacaggagcaccccaggggtgttcatcggctacgcggagggctcgaagacctaccgcatcctcgacccggagacacagcgtgtgcgcattgcgcgcgatgttgtgttcgacgaagggcgagggtgggtatgggacaaggcggtggatgatggttcgactccgacgtacgacgacttcaccatcgagtacgtccacttcgagggagctgggggaccggtgtccccacacgctccagcaccaacagccactcctccgggcacgtctactccgacgccagctcgtgttgagcgcagcccggtggggttcgttactccgctctcccacgacgaggagcgcatcgacgcgtaccatgatggcgagcagctacggtaccgtacgatggaggatcttctcggcgaccagccggtgccgggactggtgcctcgcaacctggaggcgcagttgcaccttgcgtgcgacgacggtgagcctcggtcctttgcaaaggccgagaaacacgcggcatggcgtgccacgatgcagtcggagatggacgcggttcaggagaaccgcacctgggagcttgctgacctccctcgtggtcaccgcgcgatcacccttaagtgggtgttcaagctgaagagggatgaagccggagccatcgtcaagcacaaggctcgcttggtggcacgcggtttcgtgcagcaggaggggatcgactacgacgatgccttcgctcccgtggcacggatggagtctgtgcgactcctccttgcgctggctgctcaggaaggctggggcgtccatcacatggacgtcaagtcggcgttcctaaacggcgacttgaaggaggaggtctacgtgcaccagccgccgggatttgtgattctcggcaaggagggcaaggtgctacgcctgcacaaggccctctacggcttgcggcaggcaccgagggcgtggaatgccaagttggattccacgctcaaggggatgggcttcgagcaaagcccgcacgaggcggccatctaccggcggggcaatggaggaaatgccttgctggtgggtgtctacgtcgacgacttagtgatcaccggcaccaaggatgcagaggtcgcggcattcaaggaggagatgaaggccaccttccagatgagtgatctggggcctctctccttctacctggggatcgaagtgcaccaggacaactccgggatcacgcttcgacagaccgcctacgccaagcgcgtcgttgagctggctgggctcaccgattgcaacccagctctcactccgatggaggagagactgaagctgagccgcgacagcacggcggaggaagtggatgctacacagtaccggcgtcttgtggggagccttcgctacctcacccacacacggccggacttggccttctccgtcggctacgtcagtcggttcatgcagcgaccgacgacggagcaccagcaggctgtgaagaggatcatccgctacgttgcggggactctcgaccacggtctctactacccgaggtgtcctgacaaggcacacttcgtcgggtacagcgacagcgaccacgccggcgacattgacaccagcaagagcacgagcgggattctcttcttcctcggcgagtgcctcgttagctggcagtcaatcaagcagcaagtggtggccctgtccagctgcgaggccgagtacatggcggcatccgccgcttcgacccaggcgctatggcttgctcgactgcttagtgatctcctcggcagagatactggagcggtggagctcagggtggataacaagtccgctctggccctggcaaagaaccccgtttttcacgaacggagcaagcacatccgggtgaggtaccatttcatccgaagctacctggaggaagggagcatcaaggcgagctacatcaacaccaaggaccagcttgcggatttgctcaccaaaccccttgggaggatcaagttccttgagctttgctcccggatcgggatggctcaactttcccacaagacggcgcacaagacttag

SEQ ID NO: 35875 - DNA, 3867 bp, Oryza sativa
  Clone ID: PAT_MRT4530_39755C.1
atggtgaagacaaggaatggttcccgtgactccaacaacgccagtggcagcaaagagcagatcagtggagcatgtgccaacgatgcacctaacagcagttcatccccactgcccgagaacctaacgattgctcaggtgttggacaatcaaactcagatgatgacgatgatgatgcaacagatgcaacagtaccatcaggtgttgcagcagccgcccactttctcaagtaccaccaacccaatcgaggccaacgactggcttcatgctattgagaagaagctgaaccttttgcaatgcaacgaccaagagaaggttgcttttgctacacaccagctgcaaggttccgcttctgtttggtgggacaactacgtggtgacccgtccagctgggacagaggttacttgggcagagttttgtcagagtttcaataaagcacaggttcccgagggaattgtggcacaaaagaagagagagttccattctctgcaacaaggaaccagaacagttatagagtatttgcacgagttcaaccgcctcgcgcgctacgctcctgaggacgtgcgcactaatgccgagaggcaggagaagtttttgtcgggtcttgatgatgaattgaccaaccagttgatctcccgagattatgaggactttcagaagttggtggacaaagctatccgtcaggaggagcaggaggaggcacagtcagcaccagaggtcatattgggcacatttcccgtcaactcgacaccggcagtaatattgtttgattctggtgcaactcattccttcatttccaagcgttttgctggtgcacatgggttatctttagtgaagcttaagatacctatgcgagttcatactcctggaggtggcatgaccacaactcactattgcccgtcagtgagagttgaaatccaagggttgatttttccagccaacctcattcttctcgaatctaaggatctagatgttattctgggaatggattggctaacaaggcacagaggagtgatcgattgcactagcctcaccatcaagttgaccaatgcgaagggagaagtggttaccttccagtctccagtgccacagaagccagggatcagtctgaaccaggctgctattgaagaacaagaggtagcagtggagaaaaccactaagaagttggaagatattcccatagttagagagtatccagaggttttttcggacgatctgacaacaatgccaccaaaaagggatatcgagttccggattgacttggtacctggaactgcaccgatccacaagaggccttatagaatgggagccaacgagttggtggaagtcaagaagcaagttgatgaacagttacagaagggatacattcgcccgagcacgttgccttggggtgctccagttatctttgtggaaaagaaagataaaaccaaaaggatgtgcgtcgactactgcgcactcaatgaggtcactattaagaacaagtatccgttgctaagaattgatgatctgtttgatcagttgaaaggagctactgtgttctctaagatagacctacgatcaggctatcaccagttgaggatccgcgaagaggatattccaaagacagcattcatcactcggtacgggttgttcgaatgcacagttatgtctttcggactcactaatgcacctgcttttttcatgaatttgatgaacaaggtgtttatggaatttctaaacaagtttgtcatggttttcattgatgacatacttatctactccaagttcgaggaagaacatgtgcagcatctccggctaatacttgaaaagttaaaagagcaccagctgtatgccaagttcagcaagtgtgacttctggcttaaggaagttcagtttctcggtcacatcgtgaatgctcaaggagtagctgtggatccagcaaatgtggagtcagttaccaaatggaccctaccaaggacagtcactcaggttcggagtttcttaggatttgcgggctattaccgccggttcattgagaacttctctaaaattgctaagccaatgacacagctattgaagaaggaagaaaagtttatctggtctgcagaatgcaataggagttttgaagaactcaaacgacggttggtgtctgcaccagtcttaatcctgcctgatcagacgaaagatttccaggtctattgtgatgcatctcgccaggggctaggatgtgtgttgatgcaggatggcaaagtggtttcttatgcttcacggcaattgcgtcctcatgaaggcaactacccgacgcatgatctggaattggccgcagtagttcatgctttaaagctttggcggcactatctcatcggtaaccgttgtgaggtatatacagatcaacaaaagtctaaacgaagatggttggagctgatcaaggattatgatatgggaatacattatcatcccggcaaggctaatgtggttgcagatgccttgagcaggaagagctactgcaatgttgcatgggtagagcaactatgttgtgaggttcaacgcgatttggaacatctgaaccttggtatagttgagcacggattcgtggctactctagaggcacagcccacactggtggagcaggagttaaaggacttgataatgacagaagctcagcaaactcagtattccattcatcctggcagtaccaagatgtaccaagacctcaaagaaaaattctggtgggtcagcatgagaagggaaatagctgaattcgtcgcactctgtgatgtttgccagcgagtaaaggcagaacaccaaaggccggcaggtttgctacagccacttcagattccagaatggaagtgggaagaaatcggaatggatttcattacgggtttgcccaggacatcatcggggcatgattctatttgggtagtcgttgatcgactcactaaagtggctcacttcattccggtgcatactacctactcagggaagaagttagcagagctttatttggcaagaatcatgtgtctacatggtgtacctaagaagatcgtgtctgatcgaggaagccaattcacctcaaagttctggcagaaattgcaagaagaattgggaacccgtctgaacttcagcactgcttaccatccacaaactgatggccagaccgagcgagttaatcaaatattggaggatatgttgagagcatgtgcccttgactttggtggagcatgggacaaaagcttgccgtatactgagttctcctacaacaacagttaccaggctagtctgcagatggcaccgtttgaagcactgtatggacggaggtgtcaagttttaaatgaggcagaagagaaagtcagagctgtcagggaaagattgagaatcgcgcaatctcgacaaagaagctatgcagacaaccgccgaagggagctcgttttccaagcaggggattatgtgtatctccgtgtcactccgctcaggggagtacaccgcttccaaaccaaaggaaagttggcaccacgctttgtgggaccatatcggattttggaacgcaggggtgaagttgcttaccagcttgagcttccctccaacatgcttggcatccacaatgtgttccacgtctctcagttgaagaaatgtttgagagttcctgaggaacaggcaagtccggatcaaatcgaaatccaagaagacttgacgtatgcggagaagccgactcgtatcctcgaaaccagcgagagaaggactagaaacaaagtaatcagattctgcaaggttcagtggagtcatcactcagaagaagaggccacctgggaaagagaagatgagttgaaggccgcccatccgcacctcttcgccagctcttccgaatctcggggtcgagattccgtttaa

SEQ ID NO: 35876 - DNA, 283 bp, Oryza sativa
  Clone ID: PAT_MRT4530_39756C.1
tgcaagcaagtcaagtttgatgctggctttgttggtggagcacccaagctcaggcaccaggcccaggtggctctcaatgttgccctgccatgtggtggagtctaccctgaggtactgcagcacatccatggcaaatgttgctactggtcattgcaggttcttgtatgtgtaccatcatatatatatattggataaataaagggtgcacacatcatcgtgtgtgtcatgtaataaatttggaatagtctttgctgttcgtatgaataagaaattataaaaaaaa

SEQ ID NO: 35877 - DNA, 510 bp, Oryza sativa
  Clone ID: PAT_MRT4530_39757C.1
atggcgggtttctcgcggcgccacctcgccgtgttctacgtcggcggcgtcaatggcagcggccaggacaaccaacaccctccaccgccttctaccccttgcccgcgccgtccactcgtcgctgccgccgagcagctctctaaactggaaaagacgccctctgaccgtttcgacgagatcgaagctgccattcatgccaatctcgtcaacgacattgaggcctacaaatcaagccttatggcagaccatggtttctttgaaagaatgcttacctctatggggataaaaaagagttacactcgtgaccaaactctatggttgtgcaagctgattctcatcttctttgcctcagggtctgttgggattggatttgccaagatcgatgaccgtctgaaacaggtaggtccaagaatagtgaaaaacatgtgcttatatactctacacatagttatactgcaattatctggtcaccctgttctgcagcaaaatctactgttgacacaacagtag

SEQ ID NO: 35878 - DNA, 1173 bp, Oryza sativa
  Clone ID: PAT_MRT4530_39758C.1
atgtccgatgttcggtctcggcgttcggtcgcctcgagcactcggcgtaagcaggacgccaagctcgccgcagcagaagagcacaggcgagcaacggctcagaccgctgcagcagcagcgagggcggccagactggcggcagtggagttggcagcagccagggcagaggcggaagcagaggcggcggaagatgcggcacgtgcggcggaggtagaggttgagaccttgcgcagcaacatcaacggctccatcggcgacatcaccgccgacagggagcttgaggagctagcaagagggagggcgcgggagcgggcagagcgtgctgcccacccccacggcggcggcggcccaagggaccgcgcgcccgccgatgggaacccagacgggcacgggtgtgccggcggcagcccggagcgcgcgcgcggcggcggcgctccgagtggaggtggctggttcgacagagagcgtggccctcgcaggcagcgcggctctccctcccctgaccggcgccatggccaccacggcgtccagacggtggtcagggactttggtcccggcggttggtggcctaccctcaccaaaaccaactatatcgagtgggccgcggtgatgagggtgaggctccaggtgcggcacatgtgggaggcagtccggtacggcgacgtcgactacgacgagaatcgacgggcgctggatgcccccatcgctgcagtcccgcccgagatgcagttctcgctttcccaaaagcggactgccaaggaggcctggcaagtccacactgcaggcactccgcaaggagtgggagaacctggctttcaagccagaagatggtgcagtacggcgacaacctatgatgaggagagagccgtcgagaagctgttccgctgcgtcccagagaagtatgggcagatcgctcgctcgatcgagtctctgctggatctctccacgatgtcgatcaaggaggcgataggtcgcctcaagctgcgcactgagaacaggaggctaaaggacaccttgcccaaggacaaggtcgagctcgatgagcttagagttgaccttgcgtccctccgtcgtggcttttgtgccaagcattttcacttgtacaaggccgtaggaaaggaagacctctactgtgctcctatcctgataaggacacaaatagctggaatataa

SEQ ID NO: 35879 - DNA, 1863 bp, Oryza sativa
  Clone ID: PAT_MRT4530_39759C.1
atggagataaggaatggttcacgcgactcgaacaacgccagtggcagcgaagagccgatcaatggagcacgtgccaacagtgcatctgacaacagtccgtccccaccgcccgagaacccaacaattgctcaggtgttggacaatcagactcagatgatgacaatgatgatgcaaccgatgcagcaacagtaccatcaggtgttgcagcaggtgcagcagcaagcacagcagcagcagcagaacctgcagtttggttctccacctcctcagtccaaactgttagaatttcttcgtgtcaagccgcccactttctcaagcaccaccaacccaatcgaggcccacgactggcttcatgccattgagaagaagctgaatcttttgcaatgcaacgagcaagagaaggttgcttttgtttggtgggacaactacatggtgacccgtccaactggcgcagaagttacttggacagagttttgtcatagtttcaataaagcacaggttcccgagggaattgtggcacaaaagaagagagagttccgttccctgcaacaaggaaccagaacagttatagagtatttgcatgagttcaaccgcctcgcgcgctacgcccctgaggacgtgcgtaccgatgacgggaggcaggagaagtttctgtctggtcttgatgatgaattgactaaccagttgatctctagagattatgaggactttgagaagctggtggataaggctatccgtcaggaggagcactgtaacaaaataaaccgtaagaggaaggcagctcagttcaggactccccaggggaagagtcagaagcctcgtttcacgatgggacatcacggtggaccttccaccatgattatccggcagcaccgtccctaccaccctggtagcttcaacaagaaccaccatagtggcagtcacaacaacagagtagctgtgaatccagcaaatatggagtcagttaccaaatggaccccaccaaggacagtcactcaggttcggagtttcttaggacttgcgggctattaccgccggttcattgagaacttctctaaaattgctaagccaatgacacagctattgaagaaggaagaaaagtttatctggtctgctggatgcaataggagttttgaagaactcaaacgacggttggtgtctgcaccagtcttaatcctgcctgatcagacgaaagatttccagttgcgtcctcatgaaggcaactacccgacgcatgatctggaattggccgcagttgttcatgctttaaagatttggcggcactatctcatcggtaaccgttgtgaggtatatacagatcacaaaagtctaaagtacatcttcactcaacctgatttgaatctcagacagcgaagatggttggagctgatcaaggattatgatatgggaatacattatcatcccggcaaggctaatgtggttgcagatgccttgagcaggaagagctactgcaatgttgcatgggtagagcaactatgttgtgaggttcaacgcgatttagaacatctgaaccttggtatagttgagcacggattcgtggttgccctagaggcacagcccacactggtagagcaggttcgcatagctcaagcaagtgttcctgaaatagcagagctcaaaaagaacatgagagttggaaaagcccgaggttttgttgaggatgaacaaggaacaatctggatgggagaaagattgtgtgtacccgaaaacaaggaattaaaagacctgatactaaccgaggctcatcaaactcagtattccattcatcccggtagtactaagatgtaccaagacctcaaagagaagttttggtgggtcagcatgagaagggaaatagcttaa

SEQ ID NO: 35880 - DNA, 487 bp, Oryza sativa
  Clone ID: PAT_MRT4530_3975C.1
atatcaccaaccaacttttatccgcatttcaacttaaaaagagcatgccttaagacatgtaacaggttccaaaggtaatataaatatgcttagttgggtactattgtgcaactagacagccaacagatcgaacatcaacaaaggaaaatgaagacgagatggaatagagagggcgttacaatatacattagaaaagagctcataggcttcttttgacagcccggtctgaaccagtacgaagtaaatagaccaaacacgagagcaggacgcctggacgagcatgctgttctaaccaaaccacaaacgtgggaactcggggtcgtggtggtggttcctctcgatcgatccatggactcttcgaaatgtctagtacacacctgtacttgtatatgtagtatcaccccagttgaacgcctgtgtgcatgcatgcgtaacaaggagcgcgccgtgagtatgcaatccggcaaaaaggggccggctacgagga

SEQ ID NO: 35881 - DNA, 312 bp, Oryza sativa
  Clone ID: PAT_MRT4530_39760C.1
atgaagcctcctgctccagccaagaacatcgccacccttctccctcccggagccaaatgcagaagggcgtttctgcgtggcttgatcgccgccggcgctggtggctcgctgctggtcgccggtgacggcggcggcattgcctccgcggcctccaagaggcgggcgccgccggcggcggcggcgccagaggagaggaaggaccccagcgtcagcggcgtgcaggcgaaggtgctggccagcaagaagaggaaggaggccatgaaggagttcgtggccaagatgagggagaaaggcaagcctgtcagtcaataa

SEQ ID NO: 35882 - DNA, 717 bp, Oryza sativa
  Clone ID: PAT_MRT4530_39761C.1
cggacgcgtgggcggggaagagccgaagagggtgaggaaaggatggcttcccccttgcgacgactgcgatcatggcgggtttctcgcggcgccacctcgccgtgttctacgtcggcggcgtcaatggcagcggccaggacaaccaacaccctccaccgccttctaccccttgcccgcgccgtccactcgtcgctgccgccgagcaggtacggcgatccccgttcgcctccgcaggcccgtcgtcccagcggcgaagttgagctctctaaactggaaaagacgccctctgaccgtttcgacgagatcgaagctgccattcatgccaatctcgtcaacgacattgaggcctacaaatcaagccttatggcagaccatggtttctttgaaagaatgcttacctctatggggataaaaaagagttacactcgtgaccaaactctatggttgtgcaagctgattctcatcttctttgcctcagggtctgttgggattggatttgccaagatcgatgaccgtctgaaacaggctccatcaaatgctttataactgagcaacaaacatgtctgttgtttggcctgcttaaaattaagctgttgatcacctcgcaacctattctgcatttatcggcctgccctcgacgaggttgaactcgatttatcagtgctgtagattgtctgctgggatggtgtacgtgtgctcgcgcggctgctcccccta

SEQ ID NO: 35883 - DNA, 4572 bp, Oryza sativa
  Clone ID: PAT_MRT4530_39762C.1
atgtccgacgttcggtctcggcgttcggtcgtctcgagcactcggcgtcagcaggacgccgagctcgccgcagcagaagagcgcaggcgagcaacggctcagaccgctgcagcagcagcgagggcggccagactggcggcagcagagttggcagcagccagggcggaggcagaagcagaggcggcggaagatgcggcacgtgcggcggaggtagaggttgagaccttgcgcagcagcatcaacggctccatcgccggcgacatcaccgccgacagggagcttgaggagcttgcaagaggtagggcacgggagcgggcagagcggtgggcagcagcccacctccacggcggcggcggcggcccaagggaccgcgcgcccgccgacgggaacccagacgggcgcgggcgtgccggcggcagcccggagcccgcgcgcggccctcgcaggcagcgtggctctccctcccctgaccggcaccatggccaccacggcgtccagacggtggtcagggactttggtcccggcggtgggtggcctaccctcaccaaaaccaactacatcgagtgggccgcggtgatgagggtgaggctccaggtgcggcacatgtgggaggcagtccggtacggcgacgtcgactacgacgaggatcggcgggcactggatgccctcatcgctgcagtcccgcccgagatgcagttctcgctttcccagaagcggactgccaaggaggcctgggacgccatcgctgcggcacgcatcggcagcgatcgcgcccacaagtcaacactgcaggcactccgcaaggagtgggagaacctggccttcaagccaggtgaggatgttgatgactttgccctccgtctccacactcttttgcagaagatggtgcagtacggcgacgacacctacgacgaggagagagctgtcgagaagctctttcgctgcgtcccagagaagtacaagcagatcgctcgctcgattgagtctttgctggacctctccacgatgtcgatcgaggaggcgttaggtcgcctaaaggtcgtcgacggcgatgagccacagcctctctcggggcctatcaccattggcgggaagctccatctcactcgggagcagtgggaggccagccagagtaacgggaggaagggggagtcccctccctcgacaggcggccgcaagccgcgcaaggcgcgcggaggcgtccagctgcggtgggcgcgaagacgcgccgagggtggcgctcgcagaggtgcccagggcgacgccgctggcaaccacaagccggcacgagacgacgcctgccgcaactgtggcaagcttggccattgggccaaagactgtcgacagccacgacgcggccaggcccacgtcgcacaggtggaggaaaagccggctctgctcctagcacacgccagcatcgagctatcttcagcggcaccggccgcaacggctttcctccacctcgaggagccgaaggtacacgccttcctcggcaacagctccagcaacgacaaggctgatgggtggtacctcgacaccggcgccacccatcatatgactggccggcgggagttcttcaccgagcttgactccagcgtccgaggctccgtcaagtttggggatgcctccggcgtggagatcaagggcgtcggctccgtcaccttcaccaccaagtccggtgagcacaggctgctcaccggagtctactacatccccgcgttgagaaactctatcatcagcgtgggacagctggatgagaacggctcaagcgtgttggtcgagcacggagtcatgaggatttgggatcgccgccgtcgccttcttgccaaggtaaccagaggcactaatcgactctacatcctcagcgcgcaggtcgcacaaccagtttgcctcgccgctcgtcgagacggcgaggcgtggcagtggcacgagcgtttcgggcaccttcactttgaggccctgaagcggctcagcgccaaggagatggtgcgaggcctgccgtgccttgaccacgtggagcagctctgcgacgtctgcgtcctaacgaagcagaggcggctcccctttccccagcagacgagtttccgagccaaggagcggctcgagctcatgcacggggacttgtgtggcccagtgacaccggccacaccaggaggacgacgttacttcctgctgctcgtcgacgacctctcccgctacatgtgggtgatggtcctcggcagcaagggagaggctgcggacaccatccggcgcgcgcaggctgctgcagaggcggagtgcggccgcaagctacgcgtactgcgcaccgacaacggcggcgaattcacggcggctgaattcgcgtcgtactgcgctgatgagggcattcagcgccactacaccgcgccgtacagcccgcagcagaacggcgtcgtcgagcggcgcaaccagacggttgtggggatggctcgggctctcctcaagcagagggggatgccggccatcttctggggagaggcggtggtgacggccgtctacatcctcaaccgctcgcctaccaaggccctcgatggcaggacaccgtacgaggcttggcatgggcgcaagccaggggtctcccacctgcgggtcttcggctgcctcgcgttcgtcaaggagcttggccccatcagcaagctcgatgacaggagcaccccaggggtgttcatcggctacgcggagggctcgaaggcctatcgcatcctcgacccggagacacagcgtacggtggacgatggttcgactctgacgtacgacgacttcaccgtcgagtatgtccacttcgagagagctgggggagtaggcagctcttcttcaccaagcgtgtctaccccagtccccgagcctccatcgactccgacaccaacacaccctcgggccacggcttcgactgcgacgagctcttcgccgacaccaccacagccggcaaccccacgcgccccagcaccaacagccactcctccgagcacgtctactccgacgccagctcgtgttgagcgcagcccggtggagttcgctactccgctctcccacgacggggagcgcatcgacgcgtaccacgacggcgagcagctacggtaccgtacgatggaggatcttctcggtgaccagcccgtgccaggaatggtgcctcgcgacctggaggcgcagttgcaccttgcgtgcgacgacggtgagcctcggtctttcgcagaggccgagaaacacgcggcatggcgtgccgcgatgcagtcggagatggacgcggttcaggagaaccgcacctgggagcttgttgatctccctcgtggtcaccgcgcgatcacccttaagtgggtgttcaagttgaagagggataaagccggagccatcgtcaagcacaaggctcgcttggtggcacgcggtttcgtgcagcaggaggggatcgactacgacgatgccttcgctcccgtggcacggatggagtccgtgcgactccttgcgctggctgctcaggaaggctggggcgtccatcacatggacgtcaagtcggcgtttctgaacggcgacttgaaggaggaggcaccgagggcgtggaatgccaagttggattccacgctcaaggggatgggcttcgagcaaagcccgcacgaggcggccatctaccggcggggcaatggaggaaatgccttgctggtgggtgtctacgtcgacgacttggtgatcaccggcaccaaggatgcggaggtgtaccaggacgactccggaatcacgcttcggcagaccgcctacgccaagcgcgtcgttgagctggctgggctcaccgattgcaacccagctctcactccgatggaggagagactgaagctgagccgcgacagcacggcggaggaagtggatgctacacagtaccggcgtcttgtggggagccttcgctacctcacccacacacggccggacttggccttctccgtcggctacgtcagtcggttcatgcagcgaccgacgacggagcaccagcaggctgtgaagaggatcatccgctacgttgcggggactctcgaccacggtctctactacccgaggtgtcctggcaaggcacacttcgtcgggtacagcgacagcgaccacgccggcgacattgacaccagcaagagcacgagcgggattctcttcttcctcggcgagtgcctcgttagctggcagtcaatcaagcagcaggtggtggccctgtccagctgcgaggccgagtacatggtggcatccgccgcttcgacccaggcgctctggcttgctcgactgcttagtgatctcctcggcagagatactggagcggtggagctcagggtggatagccagtccgctctggccctggcaaagaaccccgtttttcacgaacggagcaagcacatccgggtgaggtaccatttcatccgaagctacttggaggaagggagcatcaaggcgagctacatcaacaccaaggaccagcttgcggatttgctcaccaaaccccttgggaggatcaagttccttgagctttgctcccggatcgggatggctcaactttcccacaagacgacgcacaagacttag

SEQ ID NO: 35884 - DNA, 783 bp, Oryza sativa
  Clone ID: PAT_MRT4530_39763C.1
atgtcccctgccgcccaagtagagggcggcaaggagagaagggagcggctagagcgggcggcggcaggcgagctcctcgccctctccaccgcagcggtgctccacgcgcaactccagcaggcggaggccacggcacaggcaaggggcaaggcggcggaggacgacgactacgacgccagcgccacggacgacagtcggcggagctcggcggcgtcgacgacgccgcgtggccacgatcctagcatttgggatggcatccatttgagaagggatcatgtccgccgccaaaaagctcccgtcttcatccgtgaggcggtgccgcggcgcgaggagaaggacccaaagacggccactacccacatctacgccaccattgacgcaatcccggcgctgttcgatgggttccccctcctcaaaggtgtggacaagccatactgtttcgaggacaccgacgacggcggcggcggcaaggtggcggaggggttctacaaggtgtacgcgtccatggacagcaggaggaagcatggcgatctcagcgcgcaggagcaggtcgtcagcgaggccaggcgactgcggctcgacaaggggacgagaggacgatgggctcttgtccaggcggtagcggcttatcgtgaggagcttgtggcggcggcgtctcagctaggcatcggcggcttcatgcgggaaggcgacgacggcagtggcccggccaagcggtggcggctagcacgccaagcaacaggccgcgcgcagcgagcaggtctcacgggcgctgcaagctga

SEQ ID NO: 35885 - DNA, 753 bp, Oryza sativa
  Clone ID: PAT_MRT4530_39764C.1
atggtgaagataaggaatggtctccgtgactccaacaacgtcagtggcagtgaagagcagatcagtggagcacgtgtctgctatgcatctgacagcagttcatctccaccgcccgagaacccaacaatcgctcaggtgtttgacaatcagactcagatgatgacaatgatgatgcaacatatgcagcaacagtatcatcaggtgttgcagcaggtgcagcagcaagcacaaccgcagcagcagaacctgcggtttggtcctccacctcccaagtccaagctgttggagtttctccatgtcaagccacccactttctcaagcaccaccaacccaatcgaggccaacgactggcttcatgctattgagaagaagctgaaccttttgcaatgcaacgaccaggagaaggttgcttttgctacacaccagttgaagggcgccgcttctgtttggtgggacaactacatggtgacccgtccagctgggacagagattcctgaggggatcatggcacaaaagaagagagagttttgttctctacaacaaggaaccaaaacagttatagagtatctgcacgagttcaaccgcctcgcgcgctacgctcctgaggacgtgcgcactgatgtcgagaggcaggagaagttttggtctagtcttgataatgaattgatcaacctgttgatgaagcttgtggacaaggctatccatcaggaggagcagtgtaacaaaatgaaccgaaaaaggaaagcatcttag

SEQ ID NO: 35886 - DNA, 2811 bp, Oryza sativa
  Clone ID: PAT_MRT4530_39765C.1
atggcgccggcgaggaagaagcgcgcggctgctgctgctgctgctgcggcggcggcggcggcggcggcggcggccgcggcgcagtggaaggtgggggacctcgtgctcgctaagatgaagggcttcccggcgtggccggccatgataagtgagccagagcagtggggccagacgtctgttaaaaagaagatactggtgtacttctatggaactaaacagatgagcagcaccggctactccttcccctttcccttccccctctccacgcagcagccccccggaggcgcgccatggagggcggccagactggcggtagcggagttggcagcagccagggtggaggcggaagcagaggcggcggaagatgtggcacgtgcggcggaggtagaggttgagaccttgcgcagcagcatcaacggctccatcgccagcgacatcaccgccgacagggagcttgaggagctggcaagaggaagggcgcgggagcgggcagagcggtgggcagcagcccacccccacggcggcggcggcggcccaagggaccgcgcgcctgtcgacgggaacccagatgggcgcgggagtgccggcggcagcccggagcgcgcgcgtggcggcggcgctcccggtggaggtggctggttcgacggagagcgcggccatcgcaggcagtgcgactctccctcccctgaccggcgctatggctaccacggtgtccaaacggtggtcagggactttggtcccggcggtgggtggcctaccctcaccaaaaccaactacatcgagtgggccgcggtgatgagggtgaggctccaggtgcggcacatgtgggaggcagtccggtacggcgacgtcgactacgacgaagatcggcgggcactggatgccctcatcaccgcagtccctcccgagatgcgcgcccgcgcccgcaagtccacactgcaggcactccgcaaggagtgggagaacctggtcttcaagccaggtgaggatgttgatgactttgccctccgtctcaacactcttttgcagaagatggtgcagtacgacgacgactcctacgatgaggagagaactgtcgagaagctcttccgttgcgtcccagagaagtataggcagatcgctcgctcgatcgagtctgctggacctctccacgatgcggccgcaagccgcgcaaggcgcgtggaggtgtccagctgcggtggccgcgaagacgcgccgagggtggtgctcgcagaggtccacgtcgcacaggtggaggaagagccggctctgctcctggcacacgcaagcatcgagctacctccagcggcaccggccgcagaggctttcctccaccttgatgagccgaaggtactcgtctccctctgcaacggctccagcaacgacaagggtgatgggtggtacctcgacaccggctccacccatcacatgaccggccgacgggagttcttcaccgagcttgaccctagcgtccgaggctccgtcaagtttagggacgcctcccgcgtggagatcaagggcgtcggctccgtcaccttcaccgccaagtccggtgagcacaggctgctcaccggagtctactacatccccgtgttgaggaactctatcatcagcgtggggcagctggatgagaacggctcacgcgtaggcactaatcgactctacatcctcagtgcgcaggtcgcacaaccagtttgcctcgccgctcgtcgggacgaggcgtggcagaggcacgagcgtttcgggcacctccactttgaggccctgaagcggctcagcgccaaggagatggtgcgaggcctgccgtgccttgaccacgtggagcagctctgcgacgtctgcgtcctaacgaagcagaggcggctcccctttccccagcagacgagtttccgagccaaggagcggctcgagctcgtgcacggggacttgtgtggcccagtgacaccggccacaccaggaggacgacgttacttcctgctgcttgtcgacgacctctcccgctacatgtgggtgatggtcctcggcagcaagggagaggctgcagacgccatcaggcgcgcacaggctgctgcagaggtggagtgcggctgcaagctgcgcgtgctacgcaccgacaacggcggcgaattcacggccgctgaattcgcgttgtactgcgctgatgagggcattcagcgccactacactgtgctgtacagcccgcagcagaacggcgtcgtcgagtggcgcaaccagatggttgtggggatggctcgggctctcaagcagagagggatgccggccatcttctggggagaggcggtggtgacggccgtctacatcctcaaccgcttgcctactaaggcccttgatggcaggacactatacgaggcttggcatgggcgcaagctggcagtctcccacctacggatcttcggctgcctcgtgttcgtcaaggagcttggccacatcggcaagctcgacgacaggagcaccccaggggtgttcatcggctacgcggagggctcgaaggcctaccgcatcctcgacccggagatagcgttggacgatggttcgactccgacgtacgacgacttcaccgtcgagtacgtccacttcgagggagctaggggagcaggcagctcttcttcaccgagcgtgtctaccccagttcccgagcctccaccgaactccgacactaacacaccctcgggccacgacttcgactacgacgagctcttcgccgacaccaccacagccggcgacaccacgcgctccagcaccaacagccactcctccgggcacgtctactccgacgccagctcgtgttga

SEQ ID NO: 35887 - DNA, 624 bp, Oryza sativa
  Clone ID: PAT_MRT4530_39766C.1
atggccgaccagccgtgtcacctcgctgacgacctgctcctgcgcgctgagatcgccatgcttcctcctgctgtccatggacgcgtacaccttgtagaacccctccgccaccttgccgccgccgccgtcgtcggtgtcctcgaaacagtatggcttgtccacacctttgaggagggggaacccatcgaacagcgccgggattgcgtcaatggtggcgtagatgtgggtagtggccgtctttgggtccttctcctcgcgccgcggcaccgcctcacggctgtcgccattgtcgtcgtcgtctcagtccccgccgctgtcgacgaagaggatcgtggccacgcggcgtcgtcgacgccgccgagctccgccgactctgatctggggagcgaggctgccgtctcctccctttggatccacggcgacaagaggagaagggaaaagggagaaggaggtgccttcgtttgtgggccgttgcttgacgtcgtccgtggcgctggcgtcgtagtcgtcgtcctccgccgccttgccccttgcctgtgccgtggcctccgcctgctggagttgcgcgtggagcaccgctgcggtggagagggcgaggagctcgcctgccgccgcccgctctag

SEQ ID NO: 35888 - DNA, 806 bp, Oryza sativa
  Clone ID: PAT_MRT4530_39767C.1
atgacgggatatcagggtggaccttccaccatgattatccggcaacattgtccctaccacccggacaatttcaacagcatcaacaacaatggcagtcacagaaatagtgagcagcacagcctcaaccctactccaagtccactaatgattccagctcagtcagttcagtcagctctgccagctcagccagaacagcccaagaagtttggagaaaacccgaactctacttcaattgtcacgagcccggacacatggttgtgttttgctagtgcacatgggttatctttagtgaagcttaagataccaatgcgagttcatactcctggaggtggcatgaccacaactcactactatccatccgtgacagttgaaattcaagggttgatttttccagccaacctcattcttctcgaatccaaggatctagatgttattcttggaatggattggctaacaaggcacagaggagtgattgattgcgctagccgcaccatcaagttgaccagtgcgaaaggagaagtgccagggatcagtctgaaccaggccactggtgaagaacaagaggtagcagtggagaaaaccactaagaagttggaggatattcccatagctagagattatccagaggttttcccggaggatctaacatcaatgccaccaaaaagggatatcgagttccggatcgatttagcacccggaactgcaccgatccgcaagaagccttatagaatgggagccaacgagttggcggaagtcaagaagcaagttgatgaacagttacaaaagggatacatcctcccgagcac

SEQ ID NO: 35889 - DNA, 3558 bp, Oryza sativa
  Clone ID: PAT_MRT4530_39768C.1
atggtgaagacaaggaatggttcccgtgaatccaacaacaccagtggcagcgaagagcatatcagtggagcacgtgccagcgatacgtctgacaacagtctgtctccaccgcccgagaacccaacaatcgctcagtccaaactgttggagtttctccgtgtcaagccgcccactttctcaagcaccaccaacccaatcgaggccaacgattggctccatgcgactttagaagaagttgaatcttttgcaatgcaacgaccaagagaatgttgcttttactacacaccagctgcaaggtcctgcttctgtttggtgggacaactacatggtgacccgtccagctgggacagaggttacttgcaaggaactaggacagttatagagtatctgcatgagttcaaccgcctcgcacactacgctcctgaggacgtgcgcactgatgccgagaggcaggagaagtttttgtctggtcttgatgatgaattgaccaaccaactgatctccaaggattatgaggaccttgagaagcttgtggacaaggctatccgtcaggaagagcagtgcaacaagatgaatcgtaagaggaagccagctcagctcaggacttcccaggggatcagtcagaagcttcctttcacgatgggacatcagggtggaccttccagcatgattatctggcagcaccgtccttaccacccgggtagctatagcaagaactacaacagtggcagtcacagcaacaaggaggcgcagtcagctccagaggtcatattgggcacatttcccgtcaactcgacaccggcaataatattatttgattatggtgcaactcattccttcatttccaagcgttttgctggtgcacatgggttatctttagtgaagcttaagataccaatgcgagttcatactcctggaggtggcatgaccacaactcactactgcccatcagtgacagttgaaattcaagggttgatttttccagccaacctcattcttctcgaatccaaggatctagatgttattcttggaatggattggctgacaaggcacagaggagtgattgattgtgctagccgcaccatcaagttgaccaatgcgaaaggagaagtggtaaccttccagtctccagtgctgcagaagcaagggatcagtttaaaccaggttgctggtgaagaacaagagtggccttacagaatgggagccaacgagttggcggaagtcaagaagcaagttgatgagcagttacagaagggatacatccgcccgagcacgtcgccttggggtgctccggttatctttgtggaaaagaaagataaaaccaagaggatgtgcactgactaccgcgcactcaacgaggttactattaagaacaagtaccctttgccaaggattgatgatctgtttgatcagttgaaaggagctactgtgttctctaagatagacctgcgattaggctatcgcaagttgaggatccatgaagaggatattccaaagacagcattcattactcattatgggttgttcgaatgcacagttatgtctttcggactcactaatgcacctgccttcttcatgaatttgatgaacaaggtgtttatggaatttctggacaagtttgtcgtggttttcatcgatgacatacttatctactccaagtccgaggaagaacatgagcagcatcttcggttggtacttgaaaagctaaaagagcaccagctatatgccaagttcagcaagtgtgacttctggctaaaggaagttcagtttctcggtcacgtcgtaaatgctcaaggagtggccgttgatccagcaaatgtggagtcagttaccaagtggaccccaccaaagacagtcactcagattcggagttttctgggacttgtgggctattaccgccggttcattgagaacttctctaaaattgccaagccaatgacacaactattgaagaaggaagaaaagtttatctggtctgctgaatgcaataggagttttgaagaactcaaacgacggttggtgtctgcaccaattttaattctgcctgatcagacgaaagatttccagttgcgtcctcatgaaggcaactacccgacccatgatctggaattggccgcggttgttcatgctttaaagatctggcggcactatctcatcggtaaccgttgtgagcgaagatggttggagctaatcaaagattatgatatgggaatacactaccatcccggcaaggctaatgtggtagcagatgccttgagcaggaagagctactacaatgttgcatgggtagaaaaactatgttgtgaggttcaacgcgatttcgaacagctgaaccttggtatagttgagcacggattcgtggctgccctagaggcacaacccacactagtggagcaggttcgcatagctcaagcaagtgatcctggaatagcagagctcaaaaagaacatgagagttggaaaagcccgaggtttcactaaggatgaacacggaacaatctggatgggagaaagattgtgtgtacctgaaaacaaggaattaaaagacttgatactgacagaagctcatcaaactcagtattccattcatcctggcagtaccaaaatgtaccaagacctcaaagaaaaattctggtgggtcagcgtgagaagggaaatagctgaattcgtcgcactctgtgacgtctgtcagcgtgtgaaggcagaacaccaaaggccagcaggtttgctacagccccttcagatttcagaatgtaagtgggaagaaatagcaatggactttatcaccggtttgcccaggacgtcatcggggcatgattctatttgggtagttgttgaccgactcaccaaagtggctcacttcattccagtgcacactacctactcagggaagaagttagcagagctttatctggcaagaatcatgtgtttacatggtgtacctaagaagatagtgtctgatcgagggagccaattcacttcaaagttctggcagaaattgcaagaggaattgggaacccgtttgaacttcagcacagcctaccatccacagactgatggtcagaccgagcgagatcagacaggggaacgccagttgtttgggacggaagttttaaatgaggcaaaagaaaaagtcagagctgtcagggaaagactgagaatcgcgcaatctcgacagaaaagatatgtagacaaccgccaaagggagcttgctttcgaagcaggggactatgtgtaccttcgcgtcactccacaccggggagtacaccgcttccaaaccaaaggaaagttggcaccgtgctttgtgcgaccatatcggattttggaacgtagaggtgaagtcgcttaccagcttgagcttccctccaacatgcttagcattcataatgtgttccacgtctctcagttgaagaaatgtttgagagttcctgaggaacaggcaagtccggatcacattgaaattcaggaagatctgacgtatgtggagaagccgactcgtatcctcgaaactagtgagagaaggaccaagaacaaagtaatcagattctgcaaagtttag

SEQ ID NO: 35890 - DNA, 401 bp, Oryza sativa
  Clone ID: PAT_MRT4530_39769C.1
cttcgggccaagggcgacatgacccagggtgaggaggtcaagatctatgcaagtaaggtgaccgcggtcctgtgcaaggccttcgccaccgcgacgtccgctttagtcgggtatcatgttctcggtgtcggagcaaaattattaggcaatccacctcttcctcggataccaagaattggcatggctgctggcagtgcatggattgttggaaagtttgcatattataccgccttgcaagcaagtcctattttcattttggaaggtggagaagagcgcatgaagatggagctagctaacataatacttactaagcataatgatgaaaagacactggttgaagcttgaaaacaacacttctttgctgagcatctggttagtgatcagtattaagatatgccact

SEQ ID NO: 35891 - DNA, 321 bp, Oryza sativa
  Clone ID: PAT_MRT4530_3976C.1
atggttgtacaacaactccaaagtcctctcgagttctgccacctcaaacttcgtcctccagtattggatgcgacgatctcggtcggcaagcgcactctcgagattttggtccacgtcgtccagcggcacatacggctcgagcgcaagtgccggaacgattacaggcaactcaggccgcccgcgctgctggacatcctcgacatcgacatctctataaacaacaacaaaatactcggaatcaagatgctaaagaaaactaaggtgataactgcacacacaaaggcagtgggaaccgacaaaagttttacaaagcatgattga

SEQ ID NO: 35892 - DNA, 4962 bp, Oryza sativa
  Clone ID: PAT_MRT4530_39770C.1
atggagacaaggaatggttcacgcgactcgaacaacgccagtggcagcgaagagccgatcaatggagcacgtgccaacggtgcatctgacaacagtccgtccccaccgcccgagaacccaacaattgctcaggtgttggacaatcagactcagatgatgacaatgatgatgcaacagatgcagcaacagtaccatcaggtgttgcagcaggtgcagcagcaagcacagctgcagcagcagaacctgcagtttggtcctccacctcctcagtccaaactgttagaatttcttcgtgtcaagccgcccaccttctcaagcaccaccaacccaatcgaggcccacgactggcttcatgccattgagaagaagctgaatcttttgcaatgcaacgagcaggagaaggttgcttttgctacacaccagctacaaggtcccgtttctatttggtgggacaactacatggtgacccgtccagctggggcagaggttacttggacagagtttcgtcatagtttcaataaagcacaggttcccgagggaattgtgggacaaaagaagagagagttccgttccctgcaacaaggaaccagaacagttatagagtatttgcatgagttcaaccgcctcgcgcgctacgcccctgaggacgtgcgtaccgatgccgagaagcaggagaagtttatgtctggtcttgatgacgaattgaccaaccagttgatctctagagactatgaggactttgagaagcttgtggacaaggctattcgtcaagaggagcagtgtaacaaaatgaaccgtaagaggaaggcagcccagttcaggactccccaggggaagtgtcagaagcctcgttacacgatgggacgtcacggtggaccttccaccatgattatccgacagcaccgtccctaccacccgggtagcttcaataagacccaccatagtgatagtcacaacaacagtggcagtcacagcagcctcaacccgactccaagtccattaatgattccagctcagtcagatcagccagctctgccagaacagcccaagaggttggcccgtgttaatcatgcatctgcagaggaggcgcagtcagcaccagaggttatattgggcacattccccgtcaactcgacaccggcagtaatattgtttgattctggtgcaacccattcctttatttccaagcgttttgctggtgcacatgggttatctttagtgaagcttaagatacctatgcgagtgcatactcctggaggtggcatgaccacaactcactactgcccatctgtgacagttgaaattcaagggtcgatttttccagccaacctcattcttctcgaatccaaggacctagacgtcatacttggaatggattggttgacaaggcacagaggagtgattgattgcgccagccgcaccatcaagttgaccaatgcaaaaggagaggtggtaatcttccagtccccagtgccgcagaagccagggattagtttaaaccaggctgctggtgaagaacaagaggtagcagtggagaaaaccactaagaagctggaggatattcccatagtcagagagtatctagaggtttttccggatgatctgacaacaatgccaccaaaaagggatatcgagttccggattgacttggtacctggaactgcaccgatccacaagaggccttacagaatgggagccaacgagttggcggaggtcaagaagcaagtcgatgaacagttacagaagggatacatccgcccgagcacgtcgccttggggtgctccggttatctttgtggaaaagaaagacaaaaccaagaggatgtgcgttgactaccgcgcactcaatgaggtcaccatcaagaacaagtatcctttgccaaggattgatgatctgtttgatcagttgaaaggagctacggtgttctctaagatagacctgcgatcaggttatcaccagttgaggatccgcgaagaggatattccaaagacagcattcatcactcggtacgggttgttcgaatgcacagttatgtctttcggactcactaatgcacctgccttcttcatgaatttgatgaacaaggtgtttatggaatttctagacaagtttgtcgtggtttttatcgatgacatacttatctactccaagtccgaggaagaacatgagcagcatcttcggctggtacttgaaaagttaaaagagcaccagctatatgccaagttcagcaagtgcgacttctggcttaaggaagttcagtttctcggtcacatcgtgaatgctcaaggagtagctgtggatccagccaatgtggagtcagttaccaagtggaccccaccaaggacagtcactcaggttcggagtttcttaggacttgcgggctattaccgccggttcattgagaacttctctaaaattgctaagccaatgacacagctattgaagaaggaagaaaagtttatctggtctgctgaatgcaataggagttttgaagaactcaaacgacggttggtgtctgcaccagtcttaatcctgcctgatcagacgaaagatttccaggtctattgtgatgcatctcgccaggggctaggatgtgtgttgatgcaggatggcaaagtggtttcttatgcttcacggcagatgcgtcctcatgaaggcaactacccgacgcatgatctggaattagccgcagttgttcatgctttaaagatttggcggcactatctcatcagtaaccgttgtgaggtatatacagatcacaaaagtctaaagtacatcttcactcaagctgatttgaatctcagacagcgaagatggttggagctgatcaaggattatgatatgggaatacattatcatcccggcaaggctaatgtggttgcagatgccttgagcaggaagagctactgcaatgttgcatgggtagagcaactatgttgcgaggttcaacgcgatctggaacatctgaaccttggtatagttgagcacggattcgtggctgccctagaggcacagcccacactggtggagcagatggcaccatttgaagcactgtatggacggaggtgtcgtactccgctcttctgggatcagacaggggaacgccagttgtttggtacagaagttttaaatgaggcagaagagaaagtcagagctgttagggaaagattgagaatcgcgcagtctcggcagaaaagctatgcagacaaccgccgaagggagctcgttttccaagtaggggattatgtgtatctccgtgtcactccgctcaggggagtacatcgctttcaaaccaaaggaaagttggcaccacgctttgtgggaccatatcggattttggaacgtagaggtgaagttgcttaccagctcgagcttccctccaacatgcttggcatccataatgtgttccacgtctcccagttgaagaaatgtttgagagttcctgaggaacaggcaagtccggatcaaatcgaaatccaggaagacttgacgtatgtggagaagccaactcgtatcctcgaaaccagcgagagaaagaccagaaacaaagtaataagattctgcaaggttcagtggagccaccactcagaggaagaggccacttgggaaagagaagatgagttgaaggccacccacccgcacctcttcgccagctcttccgaatctcgggtcgccgccgtcgcgctcaccgagcccgcccgcacctcggccaccattcggttgccgccaatcgtcgccgaagcgccgtttccctcgcacgccgcgtgccgccgccgcccatccgcacctcggcatcgccggtcgtcgccgccgctttcttccttcgcgccggccgtcgtgctcatcggtgaggaatcccctctcccccttcctttttccccctttcccgtgtgcgccgccggccttcgcgcgtgtgccgtcgccttcagccgctgccgccgcctttcggccgtcgccgccgcttcccgcaccgccggtcaccgccgtcggtggccgtgcctcgccgccgcctcgccttggccgccggtcggctttgaggccgagccgagcccggctggcgcctccctctcccgccctgtgccgctgcccagtggggcccacatgccagccgccccctccctctccccttgtgccgctgccagtggggcccgcctagctgaagatcttcctagttggagctgttttgtcaagttggtttcgtcgctgccgtcaaggattgcctgtggagtggagccgcccgctgctgaagtcaagcttcccgaacatgatgctcagatgcttcacggatggggagcacatctccaaagcatccatctggcaaccgtgcatcttgagatccaacaatgccggacagctcgtgaaatcaagaacccggttgctagcccggacaccctgaagctccaagaaagtgaggttttgggagacgaggtgttcgtcgaagatctggaaggaattccgggagttgacgaagattatgaaccggagcaccatggcatggtggcggagagcgctgcggatccagcggttgccacgccgcgcttcgccgggggagggctcgtcgagatcgagatcgaaaacgcaggtgtccagcggcgcgccgccgcggcggaggcggagcaggcggtcgacgaagcgggcgaacgcgtttggcggtcgcccaccccctgggggccgacgacgcggacggcgggcgcggacctccagaggtcgcgccagcgcctggcaagcacgcaggtccgcaccgcgtcccgcgacggcaggagggagaggacttggtggaggaggtcctccgggagggcgctgatgcggtcctcaccgctcgccatggcgcgcgggctcttccttgccggtcgggcactccgtcgaacaggtggcgtgcgtcgccgccgggcgccggcgctgcgagtggcgacgccaagaaccgacgagtgcctggataaaatgggtgagagtgaagactga

SEQ ID NO: 35893 - DNA, 4533 bp, Oryza sativa
  Clone ID: PAT_MRT4530_39771C.1
atggcagttaaggaccggttcacgggaaaccctgggagacttaccgtgcttaccacaagcgggagtggagttgaagttcttctcagttggagccgtctcagagaggttggtttcgtcgctgccgtcaagatggagataaggaatggttcacgcgactccaacaacgccagtggcagcgaagagctgatcaatggagcacgtgccaacagtgcatctgacaacagtccgtccccaccgcccgagaacccaacaattgctcaggtgttggacaatcagactcagatgatgacaatgatgatgcaacagatgcagcaacagtaccatcaagtgttgcaacaggtgcagcagcaagcacagcagcagcagcagaacctgcagtttggtcctccacctcctcagtccaaactgttagaatttcttcgtgtcaagccgcccactttctcatgcaccaccaacccaatcgaggcccacgactggcttcatgccattgagaagaagctgaatcttttgcaatgcaacgagcaagagaaggttgcttttgctacacaccagctgcaaggtcccgcttctgtttggtgggacaactacatggtgacccgtctagctggggcagaggttacttggacagagttttgtcatagtttcaataaagcacaggttcccgagggaattgtggcacaaaagaagagagagttccgttccctgcaacaaggaaccagaacagttatagagtatttgcatgagttcaaccgcctcgcgcgctacgcccctgaggacgtgcgtacagatgacgggaggcaggagaagtttctgtctggtcttgatgatgaattgactaaccagttgatctctagagattatgaggactttgagaagttggtggataaggctatccgtcaggaggagcactgtaacaaaataaaccgtaagaggaaggcagctcagttcaggactccccaagggaagagtcagaagcctcgtttcacgatgggacgtcacggtggaccttccaccatgattatccggcagcaccgtccctaccacccgggtagcttcaacaagaaccaccatagtggcagtcacaacaacagtgagcagcacagcctcaaccctactccgagttcactaaagattccaacccaatcagttcagccagctctgccagaacagccaaagaggttgggagaaaaacccgaactctgcttcaattgtaacaaacccggacacacggttggaaagtgcccgaagccaagacgtgctggacccaagttcgttcaggcccgtgttaatcatgcatctgcagaggaggcgcagtcagcaccaaaggttatattgggcacattccccgtcaactcgacaccggcagtaatattgtttgattctggtgcaacccattccttcatttccaagcgttttgctggtgcacatgggttatctttagtgaagcttaagataccaatgcgagttcatactcctggaggtggcatgaccacaactcactactgcccatctgtgacagttgaaattcaagggttgatttttccaaccaacctcattcttctcgaatccaaggacctggatgtcatacttggaatggattggttgacaaggcacagaggagtgattgattgcgccagccgcaccatcaagttaaccaatgcaaaaggagaggtggtaaccttccagtctccagtgccgcagaagccagggatcagtttaaaccaggctgctggtgaagaacaagaggtagcagtggagaaaaccactaagaagctggaggatattcccatagtcagagagtatccagaggtttttccggacgatctgacaacaatgccaccaaaaagggataccgagttccggattgacttggtacctggaactgcaccgatccacaagaggccttacagaatgggagccaacgagttggcggaagtcaagaagcaagtcgatgaacagttacagaagggatacattcgcccgagcacgtcgccttggggtgctccggttatctttgtggagaagaaagacaaaaccaagaggatgtgcgttgactaccgcgcactcaatgaggtcaccatcaagaacaagtatcctttgccaaggattgatgatctgtttgatcagttgaaaggagctactgtgttctctaagatagacctgcgatcaggctatcaccagttgaggatccgcgaagaggatattccaaagacaacattcatcactcggtacgggttgttcgaatgcacagttatgtctttcggactcactaatgcacctgtcttcttcatgaatttgatgaacaaggtgtttatggaatttctagacaagtttgtcgtggtttttatcgatgacatacttatctactccaagtccgaggaagaacatgagcagcatctctggctggtacttgaaaagttaaaagagcaccagctatatgccaagttcagcaagtgcgacttctggcttaaggaagttcagtttctcggtcacatcgtgaatgctcaaggagtagctgtggatccagcaaatatggagtcagttaccaaatggaccccaccaaggacagtcactcaggttcggagtttcttaggacttgcgggctattaccgccggttcattgagaacttctctaaaattgctaagccaatgacagctattgaagaaggaagaaaagtttatctggatggcaaagtggtctcttatgcttcacggcagttgcgtcctcatgaaggcaactacccgacgcatgatctggaattggccgcagttgttcatgctttaaagatttggcggcactatctcatcggtaaccgttgtgaggattatgatatgagaatacattatcatcccggcaaggctaacgtggttgcagatgccttgagcaggaagagctactgcaatgttgcatgggtagagcaactatgttgtgaggttcaacgcgatttggaacatctgaaccttggtatagttgagcacggattcgtggttgccctagaggcacagcccacactggtggagcagatggcaccgtttgaagcactgtatggacgaaggtgtcgtactccgctcttctgggatcagacaggggaacgccagttgtttggtacagaagttttaaatgaggcagaagagaaagtcagagctatcagggaaagattgagaatcgcgcaatctcggcagaaaagctatgcagacaaccgccgaagggagctcgctttcgaaacaggggattatgtgtatctccgtgtcactccgctcaggagagtacatcgcttccaaaccaaaggaaagttggcaccacgctttgtgggaccatacaggatcttggaacgtagaggtgaagttgcttaccagcttgagcttccctccaacatgcttggcatccacaacgtgttccatgtctctcagttaaagaaatgtttgagagttcctgaggaacaggcaagtccggatcacatcgaaattcaggaagatctgacgtatgtagagaagccgactcgtatcctcgaaaccagcgagagaaagaccagaaacaaagtaatcagattctgcaaggttcagtggagtcatcactcagaagaagaggccacttgggaaagagaagatgagttaaaggccacccacccgcacctcttcgccagctcttccgaatctcgaggcaccggtggcgagggtgggcgtgatggagttgggtcggccgagatgttcggttgtccagctgccggattcaccgtggcgcaagaggggaccgcccactgccttttgaggggtcttgctctcttttcccccacaccagagttgaagttcttctcagttggagccgtctcagagaggttggtttcgtcgctgccgtcaaggcagcctgtagtgaattgtgatgtgtatgcaatttgtggacctttcacaatctgcaatgacaataaggatccgttctgcgactgtatgaaaggctactccataagatcaccgaaggactgggagcttgatgatcgaacaggagggtgcatgaggaatactcctttaagttgtggtgctggctcctaccagtcgagaagaatgctcacagattttggaatggcgaagatgttggggagagaatttagtcgtgctatgactacaatgagaggaacaattggatacatagctcctgaatggattagtggaacagttgttacatccaaagtagatgtttatagctacgggatggttttgtttgaaatcatatcaggaaggaggaaccgaagtcatgaacatttcatggatggtgattattccttctactttcccatgcaagttgcacgcaagcttctcaaaggagagattggatgtcttgtggatgccaatttggaaggtgatgttaacctcatggaggttgaaagagcttgcaaaattgcatgttggtgcattcaagatcacgaatttgatcggccaacaatggccgaggtggtacagtcccttgaaggtctacttgagctcaacatgcctccactgccaagactactaaggcagcgttcgtttggacgacattga

SEQ ID NO: 35894 - DNA, 4023 bp, Oryza sativa
  unsure (1)..(4023): unsure at all n locations
  Clone ID: PAT_MRT4530_39772C.1
atggcagcgaagagccgatcaatggagcacgtgccaacggtgcatttgacaacagtccgtctcccaccgcccgagaacccaacaatttgctcaggtgttggacaatcagactcagatgatgacaatgatgatgcaacagatgcagcaacagttccatcaggtgttgacagcagagattatgaggactttgagaagttggtggataaggctatccgtcaggaggagcactgtaacaaaataaaccgtaagagaaaggcagctcagttcaggactccccagngnaagagtcaaaagcctcggttcacgatgggacatcacggtggaccttccaccatgattatccgncagcaccgtccctaccacccgggtaggttcttcaagaaccaccatagtggcagccacaacaacagtgagcagcacagtctcaaccctactccgagttcactaaagattccagctcaatcagttcagccagctctgccagaacagcccaagaggttggtagaaaaacccgaactctgcttcaattgtaacaaacccggacacacggttggaaagtgcccgaagccaagacgtgctggacccaagttcgttcaggcccgtgttaatcatgcatctgcagaggaggcgcagtcagcaccagaggttatattgggcacattccccgtcaactcgacaccggcagtaatattgtttgattctggtgcaacccattccttcatttccaagcgttttgctggtgcacatgggttatctttagtgaagcttaagataccaatgcgagttcatactcctggaggtggcatgaccacaactcactactgcccatctgtgacagttgaaattcaagggtcgatttttccagccaacctcattcttctcgaatccaaggacctagatgtcatacttggaatggattggttgacaaggcacagaggagtgattgattgcgccagccgcaccatcaagttgaccaatgcaaaaggagaggtggtaaccttccagtccccagtgccgcagaagccaaggatcagtttaaaccaggctgctggtgaagaacaagaggtagcagtggagaaaaccactaagaagctggaggatattcccatagtcagagagtatccagaggtttttccggacgatctgaccacaatgccaccaaaaagggatatcgagttccggattgacttggtacctggaactgcaccgatccacaagaggccttacagaatgggagccaacgagttggcggaagtcaagaagcaagttgatgaacagttacagaagggatacatccgcccgagcacgtcgccttggggtgctccggttatctttgtggagaagaaagacaaaaccaagaggatgtgtgttgactaccgcgcactcaatgaggtcaccatcaagaacaagtatcctttgccaaggattgatgatctgttcgatcagctgaaaggagctactgtgttctctaagatagaccttcggtcaggctatcaccagttgaggatccgcgaagaggatattccaaagacagcattcatcactcggtacgggttgttcgaatgcacagttatgtctttcggactcactaatgcacctgccttcttcatgaatttgatgaacaaggtgtttatggaatttctagacaagtttgtcgtggtttttatcgatgacatacttatctactccaagtccgaggaagaacatgagcagcatcttcggctggtacttgaaaagttaaaagagcaccaactatatgccaagttcagcaagtgcgacttctggcttaaggaagttcagtttctcggtcacatcgtgaatgctcaaggagtagctgtggatccagcaaatgtggagtcagttaccaaatggaccccaccaaggacagtcactcaggttcggagtttcttaggacttgcgggctattaccgccggttcattgagaacttctctaaaattgctaagccaatgacacagctattgaagaaggaagaaaagtttatctggtctgctgaatgcaataggagttttgaagaactcaaacgacggttggtgtctgcaccagtcttaatcctgcctgatcagacgaaagatttccaggtctattgtgatgcatctcgccaggggctaggatgtgtgttgatgcaggatggcaaagtggtttcttatgcttcacggcagttgcgtcctcatgaaggcaactacccgacgcatgatctggaattagccgcagttgttcatgctttaaagatttggcggcactatctcatcggtaaccgttgtgaggtatatacagatcacaaaagtctaaagtacatctttactcaacctgatttgaatcttagacagcgaagatggttggagctgatcaaggattatgatatgggaatacattatcatcccggcaaggctaatgtggttgcagatgccttgagcaggaagagtcactgcaacgtcgcatgggtagaggaactatgctgtgaggttcaacgtgatttgggacatttgaaccttggtatagttgagcacggattcgtggctgccctagaggcacagcccacactggtggagcaggttcgcatagctcaagcaagtgatcctgaaatagcagagctcaaaaagaacatgagggttggaaaagcccgaggttttgttgaggacgaacaaggaacaatctggatgggagaaagattgtgtgtacccgaaaacaaggaattaaaagacctaatactaaccgaggctcatcaaactcaatattccattcatcccggcagtaccaaaatgtaccaagacctcaaagaaaagttctggtgggtcagcatgagaagggaaatagctgaattcgtagcactctgcgacgtctgtcaacgagtaaaggcagaacaccaaaggccagcaggtttgctacagccacttcagattccagaatggaagtgggaagaaatcggaatggatttcatcaccggtttgcccaggacgtcatcggggcatgattctatttgggtagtcgttgaccgactcaccaaaatggctcacttcattccggtgcacactacctactcagggaagaaattagcagaactctatctggcaagaatcatgtgtttacatggtgtacctaagaagatcgtgtctgatcgaggaagtcaattcacttcaaagttctggcagaaattgcaagaagaattgggaacccgtctaaacttcagcactgcttaccatccacaaacagatggccagaccgagcgagtcaatcaaatactagaggatatgttgagagcctgtgcgcttgactttggtggagcatgggacaaaagcttaccgtatgctgagttctcgtacaacaacagttaccaagctagtctgcagatggcaccgtttgaagcactgtatggacgaaggtgtcgtactccgctcttctgggatcagacaggggaacgccagttgtttggtacagaagttttaaatgaggcagaagagaaagtcagagctgtcagggaaagattgagaatcgcgcaatctcggcagaaaagctatgcagacaaccgccgaagggagctcgctttcgaaacaggggattatgtgtatctccgtgtcactccgctcaggggagtacatcgcttccaaaccaaaggaaagttggcaccacgctttgtgggaccatacaggatcttggaacgtagaggtgaagttgcttaccagctcgaacttccctccaacatgcttggcatccacaatgtgttccacgtctctcagttgaaaaaatgtttgagagttcctgaggaacaggcaagtccggatcacatcgaaattcaggaagacttgacgtatgtggagaagccaactcgtatcctcgaaaccagcgagagaaagaccagaaacaaagtaataagattctgcaaggttcagtggagccaccactcagaggaagaggccacttgggaaagagaagatgagttgaaggccacccacccgcacctcttcgccagcccttccgaatctcggggtcgagattccgtttaa

SEQ ID NO: 35895 - DNA, 480 bp, Oryza sativa
  Clone ID: PAT_MRT4530_39773C.1
atctaactatttaattttattcacaatttatatacaaaaaactttcataaaaatttaataatatttagtaacaacaggtcttcttaaaaccttagatttgactctatctctaattggaactcttctgttgctaacaactggcattctaccggatccatgaactggagcagtaattgttttgccaccttcgagaccggtagctggagcggcagcaatagctgggacacgtccatatctcaatctgttaacgataccgcttccaaatcttcttctaccaacagcaaactcggctccagatgagtaactagcagaggaaccaagagatcctacagatgatccaaaggaatcgagagatccaacggaactaccgtagctggcagatccagtggaaccgtaactaacggaaccggccaaggtgaattgggaaacgatggcggccgaggcattggtgttgccacggtagtattcacggactggacc

SEQ ID NO: 35896 - DNA, 510 bp, Oryza sativa
  Clone ID: PAT_MRT4530_39774C.1
aacacagaaaaacatatccttgttcttatcttcccaccacaaaacaaagaccgaccaaaccatgagcattgctagatttaagacagtatggtaggtgggataatattacatgggagccccaaatctaaagtgaatgggcagtcagttcttgtttaaacaaataaccacacaagtagaacataactgcttgaaataacttacattggagcgactctagtggcagtgtatctcagaatagctcgcacaatactgaagctctgggatgatcaccttcatcaggagatgagctacaaatgcatgtcatttggcacatctgaaaacacaattatattatatatcatgtgcggctaacgaaggttttgtatgttactgcatcctcagcactctgtagtatgtccaatttgcaaaacctaaaaatatcggacgcgtggtatcttatcttgtgttgttcctcagtggaacaattgacagttcatccattatgttttcctgagctgaggatagtggatg

SEQ ID NO: 35897 - DNA, 734 bp, Oryza sativa
  Clone ID: PAT_MRT4530_39775C.1
gtcataatgatgtccttaaatattggacagtcaccacccatggtacactcattaaggtttcccaatgataacccccaattggaccaggcaccatgttgtcattaatgaccaagtacagttaatttggcaccgaaccatttgatctttcaaaagttacaactagtttgattgtttgaagtttgaacatgattacatgggtatgctgacttcaacagtagctaatgaacagcctagaaagtatagggttgaaaagaaccagaaggtaagacaactacacaggtacagcttaagttaccaaacccaattacaaaatgttatggaactgaaagaccaccgatgcaccataacctaacatcatgagcaaaacatttcactgaacaaaacattgtgtcatcagactaaacagcacttggaagaccagtcaggaaacatcatgctccactgccagttgcgctgtatgagaaacaactgcagcctcgtctatcatatctattggcgcttatcctgcttacgcaagcccatccgagatttggcatatctgatagatgttaaggagctatatcaatatattaaaaaggcatggtcaggaagtagagatcgcctttagcttctgctataagctccaaatacaccctgcaagaagaatttgaagagagatactatagcaggaaatttaaataatccctaaatgtggatactctaacgcatcccctcgccagttgatgaatacaaaa

SEQ ID NO: 35898 - DNA, 576 bp, Oryza sativa
  Clone ID: PAT_MRT4530_39776C.1
atggcgtcccaaataaacattttcaggtcttctaccttctgtgtttctgcggactatgcaatcaccaacactacatggtttttcgaggaatgcaaccatcactcagctgctcaaagcgtgcacggcgagcggcggcgcgcgggggaggacaggcagtcggtgcgcgggggccggcgatgggcggtgacgtgctggggcggacgggcggtcggcgcgtgtgggccggcggcggaacacggggagggcgcggcgggcaacaggtggcgccgagcaggccaggagggtgttggtggcgacgggctacggcgacaagtccaccaccctctcgagctccacggctatggcgacgaggcgacgagtcctcggctcaggcgggcgccgtcgagtcaggcggcctgcgatgaatcctcctcggggagggcgtggcgagcggcgcgcatggcgcggaggacacggtgggcggcgccgaggaggcattggaggcgagatgtcagggccgatgaagtagaggtgctggtgatgaagtccatgacaataatccatcaaactgttgagaagatatcgaagctcaagtag

SEQ ID NO: 35899 - DNA, 538 bp, Oryza sativa
  Clone ID: PAT_MRT4530_39777C.1
gctgcaggaattcggcacgaaggagagagagaactagtcttcgagtttttttttttttttttttttttttttaacctgcagaaagtaacaaactcggttctacagctagtagtaattcgcaagcatgacaaaaggccaaagaacatcacgagcttgatgatttgatcatgagtcatgacacggaaatcacgcagccgattcgagccgagtgccatttcttccctcagatcttagatctatacaaaacgggacgtttgccattaggccgtcctttcggcaccccccgcacccaccacaagccacgacccaaaaagcgcaccgaaagataacgaaacatgccaggtgatcaacgtgagccccccggatgaacagcgcacgcgacgcgacgagaggctaccactaccaaccaaacatcgatcacgccgcgctggctggctcacgcctgcacgtactgcatggtgctcgcttcctctcgtcgtgcgcgcgggcacgcgcgcatcagaacaacgccggtggccgcttggccggcgcggcggcg

SEQ ID NO: 35900 - DNA, 5147 bp, Oryza sativa
  Clone ID: PAT_MRT4530_39778C.1
atgctgtcggtgcgggggcggcaggaggaggggttccgtgtgatgggccacggcgacgtcgagctggaggagggggaggccttccccgacgacgacggcggcggcggcgcgctctgcctcgatcccgaagtcgccttctcctacatcgatgaaaagattcaacatgttcttggacattttcagaaagactttgaaggaggagtatccgcagataacctagtcatattaagtgggaaaaactttttgacaggatcaaaatacggtggatatggttcgtttttgcccacataccagcgctcacctccacctttgcctcaaagcagaagcccacccaaggttgcaaacgttggcacttcaagatcaccttatcaacaatctgctgagagcatgggtcaatacccttcaactgtggcaaatgaatctatctcccgaaataatggttccactgcaccgtcatctggtgatttatgtaaaagagaaatatgctcaagcacaaacggtgagaaggactctgttgcttgttctgattccttggacagctcatttaatggtagtgaccagaagacactcaaagttcggatcaaagttggttccactaatactttggcaagaaagaatgcatctatctacagtggcctgggccttgatatttcttcttcttcatccatggaaggaagtcctgatggtcatgagggtcaatctccagtgtgtagtaatgtgccatatgaatctcctcggaccatcctgcagatcatgacgtacttttcagttcctggaggattcttgctgtcacctctgcatggaaacattctgaaattgacgaataaggtcaccccattggttaacaaatgggaaactaatctggacttaaaaaatgtacctagagcagttgatggccattcagaactttctctttcgtctgggcatgtcaaagcccatgtggctaagaaaatgaagcctgatggcaagaaaaagaagtccatagatacaaagactagaaaagatgcaaataatactagtgcaatattgggcaaggaggctaatgtagaaatacctggcagccgagtgattttatcagacacacatgatataacctgttcttctggcgccccaaccacagagttaaaaggtgtaagtcaattcacagaagaatcaactaaagatgctcgaccgaaacaacagatgggctgcaatgacctgggaacagttaaaagcgaagcagtcaaaacagaagtaacaaagcatatagaagaaaacagtagttttgacagttcaggaaatggttgtttagcaccacgggggaaagtaaaacttaaggcgagtaaagtggacaggacttcagaagacatgaatataagtagtcacaaattttctccgtatgataggaagaaagaaagcaaagtaaaacctatgagaacatttgagcctgccatggatgattttgaaggcaatgtggacaaggactggggtgctgggtcatcagatgatttgaagacaattcatggtaaagaaacctttgccagtgagagaactgtggaagataactctagaacggaggtcaaacgaatgcagaaggaacacaaagctaattttgtagcaccatctagtttcttagaggatggtaattttacccattcttctgtactagttaatgatggggcaactgattctcatttgaagtctaatcattttgaaaataaatcgaaagaaaaatctcataaagaccttagtgaaaatctgcctaagagatctataggaaacaaggaaggggcttcattggagagtgtaagtgttcagggtcaacggaaagagaagatgatgaacagtgataatgagaaggaacttcatataactgggccagcaaaaaaggagatcccttccagtgtaaagcatggcacatttccaggttcagaggaacagcagttgcatatgccgtcaaatggcgggattatacctggacctgcaaatgcagcttctcttcctgcacctgttttgatagaggataattgggtatgctgtgacatgtgtcataaatggcgtctcctcccctacgggacaaacacttccatgcttccaaaaaagtggatatgcagcatgcttgactggctacctgggatgaacaaatgcgacattagtgaggatgaaacaacaaatgctctaaatgcactttatgtcactcaaatccctgccgctggtgtttcttcaggtggccctcacactgcgcatgcaagtgtagcagcatctagcacctacaatataagtggacaactgggacagagtaggaaaaggaaaaatgctctgaaagacgaaaactgttacgagcatgatcaacaagcccctgcaaaaatgactctcacgagcaatcaacaagcccctgcaaaaaatagagaagttgttgatagtgaacattatactaatgacagagatcctgtaagcacacatgatctggtgccacagagcaaatcagcttctgaaaggcataagtctaagcacaagagtcgcagtagccactcagatggaggagatcttacagaaaaatcgaagaagcattcaaaatcaaaaaacaggagaggaattgatcgagatgagcacaaaacatctaagaagacaaaaaaagaggatcgacattactttaacaaagattggaaaaatgaatacgatttagctggcaacaaagttcgtgatgaaaccaaagctttatctgcaaaagcaaaaatgtcaaaggactcatgtgaacaagatgagttttctttacgcaaggaaaaagcttcaaggtttgatattttggaaaaaacaaagagaattaatgatgatgatgtggcctttcatgagaagatgaaagaacatcgtgcaggcatagaaacattagatttgtctggcaaaaagaagacagtgaaggaatgggaggataaccggctcagttcaatggaccacacaagcaaagggggcgataatgagaatttgaacgagagattatcaaagataaagaagtccgaagctaggcctgaagaagttcaggatgcaaatgcattattttcttctgctggaaggcgtcaagataatgagctagttgctgacaacaaatttgttacttgtaaagaaggtccatcagaactatgggataatcaacctcccagacaggtcttgaacttggcggaacccactaggagggatgttgcctgtcttcagtcttctacggttgcaacttcaagctcttcaaaggtctcaagctctcggagaaacaaaaattctcgagaagcaaagggctctcccgttgaatcagtatcttcatcaccactgaaaaattcaaacactgataagatttctaaggccaggaaaactggaaaagatggagaattgaatgctgattcaagcatcttgcataccccaatgaaatatccaacccacgaagttggtttactacatactgggcagcaagctgtgggtgaagccattctgcgtggttctacaaataactccggtatggggagagtagataatcaattgtaccctggtgataaaaagatcttggatatgcatggccctacactacaacctgatcagcaggattgttttaacccgagggctacagctgattccactggacataaaagtaaaaatagtgctccttcacgccaaggtagaaatggatccagtaacttgatttcagagggaaataagcagatagagatgtcatccagaaaagagaaattacgtcctagtattgataatcaagatatgcaaaagtctattggtcaagataatcattctcatatgaaagaaggcaaatcagaggttcacaccactagagtaaaaccaggtgcttcaaaaaaccacacacaattaaggtccaatgttgaaaatggagattctgcgagtccaattaggagggatggtaatatgattgcatttgcactcaaggaagctcgggatctaaaacacaaggctaatcatttgaaggaaaaaggacttgaacttgaaagtatgggcctgtactttgaagcggctttgaagtttctgcatgttgcatctctttgggaaactcctaatctggacaattcgagatcaggcgatgttgctcagtcaatgaagatgtattctgaaactgcaaaactctgcaggagatctgtgtatcatttcattaagcaaggaataaaagttactaaggatgcggtagtggctgcgatcgctaggatggagaattggagacggttgacggtgggcaggaaccttgaccacagcctcgccaccttttgtgctcatgcctatgaacgatgcaataaaatggcttctcccgctttagcatataaatgtgtagaagtggcttacctcaaagcagcgtattacaaacaccctagtgcaagcaaggatcgacaagaactacagtcggttgtacagatagctccaggtgaatctccatcatcgtctgcctcagatatcgataatttaaatagccatggattgtcaaaggccctttcaaccaagggtggaaactcaccccaagtggctggcaaccatttgccactggccgttcgtaaccaagcacacttattgaggttacttgcctatacaaatgatgtcaattgtgcattcgatgcaactcggaaatcacaggttgctattgcttctgctgctagcagtcaggaaaggggaaaaactgtggacgatggtcttgcttcagtaagaacagttttagattttaacttcaacaatgtcaatgagctactgagacttgtccggctttctatggagttaatcaacacctgatatgttcagaattgcatgaaatggcaccccatgaatagctattgttggaatgcctggctgcagttacctcagcatatttacacggtgccaaagagatgggtctactaagtctgcgtgagctccataggaactgggaccggcttgcctggtttatgtacatttagaggcatccagcgctttttcataccaataggatcaccccttcggattaatcttatacgttttggaggcattcagtgttttttttttttttgggtacagtttggagcatcttcgattaacctgttccttttggaagcatattgtacagtttagagcatcttcttggcaaaaaaaaaaaaaaaaaaacctcgtgccgattcctgcagcccggggatcca

SEQ ID NO: 35901 - DNA, 302 bp, Oryza sativa
  Clone ID: PAT_MRT4530_39779C.1
ggatgcccatacatcaatgagattagaagaggctgttgagctgcacttgactcatcctgaactgtatgaggacattgtaataaagactaccatgggagttatattatatggggaacctggcacacgcaaaactctacttgcataggcagatgctcattctacatgagaaacattttttcttgttgctgaaagggaggatgactcaaaagtatctggcagatggcccaacacttatagaacaatagggtagggaggctgcagatactgcttactccatgatggttatagacgctattgatgcc

SEQ ID NO: 35902 - DNA, 744 bp, Oryza sativa
  unsure (1)..(744): unsure at all n locations
  Clone ID: PAT_MRT4530_3977C.1
ccaaaggtaatataaatatgcttagttgggtactattgtgcaactagacagccaacagatcgaacatcaacaaaggaaaatgaagacgagatggaatagagagggcgttacaatatacattagaaaagagctcataggcttcttttgacagcccggtctgaaccagtacgaagtaaatagaccaaacacgagagcaggacgcctggacgagcatgctgttctaaccaaacctgtatatatatatatgctcatcagcaagcataatgcacaaaaaaaactcttctataattacttcaccgttttccctaccacaaacgtgggaactcggggtcgtggtggtggttcctctcgatcgatccatggactcttcgaaatgtctagtacacacctgtacttgtatatgtagtatcaccccagttgaacgcgtgtgtgcatgcatgcgtaacatgcatgcgcgcgtgagtctccaatccggcaaagggcgcgcggcttggtgtggtgccgagctgagctctctcttgatctctacctctgcggctgcagctgacgctggggcgcgcgctctgatcggtggtggtgcgccgccgcctgcgccgtgggagagtactgctgcttcttcctgcggtgcctgttcctgtccatctcgatctgctccctcctgcactcctcgctgcagaacggcgtgtcccctctgtacatgaagatgtcgncggcgaagcccttgcgacacagggtgcactcgtc

SEQ ID NO: 35903 - DNA, 265 bp, Oryza sativa
  Clone ID: PAT_MRT4530_39780C.1
cccaaaatggctaggtattaaacaccgtaagggggtgccgttggttgattcggaaaatttaatggatagcattaccagcgcctatgataatgataccgcatttgtggggacaaatgaggaatatgcggctattcatcaattcggagggatggctgggcgtgggtgcaaagtgaagattgaggctcgtccatttttaaccctgaccgagcaagataaatcggatattctggaagagatcacagactactggcagcgactattacaa

SEQ ID NO: 35904 - DNA, 2962 bp, Oryza sativa
  Clone ID: PAT_MRT4530_39781C.1
tgcagggtggcggcgcgaccgggggtctgttaaacagagttgtttcataagtactataaataactgcttgttctcaattacataaagttttcataaaagttttaacagcctgatcccaagtacattacatagatgataacaatatcaaagtacacagatgacatatctcttcttttcaacacaacacattgatgatagatgtctttcagatgaagcgtgaaatgatacatacgaacagggatgggcaactcaaacaatgacagatagtcgacaagtccgggcataattattagcacacctcctgtcacaggaggctcttgatgggggcgtaatttttggacatcttttggtacgtgtacacgtactggattattattgggcatttcactctcgagaaagcacgggaaaacttcagcctctgaacagaaacttgccgaaactaaactcccttggttgatcatcaaacttagagcatgatagaaccaaccctgatgcagactgagatgttggcgatctggtcctctgaggaaccataaataaacaaggatataacctcaagcactaaattttgttgtgttcaaggagctagcgaactagtgtttggatcctcgttagtaatgtcgacaccaagagaagggaatgaagggatggacttgagaatcaacttcctgccactcttgcagatcggagacaatccggtaccaatgcgagggggagagaccctctttttattaggtgacacgaccttgacagaagtttgaggggatgattccccttttaggacatttgatgtaccatccccgagcatcatttctgcgtagctttcgaatggagagagtagaatgtcagacttcaggtgtccttcaagtcgagaagaatatccaccaagcttcgtcgacgatcttggcttcttggagctcaaaggtggaagagcaaccaagggtctgtaatccacaactgaaggtgttgccagcacactctcagcaggagtaaggttgatactatcttgatagataacaagctgcttatcattatcagtggtttcttccttcacgcctccatccttttcttcgcatccacgcttagcttcctctatgcctaacagtgcaactcctaggaagtacattttcaaacagaatagcatgcaagatattctaagattcctagtgctctcctttcctttgtatctgatatgtacatcacataaaataccacagatgcaactaatagctaattcctgaccaggctcagtgcgaattactttaggagcaaatgcaagtggattacgagactcaatctgctctcgagtcgatagaactgtttccatgttgctaggcatattcagacagccttgacacgaacaaggttctgaacaaaagacaccagcatgaaaacactcacagtacagcttcaagcattttgacttcttacagctacaacgcttgcacgacgtgccatcaccattgtcgaacttgtgtcttttcttcttgggactaccctgactcgattcaccaacatatgcaaccacggctgtctgggaggagtcatcatttatagtatgtggatcatctgttggtggagaagaaccaacagcagacggaacattgctggcttgattcaaagaggattgaatgtcattatggggaaccattttatcctttggcactgtggcaagggcattcaaatgcaagccaataccaggcaatgcacatggaggggtcctcagagtctttaagttgttatcactggaactaatcttgcgtctgggtgtggttgaatttgtagaatgacgagctgaggagttctttgccccttcattagcagctccactcttttcattgaaaaggcaacgtctacgcatgccacgtaaattctgtgatgacacattgtggtccattggcatgtaatcactgggctcgttgagcttgttattgatttgatcatttggcaccaactggctttgacaagcaccagggagcatttggggggtataatctgttgcacacccttcaactgccccagcccagtaaagatgaggatcaggtgcagaattttgtgtgtaagagccacttggcccatcggtcaacaaggtttcacagtagacattatctgtttgtaatgtctcattcactaactgtgtttctgactcaaatggtggagctaatctcagcatatcactatgtggttgatgtgcaaacatgtaacccccatcaaatgacccaagttcatccttgtgttgttcagacagttggttttcacaagcattattacctgactgtgatgaatccattttttctggtccacactgatcaagtaggacgaattctatgtctgtacggtcttgctctgtagtgggatcctttttaccatcagtattttgatttcgtatcactttctgcactgccgccacaaagctggatgggttgagatgctttacttgaagttgaatcatttaggtaacaagttatactgcaattttctgaaacaatgtttttgcatctgatcattctaataatagagcttgtggcccctgttcgagttctgacactgttcggagagtgcgattctcgagaaagttgaacagaatcttccctgattggaagtttagattcctttgcaggattgacatgtggtgaggcaaagattgaggaaacaggagccaagtctgatgacttgaatagttgaacattatgtgctgagtctgaaggcttaggtggtggtataggagataggctgttgatgaaattgaagacaggagagtcctcgacggccgcggtggcggcggcgcgggggggcctatccggcgtgtccatctccggcggcggcggcggcggccacgcgggggatctcccgcatccgcctccgcctcctcctcggctgcggctgctggcgagtgaggagtaggaggaggaggagtgcgctgctgctgctgatgctgatgctgctccactagtggttttac

SEQ ID NO: 35905 - DNA, 532 bp, Oryza sativa
  Clone ID: PAT_MRT4530_39782C.1
ccggccgggaacaacgcatctcatctcatcactcatcagtgcgttcgcgaaaaaatcactcatcagtcttccaattctagctttcgacaccaacaccaaacaaaggatgaggactgttcagttgctgctggtcgccattgccctcatgtctctatcatcagtgatggtggcgagatctgcagacatatctgccttaaccccgaactgtagttcagttatcctgaatccgggcaaggcatgcagcgccgccaaatgcaacgcggactgctccaggatgtacaagggcaccggcacctgcttcggtccagttggttgtgactgcgagtactgtccgtctgcctcggcaccaaccgcgactggatcaaagaactagctgggctatatttgtgatgtagaaatgatatgtgtactcatttgcttccatggacatggcagcgatcgatgtgacgatgatggtgtatcagcaaattcttttcttagcatgatataatgatggtgcaaaagttcgaaaaaaaaaaaaaaaaaagcggcc

SEQ ID NO: 35906 - DNA, 442 bp, Oryza sativa
  Clone ID: PAT_MRT4530_39783C.1
tggttaggtcgccgacgacggctgctcctctcagccatggcggcctcttgctcctcgtggcttgttcaggtcgccgccgcctggtcgggtcgccgacgacggctgctgctcccgccgcctggccgaccctccgacgccgcttgctccccgtcgccatcgcccgaccaggtcaccgccgccgccgctgccgccacctcactttctactgtttgagatggggatcggggagaggaagcagcggttctcggggcgatacaaccaaacatttgcaaaataaccaggaggaacaaaggtcactacatattttgcaaaatatataatttattcttctttttctatttctttaccgcaataacttcagctccgctcacttccggtaaaaacaggaataaaccggtggttcgttttggaaaaactgaagttaaaacaaaaaaccctaaaa

SEQ ID NO: 35907 - DNA, 282 bp, Oryza sativa
  Clone ID: PAT_MRT4530_39784C.1
atgggggttcggctcaaccccccaaaaagctcgtcggcgacggagaggcccgacgaggaggggtgccctcgagtcggcggggacgccgagcggagcggatcgccgtcggttccgtttctcggccacctgcatctcttgggcccgctccggcaccgctcgttgcacgagctgcacctccggtacggcaccgacggcggcctgctcctcctcctgctccgcctgcagctcgggcggcggcggacgctggtcgtgtccacggcggccgcggcggcggatttgtaa

SEQ ID NO: 35908 - DNA, 363 bp, Oryza sativa
  Clone ID: PAT_MRT4530_39785C.1
atggtcgcctcggaatacagggcgcaacgaaaccaagaagaaattgagcgagaaacaacgacgaaaatacgaatctccacttgtggtcgggcaaccggcttgcctagccttcgtggtgctgtggcgaagcaggaggtgtgtctccgccatggcaccatctctcaagcccgtgtccatggcagcggctcgcggcatgctcgacaaaggagccctgctggccctaacccccgcgacgtcgcctccaacttcgagataaccaaacctcaccgtcgatctgttgatataaaaacacgagatatgagagatctgcttaactccagtgtggcaatattctcacgtgtcccatggtatcattttttctga

SEQ ID NO: 35909 - DNA, 282 bp, Oryza sativa
  Clone ID: PAT_MRT4530_39786C.1
atccgggatcggtttttttttgcctaggggaagaacacatgcatatcactcgcagaccataggagattctaagccccaaccaaaagtaactcctatcctttctttgactcactcttatccaccgagcatcaaactaacagaacgaaaacccacaaatatacagtctttcaccccacgtctcagcagaccacgcactctggttctcacccccaaaatcatatcaagtaagcaattcttaaagcggggctgcctgcttttcctcaatcaattgcttgcgctcgc

SEQ ID NO: 35910 - DNA, 4587 bp, Oryza sativa
  Clone ID: PAT_MRT4530_39787C.1
atgtccgacgctcggtctcggcgttcggtcgcctcgagcactcagcgtcagcaggacgccgagctcgccgcagcagaagagcgcaggcgagcaacggctcagaccgctgcagcagcagcgagggcggccagactggcggcagcggagttggcagcagccagggcggaggcggaggcggaggcggcggaagatgcggcacgtgcggcggaggtagaggttgagaccttgcgcagcagcatcaacggctccatcgccggcgacatcaccgccgacagggagcttgaggagctggcaagaggaagggcacgggagcgggcagagcggtgggcagcagcccacctccacggcggtggcggcggcccaagggaccgcgcgcccgccgacgggaacccagacgggcgcgggcgtgccggcggcagcccggagcccacacgtggccctcacagacagcgcggctctcccctgaccggcgccatggtcaccacggcgtccagacggtggtcagggactttggtcccggcggtgcggcacatgtgggaggcagtccggtacggcgacgtcgactacgacgaggatcggcaggcactggatgccctcatcgctgcagtcccgcccgagatgcagttctcgctttcccagaagcggactgccaaggaggcctgggacgccatcactacggcacgcatcgacagcgaccgcgcccgcaagtccacactgcaggcactccgcaaggagtgggagaacctggccttcaagccaggtgaggatgttgatgactttgctctccgtctcaacactctcttgcagaaaatggtgcagtacggcgacgacacctacgacgaggagagagctgtcgagaagctcttccgctgcgtccctgagaagtacaggcagatcgctcgctcgatcgaatctctgctggacctctccacaatgtcgatcgaggaggcgttaggtcgcctcaaggtcgtcgatggtgatgagccacagcctctctcggggcccatcaccatcggcgggaagctccatctcactcgggagcagtgggaggcctctcagggtgacgggaggaagagggagtcatcttccccgacaggcggccgtaagccgcgcaaggcgcggggaggtgtccagctacggtgggcgcgaagacgtgccgagggtggcgcccgcagaggcgcccagggcgttgccaccggcaaccacaagcaggcacgagacgacgcctgccgcaactgtggcaagcttggccattgggccaaagactatcgacagccacgacgcggccaggcccacgtcgcacaggtggaagaggaagagccggctctgctcctggctcacgcaagcatcgagctacctccagcggcaccggccgcagcggctttcctccaccttgatgagccgaaggtactcgtctccctctgcaacggctccagcaacgacaaggctgatgagtggtacctcgacaccggcgccacccatcacatgaccagccgacgggagttcttcaccgagttcgactccggcgtccgaggctccgtcaagttcggggacgcctccggcgtggagatcaagggtgttggctccgtcaccttcaccgccaagtccggtgagcacaggctgctcaccggaatctactacatccccgcattgaggaattctatcatcagcgtgggacagctggatgagaacggctcacgcgtgttggtcgaggacggactcatgaggatttgggatcgccgtcgtcgccttcttgccaaggtaaccagaggcactaatcgactctacatcctcagcgcgcaggtcgcacaaccagtttgcctcgccgctcgtcgggacgacgaggcgtggcagtggcacgagcgcttcgggcacctccacttcgaggccctgaagcagctcagtgccaaggagatggtgcgaggcatgccgtgccttgaccacgtggagcagctctgcgacgtttgcgtggtgacgaagcagcggcggctcccctttccccagcagacgagcttccgagccaaggagtggctcgagctcgtgcacggggacttgtgtggcccagtgacaccggccacaccaggaggacgacgttacttcctgctgctcgtcgacgacctctcccgctacatgtgggtgatggtcctcggcagcaagggagaggctgcggacgccatcaggcatgcgcaggctgctgcagaggcggagtgcggccgcaagctgcgcgtgctgcgcaccgacaacggcggcgaattcacagcggctgaattcgcgtcgtactgcgctgatgagggcattcagcgccactacaccacgccgtacagcccgcagcagaacggcgttgtcgagcggcgcaaccagacggttgtggggatggctcgggccctcctcaagcagagggggatgccggccatcttctggggggaggcggtggtgacggcagcctacatcctcaaccgctcgcctaccaaggccctcgatggcaggacaccgtacgaggcttggcatgggcgcaagccggcggtctcccatctgcgggtcttcggctgcctcgcgttcgccaaggagcttggccacatcggcaagctcgacgacaggagcaccccaggggtgttcatcggctacgcggagggctcgaaggcctaccgtatcctcgaccccggagacacagcgtggcgagggtgggtatgggacaaggcggtggacgatggttcgactccgacgtacgacgacttcaccgtcgagtacatccacttcgagggagctgggggagtaggcagctcttcttcaccgagcgtgtctaccccagccctcgaatctccaccgactccgacaccaacacaccctcgggccacgacttcgactacgacgagctcttcgtcgacaccaccccagccagtgactccacatgctccagcaccaacagccactcctccaagcacgtctactccgacgccagctcgtgttgagcgcagcccagtggagttcgctactccgctctcccacgacagggagcgcatcgacgcgtaccacgacggcgagcagctacggtaccgtacgatggaggatcttctcggcgaccaaccggtgccaggactggtgcctcgcgacctagaggcgcagttgcaccttgcgtgcgacgacggtgagcctcggtcttttgcagaggccgagaaacacgcggcatggcgtgccgcgatgcagtcggagatggacgcggttcaggagaaccgcacctgggagcttgctgacctccctcgtggtcaccgagcgatcacccttaagtgggtgttcaagctgaagagggatgaagccggagccatcgtcaagcacaaggctcgcttggtggcacgcggtttcgtgcagcaggaggggatcgactacgatgatgccttcgctcccgtggcacggatggagtccgtgcgactccttcttgcgctggctgctcaggaaggctggggcgtccatcacatggacgtcaagtcggcgtttctgaacggcgacttgaaggaggaggtctacgtgcaccagccgccgggatttgtgatccccggcaaggagggcaaggtgctacgcctgcacaaggccctctacggcttgcggcaggcaccgagggcgtggaatgccaagttggattccacgctcaaggggatggcttcgagcaaagcccgcacgaggcggccatctactggcggggcaatggaggaaatgccttgctggatgcggaggtcgcggcgttcaagtgaggagatgaaggccaccttccagatgagtgatctggggcctctctccttctacctggggatcgaagtgcaccaggacgactccgggatcacgcttcgacagaccgcctacgccaagcgcgtcgttgagctgcctgggctcaccgattgcaacccagctctcactccgatggaggagagactgaagctgagccgcgacagcacggcggaggaggtggatgctacacagtaccggcgtcttgtggggagccttcgctacctcacccacacacggccggacttggccttctccgtcggctacgtcaatcggttcatgcagcgaccgacgacggagcaccagcaggctgtgaagaggatcatccgctacgttgcggggactctcgaccacggtctctactacccgaggtgtcctggcaaggcacacttcgtcgggtacagcgacagcgaccacgccggcgacatcgacaccagcaagagcacgagcgggattctcttcttcctcggcaagtgcctcgttagctggcagtcagtcaagcagcaggtggtggccctgtccagttgcgaggccgaagacactggaacggtggagctcagggtggatagcaagtccgctctggccctggcaaagaaccccgtttttcacgaacggagcaagcacatccgggtgaggtaccacttcatccaaagctacttggaggaagggagcatcaaggcgagctacatcaacaccaaggaccagcttgcggacttgctcaccaagcctcttgggaggatcaagttcctcgagctctactccaggatcgggatggcccaacttccccacaagacgacgcacaagacttag

SEQ ID NO: 35911 - DNA, 388 bp, Oryza sativa
  Clone ID: PAT_MRT4530_39788C.1
aagcccagaggaagcagggaagggtaaatggtacatcgcaactgctgctaccaaccacatgaccaatgacaagagcctcatctccgacctcaagcctgtcgccgatggccgtaatatcattgctgatggcaatggtgcagggttgaaggtgcagggcaggggagctgtgaacacagaaactgtggttctccctgcagaagtgtggtatgtgccggagattgatgaaaacttggtttctgttgaccagctcaatgaacttggcctcagtatttcgattggccgaggtgtatgcaccgtcactagagttagtgatggatctgtagttggcaaagcgcgtagatcaggtggagtctatgaggtggaattcctcaaggttccccttaattag

SEQ ID NO: 35912 - DNA, 1863 bp, Oryza sativa
  Clone ID: PAT_MRT4530_39789C.1
aaaaaaacttggtactccacaccactagctagtaatgtggccgctctctcctcaccgacggcatctccagcagcacgggcattccggcgccatgggtcggcggctgttgctgctcttcctaatgctggcacaggcacccaattccaatggggattccaagataaagaacgtggtggtgttggcgctggagaaccggtcgttcgaccacatgctggggtggatgcagcggctgctgggcctccccatcgacggcctcaccggcgcagagtgcaacccggctccaggaccaggtccagccgactccctcctccactgcgtctcccccgacgccgacctcgtcgtccccgacgaccccgcccacgccttcgaggacgtcctcgagcagctgctggggttccgacccaatgactctactggcgccgccgcctccccctcagacatgtcgggcttcgtccgcagcgccgtctccgtgagcgcgctcctgaccgacgccgtcatgcgggggttcaccccgtcgcggctcccggccttctccgcgctggcctcctccttcgcggtgttcgaccgctggttctcctccatcccggggcccacgcagcccaaccggctgttcctctactccgccacctcccacggcgccgtcgcccacgacaagtggaacctcctccgcggctacccgcagcgcaccatctttgactccctcgccgccgacgccctcgactaccgggtctacttcaagaccatccccaccaccctcttctaccgccgcctccgcaccgtcgccaacgccgcccgcggcaccttccgccgctacgacgccgccttccgcgaccacgcccgcaggggcctcctcccggcgctctccgtcatcgagccacgctacttcgacctcaccggcacgcccgccgacgacgaccacccggcgcacgacgtcgccaacggccagaggctggtcaaggacgtctacgaggcgctgcgggcgggcccgcagtggaaccacacactgctcatcatcacctacgacgagcacggcggcttctacgaccacgtcccgccgcccaatgtcggcgtccccagccccgacgccatccgtggcccgctgcccttcttcttcaggttcgaccgcctcggcgtcagggtgcccaccatcatggtgtcgccgtggatcaggaaagggacggtggtggggaggccgccgggagggccaacgcccacgtccgagtacgagcactcctccatcccggccaccatcaagaagatattcaacctcagctccgacttcctcaccaggagggatgcgtgggcgggcaccttcgagcacctcttcacggacctggacgagccaaggacggattgcccggagacattgccggagatcccgccgccatcttcctcgtcgtcgtcgaccaagaaagaagacggaggatggctgtcggacttccagcgcgagctggtgcagctggcggccttcctcaacggcgactacatgctgtcaagcttcgcacaggagtacgagtcgagaatgacgatgacggtgaagcaggcggatgcgtatgtgaggcgagccgtcaaaagtttcctggaggccagcaagcgggccaaacgcttaggtgcaaacgactccgccattgtaaccatgagaccatccctcactactgcaaccacctgctgcccttagttacctactgtagtacactaaactagtctctttattaatttaattaattacctaccttagctaatccaatcccctacccatatacttactactggagtactccattagtttaattactgtatatcgatgatcatatatatatcacacagattttcagccccgatctgaaatcgctcatcaccaac

SEQ ID NO: 35913 - DNA, 648 bp, Oryza sativa
  Clone ID: PAT_MRT4530_3978C.1
atggagctacagaggacgagaagcactagcagtagtccaagaggagtcatggcgatcatttttcagtccggcggcaagctctcgctcatagagaacaggagatcagcgggaggcgattcctcactcccattcagcgtctcaacgagctcacacaccttcttgttcagcgtagcagcaacgccacactggtggaggcgaagcggtggcctgcgagaggtcagcaatctcctcaccctacggtcagactcaattgcccatcaatttactcaactactcaagcttgctacaaattacttcatctggactgctggaggttcgccactgctcccccaatggcctgctgtgagccgctcgcagaccaaggaagggcaagctcccatgtgcgtgctcctctgtgcaagctcgctaggaacatgggggcagacaaggactgcaagattggtgcccacacatgtcgtgaggcgtgaggttgaagaagaggatgaaattgctttaggattggtgctcacacgtgtcacgcttggaaatgaagtctttcctattagcgtaggacctccgtcttaccaaattttcttcccacatgaagtacatgtgacacaatgcgtcatatttaacgaagtcgtgtgtctgtatggaatagctttttga

SEQ ID NO: 35914 - DNA, 1451 bp, Oryza sativa
  Clone ID: PAT_MRT4530_39790C.1
ccggaaaaccccgtcgcccacgcgtccggcctcttggtgcccggccatttatgccccccaaactcctcacttatctgatcctagccctcctcgccgcccctgccgccgcagcgcggcgccacccgtctccgcccagctcagccgccgccggggagcccgtctacctatggccgctgccgggcaccttcgcctcgggttcccggaccctgctggtcgaccctgacctcgcgctcgacggccacctccgcccgggccccggcgacgtcgccgcgggttcgttggaccctgccggtcgactctgaccttgccctcgggcgcacgccgcgcgcaacgcctcgggtgggtacgacgtcgggaagctcaccgtagtggtcgcctccgccgatgacaagctggagcttggagtggacgagagctacacgatctatgtcgcggcggcgggcggcgtcaattcgatcgtgggtggagcaaccatagaggctaacaccatatatggagctattcgtggattagagacattcagtcaattgtgtgttttcaactacgataccaaaaatgtcgaagtgcgtcatgccccatggtacattgaagacgaaccacgctttgcttttcgtgggttgctccttgacacatcaaggcatttcctcccagtagatgtgattaaacaagtgattgactccatgtcattttctaagctgttctttcagttcacttataaaaggtgttctctgatttcacgtctgaaacttcccgactctaaagctatgctaggaaaagagaatgttattgctctacaaggaatgtgttctgattattatttacatctgttaggtatccatgtcatggctgaaattgacgtgcctggccatgcagaatcatggggaaagggatatccaaagctctggccttctcctaagtgcagagaaccgttagatgttactagcaatttcacatttgaagttatttctggaattttgtctgatatgagaaaaatctttccatttgggctcttccacttgggtggtgatgaagtatatacaggttgctggaatgcaacaccccatgtgaaacagtgggaagaaaccttcaactcattcaaagaaaatctcaatcctctaaccgtggtgcataactggctgggtcctggagtctgccctaaagttgttgaaaagggtttcagatgtataatgagtaaccaaggtgtatggtaccttgatcatcttgatgttccctggcaagatttctacactagtgagccactcgctggaattaataacacagcacagcaaaagcttgtacttggtggagaggtttgcatgtggggtgagacagcagacacctctgatgttcagcaaacgatatggccacgagcagctgcagcagcagctccagtcacaaactcttatgctcggcgtcccccaattggtcctggttcatgcttcattcagtaa

SEQ ID NO: 35915 - DNA, 4402 bp, Oryza sativa
  Clone ID: PAT_MRT4530_39791C.1
atgtccgatgtacggtcttggcgttcggtcgcctcgagcacacggcgtcagcaggatgccgagctcgccgcagcagaagagcgcaggcgagcaacagctcagaccgctgcagcagcagcgagggcggccagactagcggcagcagagttagcagcggccagggcagaggcggaatcagagcacgtgcggcggaggtagaggttgagaccttgcgcagcagcatcaacggctccattgccgacgacatcaccgctgacagggagcttgaggaactggcaagagggagggtgcgggagcgggcagagcggtgggcagcagcccacccccacggcggcggtggcccaagggaccgtgcgctcgccgacgggaacccagacgggcgcgggcgtgccggcagcagcccagagcgcgcgcgcggccctcgcaggcagcgcggctctccctcccctgaccggcgccatggccaccacggcgtccagatggtggtcagggactttggtcccggcggtgggtggcctaccctctccaaaaccaactacatcgagtgggttgcggtcatgagggtgaggctccaggtgcggcacatgtgggaagtagttcggtacgcgcgacgtcgactatgacgaggatcgacgggcgctggatgccctcatcgctgcagtcccgcccgagatgcagttctcgttttcccagaagtgaactgccaaggaggcctgggacggcattgctgcggcacgcatcggcagcgaccgcgctcgcaagtccacactgcaggcactccacgaggagtgggagaacctggccttcaagccaggtaaggatgctgatgactttgccttccatctcaacactcttttgcagaagatggtgtagtacggcgacgacacctacgacaaggagagagccgtcgagaagctcttccgctgcgtcccagagaagtataggtagatcgctcgcttgatcgagtctctgctggacctctccacgatgtcgatcgaggaggcgataggtcgcctcagggtcgtcgacggcgatgagccacaacctctctcggggcctatcaccattggcgggaagcttcatctcactcgggaacagtgggaggctagccagggtgaccggaggaaggaggagtcctcctcctcgacgggcgacccagttttcctccacctcgacgagccgaaggtacacgccttccttggcaacagctccagcaacgacaaggctgatgggcggtacctcgacaccggcaccacccatcacatgactggccgatgggagttcttcaccgagcttgactccagcgtccgaggctccgtcaagtttggggatgcctccggcgtggagatcaagggcgtcggctccgtcaccttcaccgccaagtccggtgagcacaggctgctcaccggagtctactacatccccgcgttgagaaactctatcatcagcgtggggaagctggatgaaaacggctcacgcgtgttggtcgagcacggagtcatgagaatttgggatcgtcgtcgtcgctttcttgccaaggtaaccagaggcactaatcgactctacatcctcagtgcgcagttggcacaaccagtttgcctcgccgctcgtcgggacgacgaggcgtggaagtggcacgagcgcttcgggcacctcctcttcaaggccctgaagcggctcagtgccaaggagatggtgcgaggtctgccgtgccttgaccatgtggagcagctctgtgacgtctacgtggtaacgaagcagaggcggctcccctttcccaagcagacgagcttccgagccaaggagcggctcgagctcgtgcacggggacttgtgtggcccagtgacaccggccacaccaggaggacgacgttacttcctgctactcgttgacgacctctcccgctacatgtgggtgatggtcctcggcagcaaggaagaggctacggacgccatcaggtgcgcgcaggctgctgcggaggcagagtgtggccgcaagttgcgcgtgctgcgcaccgacaacagcggcgaattcacggcggttgaatttgtgtcgtactgcgctgatgagtccattcagcgccactacaccgcgccatacagcccgcggcagaacggtgtcgtcgagcggcgcaaccagacggttctggggatggctcggctctcctcaagcagagggggatgctggtcatcttctggggagaggcggtagtgacggccgtctacatcctcaaccactcgcctaccaaggccctcgacggcaggacaccgtacgaggcttggcatgggcgcaagccggcggtctcccacctgcgggtcttcaactgcctcgtgttcaccaaggatcttggccacatcggcaagctcgacgacaagagcaccccaggggtgttcatcggctacgcggagggcccgaaggccgactgcattctcgacccggagacacagcgtgtgcgcacggcgcgcgacatagtgttcgacgaagggcgagggtgggcatgggagaaggcggtagacgacggttcgactccgatgtatgacgacttcactgtcgagtacgtccacttcaagggagctgggggagtaggcaattctccttcaccgagcgtgcctaccccagtccccgaacctccaccaaccccgacagcgacacactttcgagctacgacctcggctgcaatgagttattcaccgacaccaccacagtcggcgacccaacgcactccagagccagcagccacccctctgggcacgtccattccgacgccagctcgtgatgagcacagcccggtggagttcgctactccgctctcccacgacaaggagcgcatcgacgcgtaccacgacgacgagccgttgaggtaccgtacgatggaagaccttctcggtggccagccactgccaggctggtgcctcgtgacttggaggcgcagttgcaccttgcgtgcgacgacggtgagcctcggtctttcgcagaggctgagggacacgcggcatggcgtgccgcaatgcagtgagagatggacgtggttgaggagaaccgcacctgggagcttgctgacctccctcgtggtcaccgcgcaatcacccttaagtgggtgttcaagctgaagagggatgaagctggagccatcgtcaagcacaaggctcgcttggtggcacacggtttcgtgcagcaggagggtatcgacttcgacgatgccttcgcccccgtggcacagatggaatccgtgcgactcctccttgcgctggctgcacaggaaggctggtgcgtccatcacatggacgtcaagtcggcgtttctgaatggcgacttgaaggaggaggtctacgtgcaccagccaccgggttttgtgatccccagcaaggagggtaatgtgctacgcctgcacaaggccctctacggcttgcagcaggcaccacgggcatggaacgccaagttggattccacgctcaaggggatgggcttcgagcaaagcccgcacgaggtggccatctaccggcgaggcaatggaggaaatgccttgctggtgggtgtctacgtcgacgacttggtgatcaccggcaccaaggatgcgaaggtggcggtgttcaaggaagagatgaaggccgccttccagatgagtgatttggggcctctatccttctacctggggatcgaggtgcaccaggacgactccgggatcacacttcgacagaccgcctacgccaagcgggtcgtggagttggctgggctcaccgactgcaacccagctctcactctgatggaggagagactaaagctgagccgcgacagcacgacggagaatcgaccgacgacggagcaccagcaggctgtgaagaggatcatccgctacgttgaggggactctcgaccacggtctttactacccgaggtgtcctggcaaggcacacttcgtcgggtacagcgacagcgaccacgccggcgacatcgacaccagcaagagcatgagtgggattctcttcttcctcggcgagtgcctggttagctggcagtcagtcaagcagcaggtggtggccctgtccagctgtgaggccgagtacattgcggcccccaccgcttcgacctaggcgctctggcttgctcgattgctcagtgatctgctcggcagagacactggagcggtggagctcggggtggacagtaagtccgctctggccctggcaaagaaccccgtttttcacgaacggagcaagcacatccgggtgaggtaccacttcatccgaggctacttagaggaagggagcatcaaggcgagctacatcaacatcaaggaccagcttgcggatttgctcaccaagccccttgggaggatcaagttccttgagttttgctcccggatcgggatggctcaactttcccacaagacggcgcacaagact

SEQ ID NO: 35916 - DNA, 1017 bp, Oryza sativa
  Clone ID: PAT_MRT4530_39792C.1
gctaggaaaagaggtatccatgtcatggctgaaattgacgtgcctggccatgcagaatcatggggaaagggatatccaaagctctggccttctcctaagtgcagagaaccgttagatgttactagcaatttcacatttgaagttatttctggaattttgtctgatatgagaaaaatctttccatttgggctcttccacttgggtggtgatgaagtatatacaggttgctggaatgcaacaccccatgtgaaacagtggcttcatgaacgcaacatgactacaaaagatgcttacaaatacttcgtcctgaaggctcaagagatagcaattaaccttaattggattccagtaaattgggaagaaaccttcaactcattcaaagaaaatctcaatcctctaaccggggtgcataactggctgggtcctggagtctgccctaaagttgttgaaaagggtttcagatgtataatgagtaaccaaggtgtatggtaccttgatcatcttgatgttccctggcaagatttctacactagtgagccactcgctggaattaataacacagcacagcaaaagcttgtacttggtggagaggtttgcatgtggggtgagacagcagacacctctgatgttcagcaaacgatatggccacgagcagctgcagcagcagagcgtatgtggagtcagttagaggccatatctgcccaagacctggaaacaaccgtcttggctcggttacactatttcagatgcctgctgaatcaccgtggaatcgctgcagctccagtcacaaactcttatgctcggcgtgccccaattggtcctggttcatgcttcattcagtaaacagggagctgcagagcaaaataggcataagagggttatttgactccatacacctttcacactttagacaaaaatggtatcttgtcaattttagtgtactgtttctgtatgtttgtttgcattacattccccattttaagaatgtttcacaataaaattttatagtccctcgtc

SEQ ID NO: 35917 - DNA, 711 bp, Oryza sativa
  unsure (1)..(711): unsure at all n locations
  Clone ID: PAT_MRT4530_39793C.1
atggaggagagactgaagctgagccgcgacagcacgacggaggaggtggacgccacgcagtaccggcgtcttgtagggagccttcgctacctcacccacacacggccggacttggcattctccgtcggctacgttagtcggttcatgcagcgaccgacgacgaagcaccagcaggctgtgaagaggatcatccgctacgttgcggggactctcgaccacagcctctactacctgaggtgtcctggcaaggcacacttcatcgggtacagcgacaacgaccatgccggcgacatcgacactagcaagagcacgagcgggattctccttccttgcttttataagaaaatagacagaaaatgccctaactctcctagcgccatcctttcaaatgagagtaaagatcttgctaacatggtattcgatggatgggagaaaagtatgctccttggtgctcattgctgcataaggtcttacatgaattaggatgatatcctaatacanatcaaactgcaaatcatatctgccccaaattgatgaaatataaggatgatgaagatattctgatattgggttgcattggactactggaacatgttgctgtcttgctggacatagtaggcaatgaactgctactgagcatggatacagaatttggtggctcatttttgaactatgggtttacaactttccatgctgtttctgcatataatt

SEQ ID NO: 35918 - DNA, 408 bp, Oryza sativa
  Clone ID: PAT_MRT4530_39794C.1
atggcgccggtcaggggagggagagccgcgctgcctgcgagggccgcgctctccgtcgaaccagccacctccaccgggagcaccgccgccacgcgcgcgctctgggctgctgccggcacgcccgcgcccgtctgggttcccgtcggcgagcgcacggtcccttgggccaccgccgccgtgggggtgggctgctgcccaccgctctgcccgctcccgcaccctccctcttgccagttcctcaagctccctgtcagcggtgatgtcgtcggcaatggagccgttgatgctgctgcgcaaggtctcaacctctacctccgccgcacgtgctctgattccgcctctgccctggccgctgctaactctgctgccgctagtctggccgccctcgctgctgctgcagcggtctga

SEQ ID NO: 35919 - DNA, 570 bp, Oryza sativa
  Clone ID: PAT_MRT4530_39795C.1
atggacgtcaagtcgacgtttcagaacggcgacttgaaggagaaggtctacgtgcaccagccgccgggatttgtgatccccggcaaggagggcaaagtgctacgcctgcacaaggccctctatggcttgcggcaggcaccgagggtgtggaatgccaagttggattccacgctcaaggggatgggcttcgagcaaagcccgtacgagacggccatctaccgacggggcaatggtggaaaagccttgctggtgggtgtctacgtcgacgacttggtgatcaccggcaccaaggatgcggaggtcgcagcgttcaaggaggagataaaggccaccttccagatgagtgatctggggcctctccttctacctggggatcgaggtgcaccaggacgacttcgggatcacgctttgacagaccgctacgccaagcgcgttgttgagctggctggactcaccgattgcaacccaatcttactttgttggagagagattgaacttgaccccattatcccgacggaggaagtggtgcttcacaaaaccgacttttttggggaagctttttttccttaa

SEQ ID NO: 35920 - DNA, 3850 bp, Oryza sativa
  Clone ID: PAT_MRT4530_39796C.1
aagcggggcccgcatgtcagcggcgcacgggtggccggtctaccgtggaccgggaccacgcgggtgatccaccgccggtccacgggatcgacggcccggatcggcccggggccgatcggacggtgcggcggcggccaggctaggctcggctcggcacaaagccggccgagcggtcatggcgacggtgcgcgcacgcgcacgcgcgttgccgacgacggcaaccgccggcggagacggcggcgcaaggcgccgaagggcgcggcggctaggagggagagggaggggaaaaaaaaagggagggggtgcctcaccgagggtggccggcgcggaggaagacgatggcgaacggcgacggcaagccacgggaggacgacgtcggcgggcggacgagcttcggggtgccctaaggaaggagaagagagggattagagagagggagatggaccacggcgaccggaaaccatggccgaaggcggcggtggaggtggtgctcacccgaatgcgagggaacgaggctccggcgacgaacctcgacggaggaggggtggacggggtggatctcggccacgcgaacccgacggcggcgacggcgcggcctggcggcgaccctaacggcggctagcggcggccggagtagcggaaaaggcggcggcaaggggttgcacggcgcgggagcgatgggaggctcgagagaggggagagggaaccggactggccgagagaggcgggaatcgccggccgacgtggggagtgggggaggagagagaggcgggattcgaaaatcgaatcccggcgatctcgggcgcaggcgcgagcgggagagggagaggagtgggcgcgggagacgcggcgcacgcgcgggcgtggtcgacgtggcccggaggaggcggagacgagggcgcggcggcggttgcgggcgcgacggcgcgagcgagatcggcgggaggtgggggaaggaccgacaggtgggccccacctgtcggcgaccccgagagaggaggcggcagggcggcctggctgggcctcggcctgcggccggcccagacatgtcaaatccgattattatttgcattactttcttagggttttctcctgatttcacctgcattttcttagggtcatttataaaaattacaattttggcttgggaggaaaacttcggggtgtgacacttgaccacgtggagcagctctgcgacgtctgcgtggtgacgaagcagcggcggctcccctttccccagcagacgagcttccgagccaaggagcggctcgagctcgtgcacggggacttgtgtggcccagtgacaccggccacaccaggaggacgacgttacttcctgctgctcgtcgacgacctctcccgctacatgtgggtgatggtcctcggcagcaagggagaggctgcggacgccatcaggcatgcgcaggctgctgcagaggcggagtgcggccgcaagctgcgcgtgctgcgcactgacaacggcggcgaattcacggcggctgaattcgcgtcgtactgcgctgatgagggcattcagcgccactacaccgcgccgtatagcccacagcagaacggcgtcgtcgagcggcgcaaccagacggttgtggggatggctcgggctcttctcaagcagagggggatgccggccatcttctggggggaggcggtggtgacagccgtctacatcctcaatcgctcgcctaccaaggccctcgatggcaggacaccgtacgaggcttggcatgggcacaagccggcggtctcccacgtacgggtcttcggctgcctcgcgttcgccaaggagcttggccacatcggtaagctcgacgacaggagcaccccaggggtgttcatcggctacgcggagggctcgaaggcctaccgcatcctcgacccggagacacagcgtgtgcgcacagtgcgcgatgtagtgttcgacgaagggcgagggtgggtatgggacaaggcggtggatgatggttcgactccgacgtacgacgacttcaccatcgagtacgtccacttcgagggagctgggggagtaggcagctcttcttcaccgagcgtgtctaccccagtccccgagcctccaccgactccaacaccaacacaccctcgggccacgacttcgactacgacgagctcttcgtcgacaccaccccagccggtgtccccacgcgctccagcaccaatagccactcctccgggcacgtctactccgacgccagctcgtgttgagcgcagcccggtggagttctctactccgctctcccacgacggggagcgcatcgacgcgtaccacgacggcgagcagctacggtaccgtacgatggaggatcttctcggcgaccagccggtgccgggactggtgcctcgcgacctagaggcgcagttgcaccttgcgtgcgacgacggtgagcctcggttttttgcagaggccgagaaacacgcggcatggcgtgccgcgatgcagtcggagatggacgcggttcaggagaaccgcacctgggagcttgctgacctccctcgtggtcaccgcgcagtcacccttaagtgggtgttcaagctgaagagggatgaagccggagccatcgtcaagcacaaggctcgcttggtggcacgcggtttcgtgcagcaggaggggatcgactacgacgatgccttcgctcccgtggcacggatggagtccgtgcgactccttcttgcgctggctgctcaggaaggccggggcatccatcacatggacgtcaagtcggcgtttctaaacagcgacttgaaggaggaggtctacgtgcaccagccgccgggatttgtgatccccggcaaggagggcaaggtgctacgcctgcacaaggccctctacggcttgcggcaggcaccgagggcgtggaatgccaagttggattccacgctcaaggggatgggcttcgagcaaagcccgcacgaggcggccatctaccggcggggcaatggaggaaatgccttgctggtgggtgtctacgtcgacgacttggtgatcaccggcaccaaggatgcggaggtcgcggcgttcaaggaggagatgaaggccaccttccagatgagtgatctggggcctctctccttctacctggggatcgaaaccgcctacgccaagcgcgtcgttgagctagctgggctcaccgattgcaacccagctctcactccgatggaggagagactgaagctgagccgcgacagcacgacggaggaggtggatgctacacagtaccgacgtcttgtggggagccttcgctacctcacccacacacggccggacttggccttctccgtcggctacgtcagtcggttcatgcagcgaccgacgacggagcaccagcaggctatgaagaggatcatccgctacgttgcggggactctcgaccacggtctctactacccgaggtgtcctggcaaggcacacttcgtcgggtacagcgacagcgaccacgccggcgacatcgacaccagcaagagcacgagcgggattcttttcttcctcggcgagtgcctcgttagctggcagtcggtcaagcagcaggtggtggccctgtccagctgcgaggccgagtacatggcggcatccgccgcttcgacccaggcgctctggcttgctcgactgcttggtgatctcctcggcagagacactggagcagtagagctcagggtggacagcatcctttcagttttgcttttagcatctttcggttttgcttttagcatccctaggacagcatctagcatctcctttatgctttatttagtttggatgctctctaggacagcattgcgtccaaattttagactagtgtgctgctcgatgatggaataa

SEQ ID NO: 35921 - DNA, 1532 bp, Oryza sativa
  Clone ID: PAT_MRT4530_39797C.1
ccggccgggatctctatccgcagatccacaaccatccatctccattcgccatttccgcccactgccaggccaacgccactgctgctaagctccgcctcgtcttccgcccacgctgctctgctcgtcgtcgctctcgctcgcagtgccccgcgcgcgcgaacgaggcgtggtgggggggtaatggcgcctcctccgtacgcagccgcggtggtggtggcgaccgtcgccgtgctggtgctggtgtcgcaggtctcagtggccgccggcgcggactgccgcttcccggccgtgttcaacttcggcgactccaactccgacacgggcgggctgtcggccaccttcggcgccgcgccgccgcccaacggcaggaccttcttcggcatgcccgtcggccgctactgcgacggccgcctcgtcatcgacttcatcgctgaaagcctgggactgccttacctcagtgcgtacctcaactcgataggaagtaacttcacacaaggtgctaactttgcaacggccgggtcgtcaatcagaaggcagaacacatctttgttcctctctggtttcagccccatttccttggacgtgcagtcctgggagtttgaacagttcatcaacagaagccagttcgtctataacaacaaaggtggaatctacagggagctcctacccaaggctgaatacttctctcaggcgctctacacattcgatatcggccagaatgacattaccacaggcttcttcataaacatgacctctgaacaagtcatagcttacatccctgatctaatggaaaggctcacgaacataatccagaatgtgtacggtctcggagggaggtacttctggattcacaacacggggccgatcggctgcctgccttacgccatggtgcaccgccccgagctcgccgtcgtcaaggacgggtccggctgctccgtcgcctacaacgaggtcgcccagctcttcaaccagaggctgaaggaaaccgtgggccacctccggaagacccacgccgacgccgcgttcacctacgtcgacgtctactccgccaagtacaagctgatcagcgacgccaagaagctcgggatggatgacccgatgctgacgtgctgcggctacggcggcgggaggtacaacttcgacgacagggtcgggtgcggcgggaaggtgaaggtgaacgggacgtgggtggtggcggggaagtcgtgcgacgacccgctgaagcgggtgagctgggacggcgtgcacttcaccgaggcggcgaacaagttcgtgttcgaccagatcgccggcggcaagctctccgacccgccggtgcctctcaggcaggcctgccagatcagcagagggcagtgaatcgtcgccgccggtgcgggtgcatcgagccgtcgtcaggttggctgtgccgtactgccatttctgctgctgctgctgcctctggctttgtaagtgtgcaatattgcagaggcatatggttgatataaagtacatatactgcttcctttgtgcaataaagggagaatgagattcat

SEQ ID NO: 35922 - DNA, 1551 bp, Oryza sativa
  Clone ID: PAT_MRT4530_39798C.1
atggccaagcttgccacagttgcggcgggcgtcgtcttgtgccggcttgtggttgccggcggcgccgccctaggtgcctctgcgagcgccaccctcggcgcgtcttcgcgcacaccgcagctgcacgcctccgcgcgccttgcgctgcttgcagccgctcgtcgaggaggaggactcccattttctcccgtcaccctggctagcctcccactgctcccgagtgagatggagcttcccaccaatggtgataggccccgagagtggctatggctcatcgccttcgacgaccttgaggcgacctatcgcctcctctatcgacatcgtggagaggtccagcagagactcgatcgagcgagcgatctgcctatacttctctgggacgcaacggaggagcttctcgacggctctctccttgtcgtaggtgtcgtcgccgtactgcaccatcttctgcaaaagagtgttgagacggagggcaaagtcatcaacatcctcacctggcttgaaggccatgttctcccactccttgcggagtgcctgcagtgtggacttgcgagcgcggtcgctaccgatgcatgccgcagcgatggcgtcctaggcctccttggcagtccgcttctgggaaagcgagaactgcatctcgggcgggactgcagcaatgagggcatcccgcgcccgtcgatcctcgtcgtagtcgacgtcgccgtaccgaactgcctcccacatgtgccgcacctggagcctcaccctcatgaccgcagcccactcgacgtaggttgtcttggtgagggtaggccacccaccgccggggccgacttccctgatgacggcctgaaacccgtggtgtccacggtatcggtccggggagggagaaacgcgccgcctgtaacgaccgcgatctccgtcgacccaaccgttgccaccgagagcaccgccgtcatgcgcacccctgctagggggtccactgacgcgtccaagctcgtctgggctgccgccgccgcgcgcgctcccgccaggtacaccgccggttcaagtgaaaaggctgatgactggaggtgtgattctgcttgtcggttgagggaagaattcacaggcctgtgttcactgaggatatcttctcaacctattgtttccaccgatcatcgatctttaatgctagacttcctcagacccatgtgctttgtgaatacgaaggcagtggtcttttggtcttatttcttggtctcttcttttcatgctcatcagaactgggagagacaggatgttttaggggttttccaagtctctgaaatggagcagcaggtgtggtattatcatgggtatctagaaatgatcagcttctgctttgcttatgtacgcagccagagaaatatcttgtttcttcagataagaatatcattgttgctgcatggtttgtgtgacctgattagtatgttcttcgactcatggttcttcattcgttacatgatattgccctgttctaagcatggtatacaaggcaagccattcggtgggatactggattcatgggtctcctggcatggaagaagctag

SEQ ID NO: 35923 - DNA, 3174 bp, Oryza sativa
  Clone ID: PAT_MRT4530_39799C.1
atgacgacgacgacgaacaccggtggggttcggtcgaaggggaggcgaggccgagggcgaccttgccgctgcgatgctggaggtggagacggctacgtcggccggcgcactggcacggcggaaggggctgccgtagtgggtgccgacgagaccgagggagaggcggcgcgggtgacggcgttccggcgaaatacaggcgacgccgtggattggccggggaagaggatggcgttccggtgccgggataggcagcgacgacgaaagccgacgctccggcaaagcggcacaggcggctggagcggagggaagcgagccgagcacgggaggagcggggaacggcggcggaaaacccggctggcggccatggaaggtggccggagttggcgcgtccgttcccggcgattgggggcacgattcaagggggaatttgggggaattgaagaggaatcaatggggattaaaaccccccaattaattttggaatccatggacgtgacagttttcctccacctcgacgagccgaaagtacacgccttcctcggcaacagctccggcaacgacaaggctgatgggcggtacctcgacaccggcgccacccatcacatgactggccgatgggagttcttcaccgagcttgactccgtccgaggctccgtcaagtttggggatgcctccggcgtggagatcaagggcgtcggctccgtcacattcaccgccaagtccggtgagcacaggctgctcaccggagtctactacatccccgcgttgaggaactctatcatcagcatgggacagctggatgaaaacggctcacgtgtgttggtcgagcacggagttatgagaatttgggatcgccgtcgtcgccttcttgctaagataaccagaggcactaatcgactctacatcctcagtgcgcaggtggcacaaccagtttgcctcgccgctcgtcgggacgacgaggcatggcagtggcatgagcgcttcgggcacctccacttcgaggctctgatgcggctgagtgccaaggagatggtgcgaggcctgccgtgccttgaccacgtggagcagctttgcgacgtctgcgtggtaactaagcagaggcggctcccctttccccagcagacaagcttccgagccaaagagcggttcgagctcgtgcacggggacttgtgtggcccagtgacaccaaccacactaggaggacgacgttacttcttgctgctcgtcgacgacctctcctgctacatgtgggtgatggtcctcggcagcgagggagaggctgcggacgccatcaggcgcgcgcaggctgctgcggatgcggagtgcggccgcaagttgcgcgtgctgcgcaccgacaacggcggcgaattcacggcggctgaattcacgttgtactacgctgatgagggcattcagcaccactacaccgcgtcgtacaacccgcagcagaacggcgtcgtcgagcggcacaaccagacggttgtggggatggctcgggctctcctcaagcagagggggatgccggccatcttctggggagaggcggtggtgacggccgtctacatcctcaaccgctcacctactaacgccctcgacggcaggacaccgtacgaggcttggcatgggtgcaagccggcggtctcccacctgcgggtcttcagctgcctcgtgttcaccaaggagcttggccacatcggcaagctcgacgacaggggtgttcatcggctacgcggagggctcgaagacctaccgcattctcgacccagagacacagcatgtgcgcatggcgcgcgacatagtgttcgacgaagggcgagggtgggcatggcacaaggcggtggacgacgtccccgagcttccaccgacttcggcagcaacacaccctcaagccatgacttcgactatgacgagctctttgccgacaccaccacagcgggcgacgcacgcactccagcaccaacagccactactccgggcacgtccatcccgattccagctcgtgttgagcatagcccgatggagttcgctactccgctctcccacgacgaggagcgcattgactcgtaccacgacggcgagctgctgcggtacgaggccgagagacatgcggaatggcgtgccgcgatgcagtcggagatggacgcggttcaggagaaccgcacctgggagcttgctgacctccctcgtggtcaccgcgcgatcacccttaagtgggtgttcaagctaaagagggatgaagccggagccatcgccaagcacaaggctcacttggtggcacgtggtttcgtgcagcaggaggggatcgactttggtggcacggatggaatccgtgcgactccttgcgctagctgctcaggaaggctggaggaggtctacgtgcaccagccgccgggatttgcgatccccggcaaggaggacaaggtgctacgcctgcacaaggccctctacggcttgcggcaggcaccaagggcgtggaatgccaagttggattccacgctcaaggggatgtgcttcgagcaaagcccgcacgaggcggccatctaccaacggggcaatggaagaaatgccttgctggtgggtgtctacgttgatgacttggtgatcaccggcaccaaggatgcggaggtgcaccaggacgaattcgggatcacgcttcgacagaccgcctatgccaagcgcgtcgttgagctggctaggctcaccgattgcaacccagctctcactccgatggaggagagactgaagctgagccgcgacagcacgacggaggaggtggacgccacgcagtaccgacgtcttgtggggagccttcgctacctcacccacacacggtcggacttggcattctccgtcggctacgttagtcggttcatgcagcgaccgacgatggatcaccagcacgccgtgaagaggatcatccgctacgttgcgtggactctcgaccacggtctctactatccgaggtgtcctggcaaggcaaacttcatcgggtacagcgacagcgaccatgccggcgacatcgacaccatcaagagcacgagtgggattctcttcttcctcggcgagtgcctcgttagctggcagtcggtcaagcagcaggtggtggccctatccagctgcgaggccaagtacatagcggcctccaccgcttcgacccaggcactctggctgtag

SEQ ID NO: 35924 - DNA, 326 bp, Oryza sativa
  Clone ID: PAT_MRT4530_3979C.1
ctgacttacacgcagtcatgcgataacccacgaaataacgtgataacacaaggcagaccatatgaccaaaacgccaaaaaagcgccattaaccgcgtaaatgccctaggctccggcccccttacaaacgttacaaccctcctacaccaccattacaaagttgcaaaccccaaccagactatgaaaatacccaaccggactctcctgaaacctccctcttgccctttcatgctcccaccctccctcttacctgataaccctgcccctttctcccttcctgaaccgctgtcttccttcataaatcacgctgcttgcttataacttacg

SEQ ID NO: 35925 - DNA, 1835 bp, Oryza sativa
  Clone ID: PAT_MRT4530_397C.1
gcgctcttgtgcgttgctgcgacgggtgggagagaaacgtacgcgacgcgacgagctcctactccgatctccccgatgcgatctcgccaaaccctaatcccacccaccaccgcgccggagtcctagcgccgcccgcagccgccgccgccgtccggatgctgcggccgtgacctcctcctcctccgcctctgacatcccagccatgggagccgccgacaagtggctcctcccgctcgtgtcggtctccttcgtctcgctgctgctcttcctctccgcgctctcgggcttctccgcctcctcctcgctcttcgcgcgcctcccgccgccctcctacgtccgccgcggggcagccgcgccgccgtccttcgcgtacgtgctgtcgggggggagaggggaggggaggaagctgctgcggctgctgctcgcggtctaccatcccaggaaccgctacctgctccacctctcggccgatgcgcccgagtccgagcgcgtcgagctggccgccgccgtgtcgcgcgccgcgcccgccgtgcgcgccttcgggaatgtcgatgtcgttggccgccccaccgctggcacaccgatgggatcctcgggactcgcggctacgctccgcgccgcggccgcgctgctgcgcctggattccgagtgggactggttcgtcacgctcaacgccgccgactacccccttgtcacccaggacgacttgattcatgtcttctcctcagtgccaaggcatctcaacttcatcgatcacactagtgatattggatggaaagagactcagagagtgcaaccaatcatagtagatgctggaatatacttggcaggaagaaatcagttcttccaagccacagagaaacgtgatactcctgatggttctccgtgggtcattctaaatcgacggtttatagagtattgcatatttggttgggagaatctccctcgaactcttctcatgtacttcacaaacgtaatgctacctcaggaagggtatttccactcagttgtatgcaactcagacttccgtaactccacagttaacagcgacatgcggtatatggaatgggatgatccaccccagatggaaccccattttctgaacacgacacattatgatgagatagtggagagcggagtgccttttgctagaaagtttcgggagaatgaaccgctgctggacaagattgatgaaagagtactccaccgttggcgtcacagacctgttcctggtgcctggtgcacaggcagaaaaaggtggttcaatgatccatgctcccaatggagcaatgtcaacattgtaagacctggtccccaggctgagaagttccgcaaacatatgaatcagatcatagaggaatctgcatcaggcaacaactcatgcaagcaatagcagcaatgaagcgcgagatttcacttcccatgtttgaagcgaggagcttttctcattttgcatagaggggctcttcacgaacttcagcagttaacgcttccagagcgaacatttttgcacctgggttacaagcacacgtccaaaggtgagatgggtttattcttcccagattttttggtaactgtcatggcttcaagggcctcactgcatagcgcatactagcttagttggaagtcagagtgctgatggtcggagcaccaaagcttagaggcagtgtaattattagtgatcagttgaatgacttgtgcgactgtttatagaactgatggaattctgggtgctcccatacagggattgagaaaaatgaagagtgggtgatggtggttggattcttactgttgtggttaatacaatgctctttgcgcccaaaaaaaaaaagctt

SEQ ID NO: 35926 - DNA, 146 bp, Oryza sativa
  Clone ID: PAT_MRT4530_39800C.1
acgaaatgcaaataatcacttttgaatttaccaagttgtaggtgaagcaattacaggggtacacttgatccttctgaatttagaaagcatggaccgtgcaaagaaaatatacagcccgggatccaggtattttggaatcaaaatac

SEQ ID NO: 35927 - DNA, 1504 bp, Oryza sativa
  Clone ID: PAT_MRT4530_39801C.1
gttccaaataaagagaaaaaatggcaacggtggctcggatacagtggaagaagtgacagtctttgaatactacaggaagaattggaaaatagatttgaagggatctgctcactttccctgtctaaatgttgggaagccaaagcggccaacatatatcccattggagctttgccatttggtgccattgcaaaggtacaaaaaggctttgtcgacgttacagcggtccacgttggttgagagatcaaggcagaatcctcaagagaggatgtttgtcttgtctggtgtgttgagggacagtgattataactctgtgccaatgctgagggagtgtggcatttctatagctcaagaatttacccaggttgctgctagagtccttccggcaccaaagctgaaatctggagatggcgaagatatttttgcgcgcaatgggaggtggaacttcaataaaaattgcaatgcccatcatcttgctcagcgtctcatccattgtgggaacttgaagggacttgtaagttcatcctccacccaatcttgtgccttttctgcagattccggaccatggaagcgtatgtgtctcgtcaaatacggtattgtaacacaatgcttggctcctaccaagatcaacgatcagtacctgactaatgtgcttctaaagataaatgcaaagcttggagggttgaattcgctgctgcaaattgaaagaaaccaagccattcctctcttgtcgaagactccaaccattatcttaggcatggatgtttcccatggctcaccgggacgggatgatgtaccgtctgtcgctgcggttgttagttccctggagtggcctctcatatcaaaatataaagcctccgtatgcacccagtctcccaggctagaaatgatcgattccttgtttaagctagtggggaatgaggatcatgttatcattagagatggggttagtgaaggccagtttaatcaggtgctgaacattgagctagcccagataatcaaggcatgcgagtttcttgccaatgagaaaaatgacagtgaatggtctccaaagttcacggtgatagttgcgcagaagaaccatcacaccaaattttttcagacagatcgatcgaacaaagttgtcaatgttcctcctggtactgttgttgacaaaggaatctgtcatcccaggaactgtgatttctacatgtgtgctcatgctgggatgattgggactacaaggccgacgcattaccatgtgctgcatgatgagaacaatttcacccctgatgacttgcaggagcttgtgcacaacctctcatacgtgtaccagaggagcacgacggccatctcaggtgtcgctccgatctgctacgcgcacctggcggcggcgcaggtgtcgcagttcgtgagactcgacgacgcggcgtcggagggcagcggtgacggcggcgcgccgccgcggccggtgccggagctcccgcgcctgcacccggacgtcaggcagtccatgttcttctgctga

SEQ ID NO: 35928 - DNA, 502 bp, Oryza sativa
  Clone ID: PAT_MRT4530_39802C.1
gcggcggccggctgagggcggcacggggcggggcaggcggcgaccggccgagggcggcgcgccgcgcagcgggcggtctcgagcggcgcgccgcgtggcagcaggcgggagccgcggctggcgatggcgtcggcgggcgggagccgcggcgggctcgcacggccggcggcgacgggcggcagcagcgggcagctggcgcggccggctagccggctagggtttctggttttttttgctgaaaaatatctccggatatccgatgaaaaataccggatagtttccgaccgttttccgattccgtcggatatcacccttactgtattcgttttcgtatccgagaaaaaaaatccgaattcgtttccgaatccgagaaattccggatatttccgaccgaatttttccgaatctgaaaattggtcaaagtcacggatggaaagtatccgaaccactttcatccctactagacggtagtgggtattttttttcattaaaatttcaaaat

SEQ ID NO: 35929 - DNA, 243 bp, Oryza sativa
  Clone ID: PAT_MRT4530_39803C.1
atgccgcacgcccagtcccacgccgccacgcgcgacccggcgtcaccgtcactgcagttgcggctccggcgcatgctgttgcaggccagcaaacgcctcttctctgtaaaggatgagcagcaactcaccatctggttcacccgcgacaagatttgcatcatagatgtcgatcgggtgaagcttgtcaagctcttcctgaagatatccttcaataccatcatgctcccgtctccagcagtgtaa

SEQ ID NO: 35930 - DNA, 744 bp, Oryza sativa
  Clone ID: PAT_MRT4530_39804C.1
atgggcggactgcggaggacggaggcggtgcctcgttttggcagcgccaacaagtccccctcatcctcgtcctccggggcgctcgacggagacgcggcggaggccgaggcgcgccgccggctgacgagctcgctgcgggaggcactcgggctgtaccgggacatcctccgggtcacgtggctgttcgagtggcccgacgaccgtggcgattacgacggcatcgtgacggagtacgacgtggagtgcggtgtgctggtgtgggagcgcgacgagcacgaggggcggcgggtgtgggcgacggcgcggcatcgccccgtcctcttcgcgctcaccctggccaccgccgcagtcgccctacccttctcccccagggcgccggccgccgtcgcgccgccgccgccctcctctctcccgtctcgcctgccgacgtcgcgccgccgctttgcctcaccgagaaaccgcctagaaagagagaagtggaaaaggagggaagtgatgatgtggcttcctagcatcctcgcgtcgggtgccaagttccgccagaacgacttcgaagccgatgctgactctaagccgatgactactctgggcttaccaaatttcactgttaacagaggcctccaagccaagctgagaggaaccgtagaaatcagtcgtacctcctcatgtaggcccgactctcatgtgggcacggagatgggcagcaactccaaccgcgcctacaagctatgtcatcagatctag

SEQ ID NO: 35931 - DNA, 771 bp, Oryza sativa
  Clone ID: PAT_MRT4530_39805C.1
ttttttttttttaaacaaatgaatgattttttttttttgtatttgaagggaaaatatgtaactgcagttccgtcgactcccagataacgaaaaatgggcggctaatttaccactcagatgagactaaaatttctatcatttcaatgagcaattgagtggggggagtaagaacaaatcttgatctcacactgaaagatttctacacaaaggtcacaagctcaccgggcctgccacgaacaaccactgcatgtagagatctcaaaggacccctggtttgattatgtacaacgctggtccatgtacaattcagcaggagcaccaagcatgtgatgtcttgtaccaagtaaccacacgctgggccagcatagctgggtgcacgggtgcttttcttgaggccatgtgaggggccaatgctgcgtttacttccatccaatgctcaaactattcactgatgcacatggtaaaccgaaattctggaaactacctaaatcctgcgcatcccatcctgcagtaacatatcacttgacccccggagtttgatgttccttggaaacagccccttaagagcttgaactgtgactcatccaaatttacactggctgtggtagatggtagcatttcctctggccaagttgctgaacttttgcaagaggactcaatgaagaactcctggttcagattgaaaataccaggagcagcaggcgctcacacaatttttttaatggaagaatcctttccacagaggcttgaattgtatttgatagctcgtgc

SEQ ID NO: 35932 - DNA, 903 bp, Oryza sativa
  Clone ID: PAT_MRT4530_39806C.1
atgtggagggcacaacagaggaggcttaacctcggccatcgcctcgacctcttggatctagaagccgaagcaagagtagagaggcacggcgcccacatgttagtcaccctttctctgttggaacaagtctatgttgcctccctcacccttgcccttggtcgaattatatccctcaaccgtaaaaccgggtggggccaggtgctctccaggcaagtgaccaacagggagaggggcaggggccggcaggagaggagcaaggttgtggtggctcctctttaccgagcaatgcgggctacaacgtcttgttgcacagaggtggaaggatctagagtcacactcgggcactcctacccttgctccccagtgagctcgccaaggttgctcggcgtctgcatcatggtgacctcgagctcaagatccatagctgtcgccgtgttgtcgagcttggtgatgccgctggctcggctccgctccatctcagttgaggaacacgagctcccctgccgctcactgttgagccaccgcatcgacccccgataccgtctcgacgaccctcgatgccgcctcaacgacctgccacctttctatctcgactcatcttctagatgtgaggccgccattgccctgggccgccggcgtgagctagctgggagctgccgccgcgccagggcggagaggcgccaggccgccgcgccgccgcgagtggggaggggacagggcggccgcctcgccgggcggagaggcgccagaccgccgcgccgccgcgagtggggaggggagttgcacgggctcgcggacgaccccgacgccgacccggtcttcaagaacgtcgcgctcgacatggacatcctctaccgctccagcgagatgcaccagcctgagaaagcaatgagctgctcttag

SEQ ID NO: 35933 - DNA, 346 bp, Oryza sativa
  Clone ID: PAT_MRT4530_39807C.1
ccgatggtgcggttgccggtcaaggccgacgagctcacgcagagaagattggcaaaagcagagcgtcaccccggaactgatacaaatgaggactttgaaagtgtcaagtcaaccctgttatctctggcatcactgcaagtggcaacggataacttccacgaaagcaataagattggtgaggggggattcggtgccgtttataagggaattcttcatggacaagaagtggctgtgaagaggatggccaagggctccaaccaggggctggaagagctgaaaaacgagctagttcttgtcgccaaacttcatcacagaaatctttgttcgtcttgttggtttttgcctt

SEQ ID NO: 35934 - DNA, 513 bp, Oryza sativa
  Clone ID: PAT_MRT4530_39808C.1
atggggactctgttgaaatcagcgacgatgcctcgatatgaaacatgggaaccgccgaagaagaagcgcccctcccaggcggaggcccaagccgacgagatcaagaggctgcagaatgagttgcgtgacgccacagatcgtgtggagattcgtgacggagccttacgccggatgatggaggaatccatccaaaaggccaggcaggtggtcctacggcttggcctcgacatcccgctcatacccaatgccgcaacgagcttcgcggatactgtcgggcactacgtgctcaaattttcacatctcgccgacgtgctgagtagattgccaccgtcgaagaggcgagagcggaagagggcgcagttcgtggccaagcgcatcgtctgcccagctttacccacacgatacccacagctggccgggctgaaaagtaacaaggaaccggccggcaactccctagcgccggcggtggagatgaccggttttgggcaagggggcgccggtttcacgatctag

SEQ ID NO: 35935 - DNA, 376 bp, Oryza sativa
  Clone ID: PAT_MRT4530_39809C.1
aaacaaaagcgggccctttaccaaaaattttaaaaagccccaaccgggaaaaaaaaaaaattttttcaaaaaactaacccaaacgtttttttccgggggaaaccacagaaaagcggaaaaacaaaaggaaaaaggggaatccccggccgcggcaaacaaaaaaaaggtttttttggaaaaaaacccaaaggcgggccggaaaaaacttggggggaaattttaaccaagaattggaaaccccttggggttgggggggtcaaaaaacctgggggtttggaacgggccccccccccccccaaggttaaagaaaagatcaaggacccccttaaaggtcccctttctgaggacccggacctaaaggggccccaccgtttta

SEQ ID NO: 35936 - DNA, 2158 bp, Oryza sativa
  Clone ID: PAT_MRT4530_3980C.1
atccccaaccaatccccaattatatgagcctgattgtgcaaagcatggacacactagtttccagagcatactacattctggtgaatagccgtgaattacaaattatgcaaaggagcatcataggaagtttacacgcctaggatgccagtcaaaacacacataaacatatatatagacaaacatttgacagttacattacagaagaaatctatctgaagaaacatacaaacagcatggcactcgaaattttaaaaagacaatatttttcaccgacactctgactatagcatctttcagagatgacagcagcatcacacacaagacccttaatcgtccttgtactaatgtgattggttgatcaggcaagatgcaaagtagccttgatcttctcgagtaactgcatcagcttcaatcagcagacttgacacctgaaagatacacccgagattgtatgacactagtcccaatcaagaacccaggcatcaccattaggccaactttaggcctctctgcaccttcatctaggatgatgttcttgacaacactttccatgtgaatttcggagaagtcactccccttcttcacttgaaagaccttgacttttggatcaaaggagtatgccagcctgtgcagtaaccatatcgacttcgctaacttcagaaatgcttgatagaaaggtgtcctcggatggccaccgctcattacatagtttctctgatccatgttaccaaagaaagagccttccatttttgggtgcacaagtaataggtacttgcttctgcaaaacttcccaaaaaccgaatcaggattttggctcaagacatccaaaggatccatggctcgtactgcaaggaactgatggaagaaagcctcattggaaacagtaatgttagcagccttaacagaaaagctctcttcttggaaaccaccaaacattctttggcaaatatatgactcgaaagcatactttttgtgagccctccttgtgtaaaccacagcaggttcaattgcattagcagcagcatcaagatcccaccctgcagctttcatcatgttgatcaaaggctttgaaaaatcatgtatagattggtatgcattatcaacagcagatgtaaataaacttggtgtcaactcgatggaaaagtagttgtcttcatcatcagattcctcagattccttgttgagtaagcccctttgtttcagtttcttctcaagctttgatttccgaagtttagcctcatcgatttgctgctgtaaatgtgttatctcagtatctctagtctggatttgggactggaacttctttaccatgacctcatatgtcttcagcaagttctgttgctcttgtatttcagaaagcagccgtgcatcttgaggtgttgccgctacaggcttaggattcttttctctgtaagcatgcttgagctctgagagcttcgtgagctcctctatgacaagctgatctgcagcctggatcttgtctgggtcatatggggtgtgagcttcctgcaggcggggtaaccgcaggcccaggccacgcgggaaggaagggaggaggaggaggaggccactctctcggcggtggcggcggcgcgcgcggggaaggacgctccgagctcgcgcgcccgcagatcgggggggaagacggaggcgagtacggcgtgtggagtggagagggaggagaggggaaagaggaggaggtgtggctgcgagaaggtggaaggggcggagggggtggggccaccggcgcgagcgggggcgggggcgggggcggcggcggtggcggggggaggggagggggtcggggcggagttgaagggggtgaagggggcccacccgtcggcggcggcggcgggggggccgagcgggaagaaggcccaggtgcagaagtacatgtcggtgcccgggacgatgggcggcgcggcggggagctcggcggcggagaaggcgcggcggcaggcggcggtcgggcagcggaggcggcgcccggcgtagtggcgcgggtaggagtggacgtagcagcagtgcgggcacgccgtccagaacgccgcggcggaggcgtcgccggcggcggtggcggaggccatgggcggcgcggcgttcgagggtttttctccggtggaaacgatgaagcgggagagttgggggtttttggggg

SEQ ID NO: 35937 - DNA, 270 bp, Oryza sativa
  Clone ID: PAT_MRT4530_39810C.1
atgcatggcacggaggcgacgctcgcgcttgggcgtcgtgcgcgggtcgcgtgcgcatgggcatcggggagatcggcgaggtcaggcgtccgtgccgtagaggatggcgacaaggccgaccaccgtctgcagcttggcctgccgtcattgcggacgatgctggcgggagatgtggatgtggcctcctgcgatcggagggagatcgatcggtggcgaggcgtgatgctgttgatgaagatgatacggaagttgcatctcctccttagctaa

SEQ ID NO: 35938 - DNA, 303 bp, Oryza sativa
  Clone ID: PAT_MRT4530_39811C.1
atggctgagctcgatctcaagctcgccggcacaaacggcggctctaatgggggcgagctcagccggattcgcctcgaggcgacgggaacagctgcgcgaacccgcggctgcgcgttgacgacggtgtggccgcgctccagagctcccgtggcgaggtcggcgttcccagagatcggctgcaagaaacggggcaagatcagatcagaggctatggcgtgcaagggtgggtcccacgcgataaaatggtggaacacaagtgtgagcaagccaaaggcactgccatgtgggtccaggtcgtggtag

SEQ ID NO: 35939 - DNA, 889 bp, Oryza sativa
  Clone ID: PAT_MRT4530_39812C.1
cgcggacggagatcatagatcatccgtgctacctacgggtaggcttgcgcccagcgacgtggctgccgtcttctatggagaaggtgaactcggagcttgtgctgcagaactgctacatcatggagcagaaccagaggctgaagaaagcggcagagctgctacacaaggagaggcagaggcttctctccgagctcaaggcccagctcctctccaaccagcaccgccaacctcccgctaatggacatggacatggagacgacgacaagcccgccgccggtggagagcccatccaggcccagcccagtagactggattggcctgaagaagccatgggcgatgaagctaggaaagcagtggaaaatgccctggggtggaagaagacggggcttccaaaattgggtatgcgaattgaaagaaggcagcaaagactgcctccttcagccggtggtggaggatggtctggaggaggtggttggttcaggtggttcagcagtggaggtttctgggatgctgcaaaacaaactcttcttacgatcgtcggtattatcgccgcgtttttcctgattgcaaacttcaatgtgctggtagcagctattgtaaattcactgctggctgtgctgcggcaaattcggcgtgcactgtcattcgtagctcagtgtattcttcagggcgtacaatcctcggctccgaggcgatcatccccttctctagacactggcaatcaggccgctgtggttgtgaaagatagagttggaaagtcagcgaaagagagagttgtaaggaaatgggggaatggcgtataattgctgtgttgagcgctttgcgaccaccataacttgttctatgatcttgtttgagaagaaaaaacgataaaaagaaagatataatg

SEQ ID NO: 35940 - DNA, 1176 bp, Oryza sativa
  Clone ID: PAT_MRT4530_39813C.1
atgggcacgtggtgcgaaagatgtagacggcgcgatgagcaggactacaggaatttggatgattgccagaaacactttttgctgcttatgatgggtgattttcaacatgagattagaggagagcagatagtggagcagctaaccattccgaaagaatttgtgcagcgtttaaagggtgacatccctgaagaaatccaactggaaacacataacagaaacagttacactgttagagttgacaagtcccaagaaaaggttatctttgcagcaggatgggcacaattcgtcaaaacctttgatttacatatgggtgactccatgatgttcagattcaaaggaaattctcagtttgatgtcataatatttgatcaagttggccgcgagaaagtatgttctgttgctgtggatgattatctggatcctaatgtgcaagaagggcgcacagatgctactgaaacactgaacagttctcgtgctcattctcaggatgattatcttgatcctaatgtgcaagaagggcgcacaaatgctactgaaacgcttaacagttctcgtgctcattctcagcccatgccaatgcagacaccagctactgaaacactgaacagttctcgtgctcattctcaggacatgccaatgcagtcaccagctactgaaacactgaacagttctcgtgctcatcctcaacccatgccgatgcaattgcctactgaaaccgtgaaccattttcatgctcctcattatcccatgcagatgccaattgaaaacatggccctttctcgcactcaagctatgcccacgcaaatgcagtcaccaccaacatatagatggacacaggtgcaaagagataacttaagatattctttgccctctgaagatcagggttgcagagtaggtgttatacctgatcccatcattgggcgtaggaccaaactaaatccagttcaggagaaggtggtgaacttcaagatccaacatattcattctgaaatcccaatatttgtagctgtcattaaaaggagcaacgtgtctggagtgttatccactctaagtgtcgccaaacggtacgtggatgaataccttggaggcgagagattcatcagtctttcgcgacttgggggcaagtggggcatcaggcttttgctggtgggggtgggagtggcacaaggatggtag

SEQ ID NO: 35941 - DNA, 1185 bp, Oryza sativa
  Clone ID: PAT_MRT4530_39814C.1
gaaaggagaaaaaaattgaggaaaaaaaagatcacttggagccttgaaaagcagcaaccaaaattgatgcttggggagcatccattggagaggccccaaagcaagaatctttttcattgatcactgctgtttgttatataaaagatcgatcttttggttgttatttgccaagatggagaagggaggtgcttcggtttccatggatgcggcggcgagcatggacatgtgggactgggaggtcctgcctgaccagctgagctcatcctcccatggcggcggcggccatggccgcagagttcttggtgctcaagaaaccgaggaatcgaatcttgacgccgccgccgccgacatggccgtcgacgacgagtgcaaggacatcggcgtcgacgtggccgtgccggccgagaccaagacgagccaagaagagaccatggcggccaaggtaacagaggaggaggaggaggaggcgttccagggctccgatgccaaggtggtcgacggcgacgacgacggcggcggcgaggaggaggaggaggaggaggaggaggggaagaaggcgggggcggagtgcgtggtgttcagggtggggaagctgcgggtgaacgggatcggggcgctgtgctcgttcggcgtcgccgccgccgccaccgtctgcgtcttcctcgtcggcggcaggctgcagcaccaccaccggcagcagcagcagcacaagatccagcttcagctctatggcgatgacaagagaatgcagcaggttgtgcagcagacatcaaggctgaaccaggcaatgtcatctgtgatgggagggggtggctcaactagggcaaacatatcgtttggtggctactatgagggcttttgatcaaccaattaattattacaatgtgtatggtcaagtacaattaaagttgccattgtagcaagtagcaacttaatttgatatggcaccctactccctagtggccttcatatatgctgcaatcaccttagctatgtgtttactacgtgtacactagatgtaaataattgggttcttagaccttagcacatatagatgatgaggatggaattatagatttattaagatgatagttaaggaaaataacaattgtttgacttgtgcctgaagtcaaaataggttcattaatgatggagaagctactttactgaaaaaaaaaaaaaaaa

SEQ ID NO: 35942 - DNA, 444 bp, Oryza sativa
  Clone ID: PAT_MRT4530_39815C.1
atggactcggttcatggtggacgatgccttgtgtcctggggatggcaagcttcgcccttcgcctacgttggctctggcttcagcgctcccgccatccttatcgggcccgacctcaaggcccccctggagaggagcgtctccggcatgttcgtggcttccaccttccttgtgccatgggacgtgcccccgcatctccgagcaacacgcacagtagcctccgcccttgctgacaactccttggtgagggacatccgtggtgccctcacggtccctgtcatctctcaattcttgttggtctgggatgcagtttggtggtcgtctgctagggcctgcccgccagagcatctttgtaagggctttgactttggtcctcctggtatcctggaggaccgtctctggtctctagttagtgccgcttcgtttggggacctgttgggaggatag

SEQ ID NO: 35943 - DNA, 578 bp, Oryza sativa
  unsure (1)..(578): unsure at all n locations
  Clone ID: PAT_MRT4530_39816C.1
ccccgttggtgttggatctcggaatgtgcaatgcgcncttcgattgtgagtggggggatggtgctgctggtgagctcggggcngtgcaaataagagggaaacaatgggatagagctgccccctgtgtgggctagggctgtgtgggtgcacacaaggtgtgtgggatggatgtgtgctattgccgaagccttggtggatnattnctctgatgcacctgtgcctgctgtgccgcttgcctgcatggggaacatgaatggtggctggcatgactgatggttgctgggtggcctgatgctgacatggtggatgaaaggaccaagattgtgtggcccacaaggcatggccgatgctgaaagggagatggaactgagctgcaagagaggatgagcccatatctggaatgtgaggcttgctgctgatgattgaggcacttgtgctggtgcaagtgtgctggtgatgtgtaacctgtgctgttgtcccctggttgttgatggtgactntgcttgttgacctngtggttcttggtttgtggggaaataatattatgagaccttgattaaaaaaaaaaaaaaaaaaaa

SEQ ID NO: 35944 - DNA, 916 bp, Oryza sativa
  unsure (1)..(916): unsure at all n locations
  Clone ID: PAT_MRT4530_39817C.1
aatcctgtaacaggccagaggagaaaatggaagaatgaatgaaagaaatatctaaatcagctcggggtttggtgtagcatccaggtaatgatctggtacttttgctacttaactcattggattgtattagtatttggcacgtcccctttgctgacaaaaacagttgcctgtttagtttattagtatatggggcatctaagcttctgttactgccccataggcctttgttttgtttatctgagctaactaagataagcatgcatgccatataaatgattagcaacacagtactatatatagccaccacatatgtaacaaagcatatatatttcagtggggctcacaagtcagtaaataccanggggcatggcttaaaaaatgtcagatatagtgagcactaatcacatttgtttatgtttccatcaatccaaagaacacacatgtccatacagtggcatgatagttatggcatatgacttctaactcaatttaatcatgttagatactaaaattagttgcactgcagactctggcaatgtcctttatttgaagaaattatgaagttttggtaactatacatgctagcagaaaactagataaaatagctctgcattttacatggtgactttctttactttaaatacgacttgtaactatatgtccatacatttgtacaggaggaacaatcaactctgttactgttgaatggctggagcaaaccacgacaaaatcaaacaagtgatggctagaaaagctagtttcgacaacaatgttacaaactcattagtttcagaacttttagttttatcagacaacttgtatttcagcatttggaaatttaacatactcatattgtcatcattactttgggtatctgaaatatattatgtcttattcgcggaaaaaaaaaaaaaaa

SEQ ID NO: 35945 - DNA, 363 bp, Oryza sativa
  Clone ID: PAT_MRT4530_39818C.1
atggcctttaaagataagtatccttctttatatgctattgtcagaaggaagaattctttaattgctaccgtcatgagttctgttctacttaatgtaattttaggggaacatattggctccggttttggacacagttacaaaggtggaagctctgaagtcgtatcaggtaatcctaacgatgaattattgactgaaactgacaagatgggagaggaagggaacagcttgcaagttgcaagcgcgaaggcgactacgatcacctcacaccagccgagaggcgtttacatggagcagaagcagatgattgataaacacaagtggccaacaagtcacacagggaatcgcatcaagtatttcaactaa

SEQ ID NO: 35946 - DNA, 646 bp, Oryza sativa
  Clone ID: PAT_MRT4530_39819C.1
cctcgacttcccgcctccgccgccgccggtgaacgttccggcggcggctccggcgggggccgcgtcgccggagagcaagcagcaggcggcggcgggggccatcgtgccgctgcggcggccgagggggaggccgctggggtcgaagaacaagccgaagccgccggtgatcatcacgcgggacagccccgacgcgctccactcccacatcatcgaggtggcgccgggggccgacgtggcggcgtgcgtcgcggagtacgcgcggcggcgcgggcgcggggtgtgcctgatgggcgcgtcgggcgccgtcgcggacgtcgccgtgcgcggcgcggcggcgccgctcccgggaaggttcgagctcctctccgtaacgggcaccgtgctcccgccccccgcgccgcccggcgcgtccggcctctccgtgctgctctccgccggccagggccaggtcgtcggcggctgcgtcgtggggcccctcgtcgccgccggccccgtcaccctcttcgccgccaccttcgccaacgccgtctacgagcgcctcccgctccaggccgaggaggccggagagccgcacgcggaggcggagcagcaggcccagccggaagccgccgcggcatctagctagctcggagctggtttgtcaaca

SEQ ID NO: 35947 - DNA, 1407 bp, Oryza sativa
  Clone ID: PAT_MRT4530_3981C.1
cgatcctcctcaagccttgccgccaccgccgccacctccactatgacagagagagaccccttccgcgccgcgccgcgccgctcgccgaccggatcccatccatggcgtccccctccctcgccgccgccgcggcctccccgctgacgtccctcgaccttgccaccagccccgccaccgcctcccgccccgccgccgccgccgcgtccgcgctccgcaagcgcccggtcctcctgctcgaccagcgccaccacccgacgcaagaaggcgggacacacgtcgtcgtcgacgcggccgaggtggcagaccgcgctcagcgtcgccgccaagaacgcggtgctcctcgccgtgctgctctacgtcggcgacctcgcctggcgcgcggcgcgcccggccccgccgcggccggtcgaccaggccgcgatggccggttacgacgcccgcgtcgcggacgtcgaggcgtccctcgcccgcgccttccggatgctgcaggtgcagctcgaggccgtcgaccgcaagatcgacggcgaggtcggcgccgtccgcggggagctcgccgcgctgctggaggagaagaggctggagctcgagggccagctcaagcgcctcgacgccagggccgacgacctgagcgacgcgctcggcgcgctcaagcggatggagttcctcaggaaggacgagttcgacaagttctggaacgaggtgaaagagagcctgggttcgggccccggcaccgaggttgacctcgatcaagttcgtgcattggccagagagatcaccatgggggagattgagaagcacgcggctgatgggattggtagggtagactacgctgtggcatcggctggggggaaagtcgtccgccattcggatgcttatgatgctgggaaacgtggtggtttcttttcttcattgcttagtggagatactgctgctagcccaaaaaagatccttcagccaagctttggagagcccgggcagtgctttccactgcaggggagcagcgggtttgtggagatcaagctgcggaaggggattgtccctgatgcaattacacttgaacatgtttcaaaggatgtagcatatgatatgtcgactgcgccaaaggactgccgggtttctgggtggtatcaagaggcacataatgaggcgtattcaggtcatgctgcaagcgcaaagatgtatgtcttgactgaattcacatatgatctagacaagaagaatgtccagacattcgacattacagcaccagatgttggtatcatcaacatggtccgactggacttcacttcaaaccatggaagctccgcgctaacctgcatttaccgcatccgggtccatggtcatgagccggtaaaacaaccaaagatttcttgcaattctacctggaattcttgtccactttcaaat

SEQ ID NO: 35948 - DNA, 499 bp, Oryza sativa
  Clone ID: PAT_MRT4530_39820C.1
ttgttcaaagatacacgagctgcgacgcgagccacctatttgagccgtggacggtggattatgtcatcaaaggtattgacatcttaccactgcatggtgagcccgttttatcatgaatacgaggtggagaaggatcacattctagttgtgacagtgtgacaaagactacatcccgctaagtgaatggatgtgcctgcacggggatactgaagacagttaggaatcggttgctgaagcaagaggacattatgccactgtacacgagggagtcgtgatgatagattatcctaacttaaaatctcttttctgtgttttggatggcacactgatgtatgagtagtcggctagtttcagagaccaacgttgatgcctattagggttgtcaggtcacaagagatacaaactatcgttgtaaaagaagagttccgctctgctgatatcgatgttcttgttcaagtttattttgctgacataactgtaagcctttaagaatactctt

SEQ ID NO: 35949 - DNA, 326 bp, Oryza sativa
  Clone ID: PAT_MRT4530_39821C.1
gccgcgacggcgaggtgctccggtacggcgccgacgtggtgttcggcccaaaggtggacacgcaggcctcgtaggatgtcgggctgtcggcccacagaaaaactcatctgggtttctttgtgctttacttaatttgttgtgatgtggccttcaaaagttcaaatgattgatgtaccctgctttgatgtgtttttttttttggtcttctgttgtaatgcatttcctagttacaagttacaaccagtcataagttttatttatttattggtaataaaaaatgttgaactgaattcatttaaaaaaaaaaaaaaaaaaaaaaaaaaaaa

SEQ ID NO: 35950 - DNA, 984 bp, Oryza sativa
  Clone ID: PAT_MRT4530_39822C.1
atgcggatgctgccgatgtgcaggcagcagcaaagcgaaaagctgcatgactacacggtaagctcacacattaacagtgacttgttagggccaagcaactcggaaaatgaagcaagcgagcatatagaccaacaaagctatcaagctgttgaccatgcaaatccgatattgggcatggcccctactgcgcatcaccgtccattgaactcatcagcccaagtgacggcagcagtccaccatgagctggatcaaggagccagtgccacattggatcaaagcaacgatgacaacctcgcggttgtcacgtgccaacgacaaccagaacattgcgagacacagatgacgaaagaggtggcatgtccaaggccagcttgcatgtcaccgttttcaatgcccatacttcacgaatggccaaatgctaaattagctcggaggttgtaccgttggctggagttgaagtcacgtgatgaagatataaccggggtttggttcaagcacgacaagcctacaccaattgagataagtgccatgaagctcaaaatgcaggtcacccacggtggcaatctatgtatggacctttgttcggcatttatcagactctaccaacagttagatgccaagatgaatacaaacccatctggacagcgttggcgccacttcttcccaccccaatttgcgctcattgccccagttgaactagctggcggtacatggtcatgctacatttgggacatggagaagaggcaaatgcacattttggaccctgtcttgcagcagcgggagacttacaatgtgagtgctaagcataggaactctggtttttacacattatactactcgcgtgagttccatgatggcaagctgcagagaagtctagattcgggtagtattactgccttgcgcaaggatcttttgtaccagctcctgactatggaagggaactacgccgagctgccaagtcacattgcgagatacttggaatag

SEQ ID NO: 35951 - DNA, 6477 bp, Oryza sativa
  Clone ID: PAT_MRT4530_39823C.1
atggcgtcgaggcggctgctagctgctcggtggtggagggtgacgacgcagtggcggtttgtggaggcagtggctggtgtcggtggcagtggcgacggcggccatgactgtggaagcggtggtgatgtcggcgtcggggaaggagtcgggtgcgaggtgaggatggcgacgtggcggtcggtcacgcttagcggcggccggtccggtgctagtcttttcctgggcttgtgtgttggcgatgtcgccaccgccttccttgacgtctgttctgtcaccaccggcgtttcttcgatggcggcggcaatagagcgcgcagcagcagctgttgacaatggcgacgaagaatgcaatggcggcgctcagcaatggcggcggcagtgtaggacgttgctggggcagtgctcggcgatggcggtggcggaggagttggaggcagagatgcttttagcttcggcctccaactctaaatctcgcaccgcgccatgcgctcctctgctgtgcacgcttctgtcgccgctgccgcagccgccgccgccgccgccgccgcatggctcctttgccatggccaacaacgctccccataccccctctcccgcaattgaggccaccacatctgtcatcaccaaggcagttcgggatgccttccaaccctcatctagggttaatgtcgacctagccatagccgcctccgtcgtcgacacggcgtccaccactgttgcctgcgccactaggaaagcccttgcctctttcatcgagaagctgcgctacatcggcaacactccctctactgggtcttcctcctccggcagccggtgcaccaccaccacctcctcccggctacggtggtttcatccctctgatgaccggtgctgctccttctgcccctaccgcctagaacttctacaacgtcgacctcgacgacgacgccaccgccaatctccacgctcaggcagtctggtgctgaacatcaagtctctcgtgcccgtcaccctcgatctcaacttcggcaatggtgtggtctcatcctcgtcaccctcgagaattggaaatttcaggcgtcagaatgttgcgtcagaaatgcttgaagcagagatttttatgagagttctgtggctctacggcaccatctccatcgacttactggagtccgtgatgacgcacaacaccacggctcgcatcgtgtggcgtggcctcaaatatcagttcttgggcaaccgcgagtccagcgctctcatccactccaccgagttttacatcttctaccaagatgatttgagcatcaacgactactgctgcctcttgaagaccatggcagatgacttgggtgatgtgggcgaccgcactctttccctaactgcaatacaagatttgaatgaaaaattcggtcaccttctgctcaacttccgaagtacatgctcaacttctgctcgaagatctgacgaagggtcgtcctcgctaagcttctactgctctcctcgccggcactggagaccgaccttccacttccggggggggggggtgccgttaggaagcaagcccgcacactccactggctatggcaacgctggaaatcgtggcaacaacaccagtcgacatggaggtaacccgcaaccgtcgctgcaacaacaacaacagaggacaacagcagcaaccgccccagcactacaacacgcactcacggcagccccagtcctccagctcccggacttcgacaaggagttcatcgtggagtgcaacgcgtcgggctccggcctaggcgctgttcttcatcaaggcaccggcctggtggcattcttcagcaagctgactgcgtcgcgccacgccaagctcgctgcctacaaatgcgagttgattggcctcgtccaggcggtccgccattggcggccatacttatgggggcgccgcttcctcatccgcacggaccactacagcttgcgcttcctcttggatcagcgtctctccactgttccacagcatcagtgggcatgcaagctcctcgggtttgactttggcgtgcagtacaagtcgggaatggcgaactttgtggcggacacgctctccagacgggacgaacacctagcggaggtgttcgccttatcggcgccccaattctccctgttcgatgagctgtcccgcgaggtagcctccacacccacccagttccccattcacgaagacatcgccaagggtgccaaaccgccagcctgggcgttcacagacggcctcatcacattcaagggctgcgtcctcgtgccgctgtcgtccgcatcattgccgaccatcctcgagccggcgcatggcttgggacctgaaggaacacaaaatgatggaataagccttgtgttcgagggagcattcagccagctgctgcagcagcaccggctgctccttcccctttcccttccacttctccaagaagcagcccccggaggcgtgccatgtccgacgtacggtctcggcgttcggtcgcctcgagccctcggcgtcaacaggacgtcgagctcgccgcagcagaagagcgcaggcgagcaacggctcagaccgctgcagcagcagcgagggcggccatattggcggcagcggagttggcagcggccagggcagaggcggaagcagaggaggcagaagatgcggcacgtgcggcggagcccggagcacgcgcgcggcgacggtgctcccagtggaggtggctggttcgacggagagcgcggccctcgcaggcaacgcggctctccctcccctaaccggcgacatgaccaccacggtgtccagacggtggtcagggaccttggtcccggtggtgggtggcctaccctctacaaaaccaactacatcgagtgggcggcggtcatgagggtgaggctccaggtgcggtacatgtgggaggcagttcagtacggcaacagcgactacgacgaggatcaacgaccgctggatgccctcatcgccgcagtcctacccgagttgcagttctcgctttctcagaagcggactaccaaggaggcctgggacgctatcgctgcggcacgcatcggcagcgatcgcgcccgcaagtccacactgcaggcactccgcaaggagtgggagaacctggccttcaagccaggtgaggatgttgatgactttgccctccgtctcaacactcttttgcagaagatggtgcagtatggcgacgacacctacgacgaggagagagccgtcgagatgagccacagcctctctcaaggcctatcaccactggggggagctccatctcactcaagagcagtgggaggccagccagggagacgggaggaagggggagtcatctcccctgacaggcggccgcaagccgcgcaaggcgcggggaggtgtccagctacgccacgacgcggccaggcccacgtcgcacaggcggaggaggaagagccggttctgctcctagcacacgcaagcatcgagctacctccagcggcaccggccgcaatagctttcctccaccttgatgagccaaaggtactcctctccctctgcaacggctctagcgacgacaaggctgatgggtggtacctcgacaccggcgcaacccatcacatgaccggccgacaggagttcttcaccgaacttgactccagcgtccaaggctctgtcaagtttggggacgcctccgacgtggagatcaagggcgttggctccgtcaccttcactgccaagtccggtgagcacaggctgctcaccagaatctactacatccctgcgttgaggaactctgtcatcagcgtggggcagctggatgagaacggctcacgcgtgttggtcgagcacggagtcatgaggatttgggatcgccgtcgtcaccttcttgccaaggtaaccagaggcaccaatcgactctacatcctcagtgtgcaggtggcacaaccggtgtgcctcgccgctcgtcgggacgacgaggcgtggcagtggcacgagcgctacgggcacctccacttcgaggccctgaggtggctcagtgccaaggagatggtgcgaggcctgctgtgccttgaccatgtggagcagctctgcgacgtctgtgtggtaacgaagcagaggcggctcccctttccccagcagacgagcttccgagctaaggagcggctcgagctcgtgcacgaggacttgtgtggcccagtgacaccggccacaccaggaggacgacgttacttcctactgctcgtcgacgacctctcccgctacatgtgggtgatggtcctcggcagcaagggagaggctgcggacgccatcaggcgtgcgcaggctgctgcggaggcggagtgcggccgcaagttgcgcgtgctgcgcaccgacaacggcggtgaattcacggcgactgaattcgcgtcgtactacgctgatgagggcattcagcgccactacaccgcgccgtacagcccgcagcagaacggtgtcgtcgagcggcgcaaccagacggttgtggggatggcttgggctctcgtcaagcagagggggatgccggccatcttctggggagaggcggtggtgacggccgtctacatcctcaaccgctcgcctaccaaggccctcgacggcaggacaccgtacgaggcttggcatgggcgcaagtcggcggtctcccacctgtgggtcttcggctgcctcgcgttcgccaaggagcttggccacatcggcaagctcgacgataggagcacctcaggggtgttcatcagctacacggagggctcgaaggcctaccgcattctcgacccggagacacagcgtgtgcgcacggcgtgcgacgtagtgttcgacgaagggcgagggtgggcatgggacaaggcggtggacgatggttcgactccaacatacgaggacttcactgtcgagtacgtccactttgagggagctgggagagtaggcagctcttcttcaccgagcgtgtctaccccagtccccgagccaccaccgactcctacaccgacacaccctcgagccacgacttcgactacaacgagctcttcgctgacaccaccacagccggcgaccccatgcactccagcaccaacagccactcttccgggcacgtccactccgacgccagctcgcgttgagcacagcccagtggagtttgctactcctctctcccacaacgaggagcgcatcgacgcgtaccacgacggcgagctgctgcggtaccgtacgatgaaggacctcctcggcgaccagctagtgccgggactggtgcctcgcgacctggaggcgcagttgcaccttgcgtgcgacgacagtgagcctcggtctttcgtagaggccgagggacacgcggcatggcgtgccgcgatgcagtcggagatggacgcgcaggaggggatcgacatcgacgatgccttcgcccccgtggcacggatggaatccgtgcgactcctccttgcgctggctgctcaggaaggctggtgcatccatcacatggacgtcaagtcggcgcttctgaacgcagcggggtttcgcgatccccggcaaggagggcaaggtgctacgcctgcacaaggccctctacggcttgcggcaggcaccgagggcacgctcaaggggatgggcttcgagcaaagcccgcacgaggcgaccatctaccggcagggcaatagaggaaatgccttgctggtgggtgtctacgtcgacgacttggtgatcaccagcaccaaggatgcggaggtggcgacgttcaaggaagagatgaaggccaccttccagatgagtgatctggggcctctctccttctaccttgggatcgaggtgcaccaggacgactccgggatcacacttcgacagaccgcctacgccaagcggctctcactccgatggagactgaagctatgccgcgatagcacgacggaggaggtacatgctacgctgtaccggcgtcttgtggggagctgtcgctacctcacccacacacgaccggacttggcattctccgtcggctacgttagtcggttcatgcagcgaccgatgacggagcatcagcaggctgtgaagaggatcatccgctacgttgcggggactctcgaccacggtctctactacccgaggtgtcctggcaaggcacacttcgtcgggtacagcgacagcgaccacgccggcaacatcgacaccagcaggagcacgagtaggattctcttcttcctcggcgagtgcctcgttagctggcagtcggtcaagcaacagagacactggagcggtggagctcagggtggacaacaagtcgctctggccctggcaaagaaccccgtttttcacgaacggagcaagcacatccgggtgaggtaccacttcatccgaggctacttagaggaagggagcatcagggcgagctacatcaacaccaaagaccaccttgcggatttgctcaccaagccccatgggaggatcaagttctttaagctttgctccaggattgggatgacccaactttcccacgagacgacgcacaagacttag

SEQ ID NO: 35952 - DNA, 4650 bp, Oryza sativa
  Clone ID: PAT_MRT4530_39824C.1
tcagagccacactttcctgtaggctaaacatctcttgttccaccccttcccaagctcggttgagctctcagccaccaccagcagcagcaacaccggctgctcctccttcccctttcccttccccctctccacgcagcagccccccggaggtgcgccatgtccgacgttcggtctcggcgttcggtcgcctcgagcactcggcgtcagcaggacgccgagctcgccgcagcagaagagcgcaggcgagcaacggctcagaccgctgcagcagcagcgagggcggccagactggcggcagcagagttggcagcagccagggcggaggcagaagcagaggcggcggaagatgcggcacgtgcggcggaggtagaggttgagaccttgcgcagcagcatcaacggctccatcgccggcgacatcaccgctgacagggagcttgaggagctggcaagaggaagggcacgggagcgagcagagcggtgggcagcagcccacctccacggcggcggcggcggcccaagggaccgcgcgcccgccgacgggaacccagacgggcgcgggcgtgccggcggcagcccggagcccgcacgcggccctcgcaggcggcacggctccctctcccctgaccggcgccatggtcaccacggcgtccagacggtggtcagggattttggtcccggcggtgggtggcctaccctcaccaaaaccaactacatcgagtgggccgcggtgatgagggtgaggctccaggtgcggcacatgtgggaggcagtccggtacggtgacgtcgactacgacgaggatcggcgggcactggatgccctcatcgctgcagttccgcccgagatgcagttctcgctttcccagaaacggactgccaaggaggcctgggacgccatcgctgcggcacgcatcggcagcgaccgcgcccgcaagtccacactgcaggcactccgcaaggagtgggagaacctggccttcaagccaggtgaggatgttgatgactttgctctccgtctcaacactctcttgcagaagatggtgcagtacggcgacgacacctacgacgaggagagagctgtcgagaagttcttccgctgcgtccctgagaagtacagacagatcgctcgctcgatcgaatctctgctggacctctccacgatgtcgatcgaggaggcgttaggtcgcctcaaggtcgttgatggtgatgagccacagcctctctcggggcccatcaccatcggcgggaagctccatcttactcgggagcagtgggaggcctctcagggtgacgggaggaagggggagtcatcttccccgacaggcggcccggctttcctccaccttgatgaaccgaaggtactcgtctccctctgcgacggctccagcaacgacaaggctgatgggtggtacctcgacaccggcgccacccatcacatgaccggccgacgggagttcttcaccgagttcgactccagcgtccgaggctccgtcaagttcggggacgcctccggcgtggagatcaagggtgttggctccgtcaccttcaccgccaagtccggtgagcacaggctgctcaccggagtctactacatccccgcgttgaggaattctatcatcagcgtgggacagctggatgagaacggctcacgcgtgttggtcgaggacggactcatgaggatttgggatcgccgccgtcgccttcttgccaagcgcgcaggtcgcacaaccagtttgcctcgccgctcgtcgggacgacgaggcgtggcagtggcacgagcgcttcgggcacctccacttcgaggccctgaggcagctcagtgccaaggagatggtgcgaggcatgccgtgcctcgaccacatggagcagctctgcgacgtctgcgtggtgacgaagcagcggcggctcccctttccccagcagacgagcttccgagccaaggagcggctcagctcgtgcacggggacttgtgtggcccagtgacaccggccacaccaggaggacgacgttacttcctgctgctcgtcgacgacctctcccgctacatgtgggtgatggtcctcggcatcaagggagaggctgcggacgccatcaggcatgcgcaggctgctgcagaggcggagtgcggccgcaagctgcgcgtgctgcgcaccgacaacggcggcgaattcacggcggctgaattcgcgtcgtactgcgctgatgagggcattcagcgccactacaccgcgccgtacagcccacagcagaacggcgtcgccgagcggcgcaaccagacggttgtggggatggctcgggccctcctcaagcagagggggatgccggccatcttctggggggaggcggtggtgacggccgcctacatcctcaaccgctcgcctaccaaggccctcgatggcaggacaccgtacgaggcttggcatgggcgcaagccggcggtctcccacctgcgggtcttcggctgcctcgcgttcgccaaggagcttggccacatcggcaagctcgacgacaggagcaccccaggggtgttcatcggctacgcggagggctcgaaggcctaccgcatcctcgacccggagacacagcgtgtgcgcattgcgcgcgatgttgtgttcgacgaagggcgagggtgggtatgggacaaggcggtggatgatggttcgactccgacgtacgacgacttcaccatcgagtacgtccacttcaagggagctgggggagtaggcagctcttcttcaccgagcgtgtctaccccagtccccgagcctccaccgactccaacaccaacacaccctcgggccacgacttcgactacgacgagctcttcgtcgacaccaccccagccggtgtccccacacgctccagcatcaacagccactcctccgggcacgtctactccgacgccagctcgtgttgagcgcagcccggtggggttcgttactccgctctcccacgacggggagcgcatcgacgcgtaccatgacggcgagcagctacggtaccgtacgatggaggatcttctcggcgaccagccggtgccgggactggtgcctcgcaacctggaggcgcagttgcaccttgcgtgcgacgacggtgagcctcggtcttttgcagaggccgagaaacacgcggcatggcgtgccgcgatgcagtcggagatggacgcggttcaggagaaccgcacctgggagcttgctgacctccctcgtggtcaccgcgcgatcacccttaagtgggtgttcaagctgaagagggatgaagccggagccatcgtcaagcacaaggctcgcttggtggcacgcggtttcgtgcagcaggaggggatcgactacgacgatgccttcgctcccgtggcacggatggagtccgtgcgactccttcttgcgctggctgctcaggaaggctggggcgtccatcacatggacgtcaagtcggcgttcctaaacggcgacttgaaggaggaggtctacgtgcaccagccgccgggatttgtgattcccggcaaggagggcaaggtgctacgcctgcacaaggccctctacggcttgcggcaggcaccgagggcgtggaatgccaagttggattccacgctcaaggggatgggcttcgagcaaagcccgcacgaggcggccatctaccggcggggcaatggaggaaatgccttgctggtgggtgtctacgtcgacgacttagtgatcaccggcaccaaggatgcagaggtcgcggcgttcaaggaggagatgaaggccaccttccagatgagtgatctggggcctctctccttctacctggggatcgaagtgcaccaggacaactccgggatcacgcttcgacagaccgcctacgccaagcgcgtcgttgagctggctgggctcaccgattgcaacccagctctcactccgatggaggagagactgaagctgagccgcgacagcacggcggaggaagtggatgctacacagtaccggcgtcttgtggggagccttcgctacctcacccacacacggccggacttggccttctccgtcagctacgtcagtcggttcatgcagcgaccgacgacggagcaccagcaggctgtgaagaggatcatccgctacgttgcggggactctcgaccacggtctctactacccgaggtgtcctgacaaggcacacttcgtcgggtacagcgacagcgaccacgccggcgacattgacaccagcaagagcacgagcgggattctcttcttcctcggcgagtgcctcgttagctggcagtcaatcaagcagcaggtggtggccctgtcccgctgcgaggccgagtacatggcggcatccgccgcttcgacccaggcgctctggcttgctcgactgcttagtgatctccttggcagagatactggagcggtggagctcagggtggatagcaagtccgctctggccctggcaaagaaccccgtttttcacgaacggagcaagcacatccgggtgaggtaccatttcatccgaagctacctggaggaagggagcatcaaggcgagctacatcaacaccaaggaccagcttgcggatttgctcaccaaaccccttgggaggatcaagttccttgagctttgctcccggatcgggatggctcaactttcccacaagacggcgcacaagacttag

SEQ ID NO: 35953 - DNA, 432 bp, Oryza sativa
  Clone ID: PAT_MRT4530_39825C.1
gggaacccaatttttttaacatgccttcccactggtccaatacatattttttgaaacattccaaaattttttccttttggggacccttgcttttaacattttttttgtgcaatccattgtaaagcaaaacttggaaaaatttttttggttttccaaaggtttcggatttttttcctattcaaatatttgcaatttgtttaaacctcctttggtaccggcttaaaaatttttcttggggaaatggaatttaattgggggtggtcggctgaatttttttgaaaaaaccctgaattgttttcggagggggggggatccccaattaaaaacaccctggtttttttggatttggtaacaaccggttcctcgaaacttaaaattggtgccttgaccatattctcttaaaaaagagaggccccctttccggagtttttg

SEQ ID NO: 35954 - DNA, 4921 bp, Oryza sativa
  Clone ID: PAT_MRT4530_39826C.1
ctaagtcttgtgcgctgtcttgtgggagagttgagccatcccgatccgggagcaaagctcaaggaacttgatcctcctaaggggtttggtgagcaaatccgcaagctggtccttggtgttgatgtagctcgccttgatgctcccttcctccaagtagcttcggatgaaatgatacctcactcggatgtgcttgctccgttcgtgaaaaacggggttttttgccagggccagagcggacttgctatccaccctgagctccaccgctccagtatctctgccgaggagatcactaagcagtcgagcaagccagagcgcctgggtcgaagcggcggatgccgccatgtactcggcctcgcagctggacagggccaccacctgctgcttgattgactgccagctaacgaggcactcgccgaggaagaagagaatcccgctcgtgctcttgctggtgtcgatgtcgccggcgtggtcgctgtcgctgtacccgacgaagtgtgccttgccaggacacctcgggtagtagagaccgtggtcgagagtccccgcaacgtagcggatgatcctcttcacagcgtagccgacggagaaggccaagtccggccgtgtgtgggtgaggtagcgaaggctccccacaagacgtcggtactgtgtagcatccacctcctccgctgtgctgtcgcggctcagcttcagtctctcctccatcggagtgagagctgggttgcaatcggtgagcccagccagctcaacgacgcgcttggcgtaggcggtctgtcgaagcgtgatcccggagttgtcctggtgcacttcgatccccaggtagaaggagagaggccccagatcactcatctggaaggtggccttcatctcctccttgaacgccgcgacctctgcatccttggtgccggtgatcactaagtcgtcgacgtagacacccaccagcaaggcatttcctccattgccccgccggtagatggccgcctcgtgcgggctttgctcgaagcccatccccttgagcgtggaatccaacttggcattccacgccctcggtgcctgccgcaagccgtagagggccttgtgcaggcgtagcaccttgccctccttgccggggatcacaaatcccggcggctggtgcacgtagacctcctccttcaagtcgccgtttagaaacgccgacttgacgtccatgtgatggacgccccagccttcctgagcagccagcgcaaggagtcgcacggactccatccgtgccacgggagcgaaggcatcgtcgtagtcgatcccctcctgctgcacgaaaccgcgtgccaccaagcgagccttgtgcttgacgatggctccggcttcatccctcttcagcttgaacacccacttaagggtgatcgcgcggtgaccacgagggaggtcagcaagctcccaggtgcggttctcctgaaccgcgtccatctccgactgcatcgcggcacgccatgccgcgtgtttctcggcctctgcaaaagaccgaggctcaccgtcgtcgcacgcaaggtgcaactgcgcctccaggttgcgaggcaccagtcccggcaccggctggtcgccgagaagatcctccatcgtacggtaccgtagctgctcgccgtcatggtacgcgtcgatgcgctccccgtcgtgggagagcggagtaacgaactccaccgggctgcgctcaacacgagctggcgtcggagtagacgtgcccggaggagtggctgttggtgctggagcgtgtggggacaccggctggggtggtgtcgacgaagagctcgtcgtagtcgaagtcgtggcccgagggtgtgttggtgttggagtcggtggaggctcggggactggggtagacacgctcggtgaagaagagctgcctactcccccagctccctcgaagtggacgtactcgatggtgaagtcgtcgtacgtcggagtcgaaccatcatccaccgccttgtcccatacccaccctcgcccttcgtcgaacacaacatcgcgcgtaatgcgcacacgctgtgtctccgggtcgaggatgcggtaggccttcgagccctccgcgtagccgatgaacacccctggggtgctcctgtcgtcgagcttgccgatgtggccaagctccttggcgaacgcgaggcagccgaagacccgcaggtgggagaccgccggcttgcgcccatgccaagcctcgtacggtgtcctgccatcgagggccttggtaggcgagcggttgaggatgtaggcggccgtcaccaccgcctccccccagaagatggccggcatccccctctgcttgaggagggcccgagccatccccacaaccgtctggttgcgccgctcgacgacgccgttctgctgtgggctgtacggcgcggtgtagtggcgctgaatgccctcatcagcgcagtacgacgcgaattcagccgccgtgaattcgccgccgttgtcggtgcgcagcacgcgcagcttgcggccgcactccgcctctgctgcagcctgcgcatgcctgatggcgtccgcagcctctcccttgctgccgaggaccatcacccacatgtagcgggagaggtcgtcgacgagcagcaggaaataacgtcgtcctcctggtgtggccggtgtcactgggccacacaagtccccgtgcacgagcccgagccgctccttggctcggaagctcgtctgctggggaaaggggagccgccgctgctttgtcaccacgcagacgtcgcagagctgctccacgtggtcaaggcacggcatgcctcgcaccatctccttggcactgagctgcttcagggcctcaaagtggaggtgcccgaagcgctcgtgccactgccacgcctcgtcgtcccgacgagcggcgaggcaaactggatgtgcgacttgcgcgctgaggatgtagagtcgattagtgcctctggttaccttggcaagaaggcgacgacggcgatcccaaatcctcatgagtccgtcctcgaccaacacgcgtgagccgttctcatccagctgtcccacactgatgatagaattcctcaacgcggggatgtagtagactccggtgagcagcctgtgctcaccggacttggcggtgaaggtgacggagccaacacccttgatctccacgccggaggcgtccccgaacttgacggtgcctcggacgctggagtcgaactcggtgaagaactcccgtcggccggtcatgtgatgggtggcgccggtgtcgaggtaccacccatcagccttgtcgttgctggagccgtcgcagagggagacgagtaccttcggctcatcaaggtggaggaaagccgctgcggccggtgccgctggaggtagctcgatgcttgcgtgagctaggagcagagccggctcttcctcctccacccgtgcgacgtgggcctggccgcgtcgtggctgtcgacagtctttggcccaatggccaagcttgccacagttgcggcaggtgtcgtctcgtgccggcttgtggttgccggtggcaacgccctgggcgcctctgcgggcgccaccctcggcacgtcttcgcgcccaccgtagctggacacctccccgcgccttgcgcggcttacggccgcctgtcggggaagatgactcccccttcctcccgtcaccctgagaggcctcccactgctcccgagtgagatggagcttcccgccgatggtgatgggccccgagagaggccgtggctcatcaccatcgacgaccttgaggcgacctaacgcctcctcgatcgacatcgtggagaggtccagcagagattcaatcgagcgagcgatctgcctgtacttctcagggacgcagcggaagagcttctcgacagctctctcctcgtcgtaggtgtcgtcgccgtactgcaccattttttgcaagagagtgttgagacggagagcaaagtcatcaacatcctcacctggcttgaaggccaggttctcccactccttgcggagtgcctgcagtgtggacttgcgggcgcggtcgctgccgatgcgtgccgcagcgatggcgtcccaggcctccttggcagtccgcttctgggaaagcgagaactgcatctcgggcggaactgcagcgatgagggcatccagtgcccgccgatcctcgtcgtagtcgacgtcaccgtaccggactgcctcccacatgtgccgcacctggagcctcaccctcatcaccgcggcccactcgatgtagttggttttggtgagggtaggcccacccaccgccgggaccaaaatccctgaccaccgtctggacgccgtggtgaccatggcgccggtcaggggagagggagccgtgccgcctgcgagggccgcgtgcgggctccgggctgccgccggcacgcccgcgcccgtctgggttcccgtcggcgggcgcgcggtcccttgggccgccgccgccgccgtggaggtgggctgctgcccaccgctctgctcgctcccgtgcccttcctcttgccagctcctcaagctccctgtcagcggtgatgtcgccggcgatggagccgttgatgctgctgcgcaaggtctcaacctctacctccgccgcacgtgccgcatcttccgccgcctccgcctccgcctccgcctccgccctggctgctgccaactccgctgccgccagtctggccgccttcgctgctgctgcagcggtctgagccgttgctcgcctgcgctcttctgctgcggcgagcttggcgtcctgctgacgccgagtgctcgaggcgaccgaacgctgagaccgagcgtcggacatggcgcacctccggggggctgctgtgtggagagggggaagggaaaggggaaggaggagcaaccggtgctgctgctgctgctggctgagagctcaaccgagcttgggaaggggtggaacaagagatgtttagcctacaggaaagtgtggctctga

SEQ ID NO: 35955 - DNA, 1797 bp, Oryza sativa
  Clone ID: PAT_MRT4530_39827C.1
atgtctccccaccgaggagcagctgtggcttctatttgcgctgcgttttatgatagtatttggctattggtactactgctgagcacggcgctggctgcagagacactcgacggtgcgcaggcagcgtcgtcgcaatgccagaacgccaccaagtgcggtggtgtagacatcgtctacccgttcggcctcagttcaagcggctgcgctatgtcgccttcctttgaagtcgactgcaacaacaccgggaatggcgtccagaagccattccttggatatgtcgagctcctcagcatcgatgtccagcttagtcaggcccgcgtgaggactcgtatatcttcttcctgctataacatctcaacccgagagatgaacttcgatgacctgtggtatgtggacctgaaggacacgccgtacaggttctcggactccgccaacaagttcactattattgggtgccgaacactggcatacatcgccgatcaggatgacgtgggcaagtacatgagcggctgtgtctccgtctgccggcgaggtgaactaacgagcctgatcaatggcacctgttctgggaaaggctgttgtcagactgccatcccaaagggcctcgattactaccaggtgtggtttgagcaaagcatgaacacgtcggggatctataatcgaaccccctgcagctacgctgtgctcatggaagcgtccaacttctccttttcaaccacctacctgacttcaccgttcgagttcaacaatacctatggcggcgaggcaccggtggtgcttgattgggctatcaacaccgccaacacttgtgaggaagctatgggaaatctcacatcctatgcttgcaaaagcgacaatgcaaagtgtatcaactcctccgatacaacaggctacatctgtaggtgccaagaaggataccaaggcaatccttaccttaaaggtcccaacggttgtcaaggtgttgttgccagtgtattggctgtcctctttggattcctaggatgggaagtgattcgacacaaacaaaaaattaaacgacaggctctattaagacagactgatgagttttttcaacaacatggaggccagatattgctagaaatgatgaaagcagatggaaatgatgggttcaccctctacaagagaggggagatagagactgccacaaataatttcagcaaggcacatgtcattggggaaggagggcagggaacagtttataaggctgttatagatggagttgccgtcgcaataaagaagtgcaaggagattgacgagagcaggaagatggagtttgtgcaagagctggtcatactttgtcgtgttagccatcccaacattgtcaagttgcttggctgttgcctccaatttgaggcaccgatgcttgtgtatgagtttgtacagaacaaaacactgcaagagctgctagatcttcagaggagtaggcggttccatgtcacactgggaacccgcctaaggattgctgctgaatccgcagacgcactttcacatctccactctttgccacacccaatactccatggtgatgtgaagacagccaacatccttctcgcaaatggcttggttgcaaaggtgtctgattttggatgttcgacgattgataagagaactcaggctgtacccaaaggcacaccagggtatattgacccggactatctagttgagtaccaactcacaaccagaaatgatgtgtatagcttcggagtcattcttcttgagcttctaaccggtaggaggccactgtcaaaagaaagaaaaagcttgagtattctatag

SEQ ID NO: 35956 - DNA, 6374 bp, Oryza sativa
  Clone ID: PAT_MRT4530_39828C.1
actagtggatccccgggctgcaggatgcgcgtggtgttcatcgctagacgccatgcgaggcgagggttttagcactcgatctcctcctccgtggcagtagagggcggtgcttctccgcccaaaatcttcggtctccgccgccgtttcttgggtgctctccgccttccgtttgcgttgaaggatcaagaacgacgcctctttctttttcttggattttccttctctgaaacccccaatcttgaggtccttgatttctctaaggccagtccgtagtgccagctgaacattgatattgcttaagtaaggcaaccgtattgcccaatggacaacctgtcagagccactgctcgcagagatcatcaagaggattgccaagacaagtgatcgtaactctctttcccttgtgtcgaagcagctctacactatcgacgcggagcaaagggatgctatccatgttggctgtggtcttcacccggcaactgaagctttggcatcactatgctcccggttccctaatttgtggaaagtagtgattgattactctggttggatatctatccacgggaagcagttggacaaccaagggctccttgtgctttcgtctcactgctcttcactgaccgatctcacattaaacttctgctcctatatcgatgattctggtattggctatctggcttattgcaagaaactaaggtctttcaggctgaactttgcaccagcaataagttcaagagggcttctctcggtggcagttggttgcaagagtctttgtactttccaccttgttgattgcatgaaagtaggaagtgtggagtggctggagtaccttggcagggccggatcattggaagaacttgtggtaaaggattcagccccccggaggtgcgccatgtccgacgctcggtctcggcgttcggtcgcctcgagcactcggcgtcagcaggacgccgagctcgccgcagcagaagagcgcaggcgagcaacggctcagaccgctgcagcagcagcgagggcggccagactggcggcagcggagttggcagcagccagggcggaggcggaggcggaggcggcggaagatgcggcacgtgcggcggaggtagaggttgagaccttgcgcagcagcatcaacggctccatcgccggcgacatcaccgctgacagggagcttgaggagctggcaagaggaagggcacgggagcgagcagagcggtgggcagcagcccacctccacggcggcggcggcggcccaagggatcgtgcgcccgccgacgggaacccagacgggcgcgggcgtgccggcggcagcccggagcccgcacgcggccctcgcaggcggcacggctccctctcccctgaccggcgccatggtcaccacggcgtccagacggtggtcagggattttggtcccggcggtgggtggcctaccctcaccaaaaccaactacatcgagtgggccgcggtgatgagggtgaggctccaggtgcggcacatgtgggaggcagtccggtacggtgacgtcgactacgacgaggatcggcgggcactggatgccctcatcgctgcagttccgcccgagatgcagttctcgctttcccagaagcggactgccaaggaggcctgggacgccatcgctgcggcacgcatcggcagcgaccgcgcccgcaagtccacactgcaggcactccgcaaggagtgggagaacctggccttcaagccaggtgaggatgttgatgactttgctctccgtctcaacactctcttgcagaaaatggtgcagtacggcgacgacacctacgacgaggagagagctgtcgagaagctcttccgctgcgtccctgagaagtacaggcagatcgctcgctcgattgaatctctgctggacctctccacgatgtcgatcgaggaggcgttaggtcgcctcaaggtcgtcgatggtgatgagccacggcctctctcggggcccatcaccatcggcgggaagctccatctcactcgggagcagtgggaggcctctcagggtgacaggaggaagggggagtcatcttccccgacaggcggccataagccgcgcaaggcgcggggaggtgtccagctacggtgggcgcgaagacgtgccgagggtggcgcccgcagaggcgcccagggcgttgccaccggcaaccacaagccggcacgagacgacacctgccgcaactgtggcaagcttggccattgggccaaagactgtcgacagccacgacgcggccaggcccacgtcgcacgggtggaggaggaagagccggctctgctcctagctcacgcaagcatcgagctacctccagcggcaccggccgcagcggctttcctccaccttgatgagccgaaggtactcgtctccctctgtgacggctccagcaacgacaaggctgatgggtggtacctcgacaccggcgccacccatcacatgaccggccgacgggagttcttcaccgagttcgactccagcgtccgaggcaccgtcaagttcggggacgcctccggcgtggagatcaagggtgttggctccgtcaccttcaccgccaagtccggtgagcacaggctgctcaccggagtctactacatccccgcgttgaggaattctatcatcagcgtgggacagctggatgagaacggctcacgcgtgttggtcgaggacggactcatgaggatttgggatcgccgtcgtcgccttcttgccaaggtaaccagaggcactaatcgactctacatcctcagcgcgcaggtcgcacatccagtttgcctcgccgctcgtcgggacgacgaggcgtggcagtggcacgagcgcttcgggcacctccacttcgaggccctgaagcagctcagtgccaaggagatggtgcgaggcatgccgtgccttgaccacgtggagcagctctgcgacgtctgcgtggtgacaaagcagcggcggctcccctttccccagcagacgagcttccgagccaaggagcggctcgggctcgtgcacggggacttgtgtggcccagtgacaccggccacaccaggaggacgacgttatttcctgctgctcgtcgacgacctctcccgctacatgtgggtgatggtcctcggcagcaagggagaggctgcggacgccatcaggcatgcgcaggctgctgcagaggcggagtgcggccgcaagctgcgcgtgctgcgcaccgacaacggcggcgaattcacggcagctgaattcgcgtcgtactgcgctgatgagggcattcagcgccactacaccgcgccgtacagcccacagcagaacggcgtcgtcgagcggcgcaaccagacggttgtggggatggctcgggccctcctcaagcagagggggatgccggccatcttctggggggaggcggtggtgacggccgcctacatcctcaaccgctcgcctaccaaggccctcgatggcaggacaccgtacgaggcttggcatgggcgcaagccggcggtctcccacctgcgggtcttcggctgcctcgcgttcgccaaggagcttggccacatcggcaagctcgacgacaggagcaccccaggggtgttcatcggctacgcggagggctcgaaggcctaccgcatcctcgacccggagacacagcgtgtgcgcattacgcgcgatgttgtgttcgacgaagggcgagggtgggtatgggacaaggcggtggatgatggttcgactccgacgtacgacgacttcaccatcgagtacgtccacttcgagggagctgggggagtaggcagctcttcttcaccgagcgtgtctaccccagtccccgagcctccaccgactccaacaccaacacaccctcgggccacgacttcgactacgacgagctcttcgtcgacaccaccccagccggtgtccccacacgctccagcaccaacagccactcctccgggcacgtctactccgacgccagctcgtgttgagcgcagcccggtggagttcgttactccgctctcccacgacggggagcgcatcgacgcgtaccatgacggcgagcagctacggtaccgtacgatggaggatcttctcggcgaccagccggtgccgggactggtgcctcgcaacctggaggcgcagttgcaccttgcgtgcgacgacggtgagcctcggtcttttgcagaggccgagaaacacgcggcatggcgtgccgcgatgcagtcggagatggacgcggttcaggagaaccgcacctgggagcttgctgacctccctcgtggtcaccgcgcgatcacccttaagtgggtgttcaagctgaagagggatgaagccggagccatcgtcaagcacaaggctcgcttggtggcacgcggtttcgtgcagcaggaggggatcgactacgacgatgccttcgctcccgtggcacggatggagtccgtgcgactccttcttgcgctggctgctcaggaaggctggggcgtccatcacatggacgtcaagtcggcgtttctaaacggcgacttgaaggaggaggtctacgtgcaccagccgccgggatttgtgatccccggcaaggagggcaaggtgctacgcctgcacaaggccctctacggcttgcggcaggcaccgagggcgtggaatgccaagttggattccacgctcaaggggatgggcttcgagcaaagcccgcacgaggcggccatctaccggcggggcaatggaggaaatgccttgctggtgggtgtctacgtcgacgacttagtgatcaccggcaccaaggatgcagaggtcgcggcgttcaaggaggagatgaaggccaccttccagatgagtgatctggggcctctctccttctacctggggatcgaagtgcaccaggacaactccgggatcacgcttcgacagaccgcctacgccaagcgcgtcgttgagctggctgggctcaccgattgcaacccagctctcactccgatggaggagagactgaagctgagccgcgacagcacagcggaggaggtggatgctacacagtaccgacgtcttgtggggagccttcgctacctcacccacacacggccggacttggccttctccgtcggctacgtcagtcggttcatgcagcgaccgacgacggagcaccagcaggctgtgaagaggatcatccgctacgttgcggggactctcgaccacggtctctactacccgaggtgtcctggcaaggcacacttcgtcgggtacagcgacagcgaccacgccggcgacatcgacaccagcaagagcacgagcgggattctctttttcctcggcgagtgcctcgttagctggcagtcaatcaagcagcaggtggtggccctgtccagctgcgaggccgagtacatggcagcatccgccgcttcgacccaggcgctctggcttgctcgactgcttagtgatctcctcggcagagatactggagcggtggagctcagggtggatagcaagtccgctctggccctggcaaaaaaccccgtttttcacgaacggagcaagcacatccgagtgaggttgatgtcattacatacagtacactcatcgatggatattgcttggcaggtaagatggatgaagcaatgaagttactttctgacatggtctcagttgggttgaaacctgatactgttacttatagcactttgattaatggctactgtaaaattagtaggatggagaatgcattatctcttttcaggcagatggtgtgcaatggtgttagtcctaatattatcacgtataacatagttcttcaaggtttatttcagactggacaaactcgtgctgctaaagaaatctatgtcaggattatcaaaaggggaatacagcttgaaattagcacatgcaacatagtccttcaaggactttgcaaaaataatctcactggtgaggcacttcagatgtttcagaatctatgtttgatggatgtaaagcttgagactagaactttcaatataatgattggttccttgcttagaagtggcagaaaggatgaatcaaaggatttgtttgctgctctctcggcaaatggtttagcaccggatgttgtgacctataccttaatgattgaaaatctcatagaagatggcttgctcgaagagtctgataatctatttctttcaatggagaagaatggctgtgttcctaactcccgtatgcttaattgcatcgtcagaaagttacttcagaaaggggagataggcagggctggtgtttatctgtccaaaattgataaaaatgacttctcccttgaagcttccactgctgagttactgattttgctggtttcaagtgggaagtacaatcaacatatgaagggtctccctgagaagtaccactcctttgtgaaatccagggctgtttga

SEQ ID NO: 35957 - DNA, 2093 bp, Oryza sativa
  Clone ID: PAT_MRT4530_39829C.1
atggagagactgaaggttcagatagacaggcataagatgacaaaatattcaggccacctagaggcaataattttatggattaacaatggtacacccatggagtcagggacgctcaacaatgtacttgttggtgaactgaatgaaggtgtggcacaccatgtcgcgctgccctttggtggcggagtcagcgtgggggctggggcggacggatgcatcatacacttgagggaggcggtgtactgggggaagcagtcggagtcggcgatcctggcggcgctggggtacggcggggacgccgccgccggcgacgacagcgcggagggtagggagcgcagccactgcctacaccataccccactgcacgatggcagaactgcctaccacttccagcctgccaagttctggcagaatgggcctctgtaccacaacggtttgtaccatttcttctaccagtacaacccgcacggcccgctctgggacaccggcaagctctcctggggccactccgtctccggcgacctcgtgaactgggccttcctcggcacggcgatcgaccccaccgacccgttcgatgtcaacggatgctggtcgggctccgccaccgtcctcctcggcggccgccccgccttcctctacaccggcagggacgccggcggcgtgcaggtgcagaacgtgtccttcgccaagaacccgctcgaaccgctcctccgcgagtgggagaagcccagatgcaaaccgatcatcggcttccccgccgacgtcatcaacaacaacttccgcgacccgacgacagcgtggctcggccgggatggcctgtggaggatggtcgtcgccgccgaggtcgccggcgccggctccgcccgggtgtaccggagcgccgacttcctccgctgggagcggaacgccgcgccgatgcactcgtcggcggccgtccccgtcctggagtgcccggacttcttcccggtggcggagcacggcatcgacggcctcgacacgtcggcgaacggcggcggcaccggcgtgaagcacgtgctcaagctcagcgagttcgacacgcaccaggacttctacatggtggggcggtacgacaacgaggggacaccttccccccggaggaccctgaccgcggcgacaactgccgggagatggcgctgcctcgactacgcccaggccaaggccgacgacgtcgccaagggctgggccggcgtccaggcgttcccgaggaaggtgtggctggacggcgacgggaagcagctgctgcagtggcccgtcgacgagatcgagacgctaaggacgaagcgtgtcgggctgcagggcacggaggtgaaggccggcggcctgcacgcgcgtccgggcgtcgcgagctcccaggccgacgtcgaggtggtgttcgagatcccgaacctggaggacgaggccgagagcttcgatcccgactggctggatccccacaagctgtgcaaggacaagggcgccgcctccgcgcacggcggcgtcggcccgttcgggctcatcgtcatggcctccggcgacctgcaggagcaaaccgccgtcttcttcagagtgttcaaacaccatggaaagtacaaggtcttcatgtgcactgacctcacaaggtcatcgacaaaagcagatgtgtacaaggacgcttacggaggattcgttgatgtggacatacagaaggacaagagcatatcactcagaacactgattgaccactcgatgattgagagcttcggaggcggtggccgagcgtgcatcacaacccgggtataccctgagcacgcagcaacaagcagcagtcacctgtacgtgttcaacaatgggtcaggcacggtgaatgtgtccaagctcgaggcgtgggagatggccacggcgaccagctgaactctgcagatgcattggacgcaataacgcgtagctgaaacgtcttagtatgcatggcttggctaattcgatcaatggttactgtgctgtggccgatcgattttatcatttatcattcatcagtcacacgaccttcaaggccatagcctgcctgtctggaggtttattgccctcactcccaggataaaataaaggttgtatgttac

SEQ ID NO: 35958 - DNA, 1875 bp, Oryza sativa
  Clone ID: PAT_MRT4530_3982C.1
atgatcaagggagactcaaagcagctagcttctatgtacatgaaagaggagatgatcaagggagagaggcagcttggaacccatgaagatcggttaaaagacgaggttataaaagatggcgataaaatttcagatggcaattttttcaagtccttgcaaaacatatcaagcacaaaggaggaggtgtgttcaccaggcccaatagaaagatcatgtatggactcatcattgctaaacatgaaagctcaaaataagggtcaggatgataagcttgaatcaacaagggcagaaatgggtgaagtacgagaagagaacgagaggctcaagacgttgctgtcgcgcatctcacacgactatagatctcttcagacgcacttctatgacgttcttcagcaaggccgagctaagaagctcccagactctccggccaccgacatcgaggagcctgaactcgtctctctgagacttggaacgagcacgagcaaatgcaagaaggaagacaagagtaccaccagtagcgaagtcaaagggagtactgaagattttctgaagatcaaaggaggtctctctcttggattatcagactgcagagttgatgctaataacagtgagaaggtacagccggatgtgatgacgttgagccctgaaggcagctttgaggatgctagggatgacaccgcagagaccacagagcaatggccaccaagcaaaatgctgaagaatttgaggagcgtcggcgcggaagccgaggatgacatagctcctcagccacaggtcaagaaggctagggtttcagtgagagcgagatgtgatgcgccaacgatgaatgatggatgccagtggagaaagtatgggcagaagattgcgaaggggaacccgtgcccgcgcgcctactaccggtgcaccgtggcagcaggatgcccagtcaggaagcaggtgcagcgatgcgcggatgacatgtccatcctcatcaccacctacgagggcacgcacaaccacccgctctccgtctccgccaccgccatggcctccaccacctccgccgccgcctccatgctcatctccggctcctcctccacctctctcgccgcctaccccgccgccgccgcgtcgccggccctcgcattcgacgcctcctccaagccgcccctcatcggcggccgcccgttcttcctcccgaccgccgccgccgccgccatcacctccaccccttcctaccccaccatcaccctcgacctcacctcgccggccgccgccgccacctcctcccacgccgccttctccctcagtaacaggttctcgcacaccaggtacccttccaccggcttcaccttctccggctccggcccgagtagcgcgccatggccggggtacttgagctacggggcgtcgctatccgctcacccgtacaacgccggcggcggcaagagctcgtcgtcgttcgaggctgcgctgagcagcatcaacggaagcaggcagcagggcggcggcggcggtggcggctcggcgccgccgctctaccagatgcagcagaaggcggcggcggcggcgccgccgccgccgagcgtgatcaccgacacgatcgcgaaggcgatcacggcggacccgagcttccacacggcgctggcggccgccatcacgtcgtacgtcggcaagaagggctcgccgccggcgtcgggaggagaggacagcaaggtcgggctcaagtggggggagcacctcgggctcgggctgacccactcgtcgctgtcgacggcggcggcggcggcggcgagctcgagcagccagatgttcttgcagccatcgctggggttatcaggatcgacgacgagtgcgtcgacgtctcctgtggcgaacagagagcaagcacattaa

SEQ ID NO: 35959 - DNA, 5982 bp, Oryza sativa
  Clone ID: PAT_MRT4530_39830C.1
ttaccgcagtatctgcctaagaacattcctgcagtatctagagtaaaaggccacatcaccaaggcaaacatgtaaatcagagtaaaaggccttccagccccatcggatggcctggttttgagaaccccggataacaaaccttcctgtagtgcctgactcactccttggatgtaaatttttgtattttttaatagttgcaccaccactcccgatgaccaaaccaaccttctccataggaacggagatctcctcctcaaccatagaatccatctcttgtaggaattcctttacaagattttccgccttgcttatttgatgcggggtgccagatatcttataaagctgttgtataggaatttcgataaatgtgctccttattgacttcagaatttctgcatctactggcatagatagttcgctgcgcttgcgacttgggccagctgtatatttgtgtttttcatttgtgacagggtcagattccctctgggaaaacagatgcaaatggtttgatacaccaacaacagattcatgtcctctgacttgcctgatttcagattcatcaagtgacggatcaaaagcacctccatgtatagctagaagctcaatcaaagttttggagactccaaaaccttcaggaggcatactcaggaccctccttgtcggctttgttatttcccgcctgctctgattttccttcgttacagctgttgccttctcacctttaatcacctggattaacattggtcgctgtttctgaggtgttttcccatccatgcgaatcattttgcttggatctactatggtggacaatgctctcgccaataaaccttttcggataatgtcagttaaagcatccttcttctcttctgattcacccctctgttcaaagtcagaaccaatcaccattactgggtgattgcagatactcctcgcaacttgagaagctgccaaaggtgtgccaggctcatctcccaaaacattgctcatgataagattggtgtaaagatattcttgagcagcagagatcttcaaccacacagtcaattcatgtttagtaccaagtttagaggcgctattctttaacatctctttcgtccttctcaatacaaaagggctaacaagtttcttcagcctctcagatgcttctattgactcttttatcaattgcgcagatgcgcctctatatctagccctttcaattggcatgctgaagttttcatgaaattgtccggactctccaagtagattaggacaacagaagttcatcagcgcataaaattcagtagctatgctttttagtgcaatgcagtcggttcttctatcataacggaacactttgataaccagcacaccaacaatattaagttctttgcgccaggtttctatcaccgtgactgggcaaatgatcattgcgttgtgtatgacatctgcctggagcaaaccacgaagaaaagcagctactttcctgtagactaaacatctcttgttccaccccctcccaagctcggttgagctcttagccagcagcagcaacagcaccggttgctcctccttcccctttcccttccccctctccacgcagcagccccccggaggtgcgccatgtccgacgctcggtctcggcgttcggtcgcctcgagcactcggcgtcagcaggacgccgagctcgccgcagcagaagagcgcaggcgagcaacggctcagaccgctgcagcagcagcgagggcagccagactggcggcagcggagttggcagcagccagggcggaggcggaggcggaggcggcggaagatgcggcacgtgcggcggaggtagaggttgagaccttgcgcagcaacatcaacggctccatcgccggcgacatcaccgccgacagggagcttgaggagctggcaagaggaagggcacgggagcgagcagagcggtgagcagcagcccacgtccacggcggcggcggcggcccaagggaccgcgcgcccgccgacgggaacccagacgggcgcaggcgtgccggcggcagcccggagcccgcacgcggcccttgcaggcagcacggctctctctcccctgaccggcgccatggtcaccacggcgtccagacggtggtcagggactttggtcccggcggtgggtggcctaccctcaacaaaaccaactacatcgagtgggccgcggtgatgagggtgaggctccaggtgcggcacatgtgggaggcagtccgaagcggactgccaaggaggcctgggacgccatcgctgcggcacgcatcggcagcgaccgcgccagcaagtccacactgcaggcactccgcaaggagtaggagaacctggccttcaagccagaaaatggtgcagtacggcgacgacacctacgacgaggagagagctgtcgagaagctcttccgctgcgtccctgagaagtacaggcagatcgctcgctcgatcgaatctctgctggacctctccacgatgtcgatcgaggaggcgttaggtcgcctcaaggtcgtcgatggtgatgagctacagcctctctcagggcccatcaccatcggcgggaagctccatctcactcggaagcagtgggaggcctctcagggtgacgggaggaagggggagtcatcttccccgacaggcggccgtaagccgcgcaaggcgcggggaggtgtccagctacggtgggtgcgaagacgtgccgagggtggcgcctgcaaaggcgcccagggcgttgccaccggcaaccacaagccggcacgagacgacgcctgccgcaactgtggcaagcttggccattgggccaaagactgtcgacagccacgacgcggccaggcccacgtcgcacgggtggaggaggaagagccggctctgctcctggctcacgcaagcatcgagctacctccagcggcaccggccgcagcggctttcctccaccttgatgagccgaaggtactcgtctccctctgcaacggctccagcaacgacaaggctgatgggtggtacctcgacaccggagccacccatcacatgaccggccgacgggagttcttcaccgagttcaactccagcgtccgaggctccgtcaagttcggggacgcctccggcgtggagatcaagggtgttggctccgtcaccttcaccgccaagtccggtgagcacaggctgctcaccggagtctactacatccccgcgttgaggaattctatcatcagcgtgggacagctggatgagaacggctcacgcgtgttggtcgaggacggactcatgaggatttgggatcgccgtcgtcgccttcttgccaaggtcgcacaaccagtttgcctcgccgctcgtcgggacgacgaggcgtggcagtggcacgagcgcttcgggcacctccacttcgaggccctgaagcagctcagtgccaaggagatggtgcgaggcatgccgtgccttgaccacgtggagcagctctgcgacgtctgcgtggtgacgaagcagcggcggctcccctttccccagcagacgagcttccgagccaaggagcggctcgagctcgtgcacggggacttgtgtggcccaatgacaccggccacaccaggaggacgacgttacttcttgctgctcgtcgacgacctctcccgctacatgtgggtgatggtcctcggcagcaagggagaggctgcagacgccatcaggcatgcgcaggctgctgtagaggcggagtgcggccgcaagctgcgcgtgctgcgcaccaacaacggcggcgaattcacagcggctgaattcgcgtcgtactgcgctgatgagggcattcaacgccactacacgccgtacagcccgcagcagaacgacgtcgtcgagtggcgcaaccagacggttgtggggatggctcaggccctcctcaagcagagggggatgccggccatcttctggggggaggcggtggtgacggccgcctacatcctcaaccgctcacctaccaaggccctcgatggcaggacaccgtacgaggcttggcatgggcgcaagccggcggtctcccacctgcgggtcttcggctgcctcgcgttcgccaaggagcttggccacatcggcaagctcgacgacaggagcaccccaggggtgttcatcggctacgcggagggctcgaaggcctaccgcatcctcgacccggagacacagcgtgtgcgcactgcgcgcgacgttgtgttcgacgaagggcgagggtgggtatgggacaaggcggtggacgatggttcgactccgacgtacgatgacttcaccgtcgagtacgtccactttgagggagctgggggagtaggcagctcttcttcaccaagcgtgtctaccgcagcccccgaatctccaccgactctgacaccaacacacccttgggccacgacttcgactacgacgagctcttcgtcgacaacaccccagccagtgactccacatgctccagcaccaacagccactcctccaagcacgtctactccgacgccagctcgtgttgagcgcagcccggtggagttcgctactccgctctcccacgacggggagcgcatcgacgcgtaccacgacggcgagcaactacagtaccaggccgagaaacacgcggcatggcgtgccgcgatgcagtcggagatggacgcggttcaggagaaccgcacctgggagcttgctgacctccctcgtggtcaccgcgcgatcacccttaagtgggtgttcaagctgaagagggatgaagccggagccatcgtcaagcacaagactcacttggtggcacgcggtttcgtgcagcaggaggggatcgactacgacgatgccttcgctcccgtggcacggatggagtccgtgcgactccttgcgctggctgctcaggaaggctggggcgtccatcacatggacgtcaagttggcgtttctgaacggcgacttgaaggaggaggtctacgtgcaccagccgccgggatttgtgatccccggcaaggagggcaaggtactacgcctgcacaaggccctctacggcttgcggcaggcactgagggcgtggaatgccaagttggattctacactcaaggggatgggcttcgagcaaagcccgcacgaggcagctatctaccggcggggcaatggaggaaatgccttgctagtgggtgtctacgtcgacgacttggtgatcaccggcaccaaggatgcggaggtcgcggcgttcaaggaggagatgaaggccaccttccagatgagtgatctggggcctctctccttctacctggggatcaaagtgcaccaggacgactctgggatcacgcttcgacagaccgcctacgccaagcgcgtcgttgagctggctgggctcaccgattgcaacccaactctcactccgatggaggagagactgaagctgagccgcgacagcatggcggaggaggctgtgaagaggatcatccgctacgttgcggggactctcgaccacggtctctactacccgaggtgtcctggcaaggcacacttcattgggtacagcgacagcgaccacgccggcgacatcgacaccagcaagagcacgagcgggattctcttcttcctcggcaagtgcctcgttagctggcagtcggtcaagcagcaggtggtggccctatccagctgcgaggccgagtacatggcggcctccgccgcttcgacccaggcgctctggcttgctcgactgcttagtgatctcctcggcagagacactggaacggtggagctcagggtggatagcaagtccgctctggccctggcaaagaaccccgtttttcacgaacggagcaagcacatctgggtgaggtaccactttatccgaagctacttggaggaagggagcatcaaggcgagctacatcaacaccaaggaccaacttgcggacttgctcaccaagcctcttgggaggatcaagttcctcgagctctgctccaggatcgggatggcccaacttccccacaagacgacgcacaagacttag

SEQ ID NO: 35960 - DNA, 1668 bp, Oryza sativa
  Clone ID: PAT_MRT4530_39831C.1
atgtgccctgtgaacggaaagctgcagctgcacgatggcagaactgcctaccacttccagcctgccaagttctggcagaatgggcctctgtaccacaacggtttgtaccatttcttctaccagtacaacccgcacggcccgctctgggacaccggcaagctctcctggggccactccgtctccggcgacctcgtgaactgggccttcctcggcacggcgatcgaccccaccgacccgttcgatgtcaacggatgctggtcgggctccgccaccgtcctcctcggcggccgccccgccttcctctacaccggcagggacgccggcggcgtgcaggtgcagaacgtgtccttcgccaagaacccgctcgacccgctcctccgcgagtgggagaagcccagctgcaacccgatcatcgccttccccgccgacgtcatcaacaacaacttccgcgacccgacgacagcgtggctcggccgggatggcctgtggaggatggtcgtcgccgccgaggtcgccggcgccggctccgccctggtgtaccggagcgccgacttcctccgctgggagcggaacgccgcgccgatgcactcgtcggcggccgtccccgtcctggagtgcccggacttcttcccggtggcggagcacggcatcgacggcctcgacacgtcggcgaacggcggcggcaccggcgtgaagcacgtgctcaagctcagcgagttcgacacgcaccaggacttctacatggtggggcggtacgacgacgagggggacaccttctcgccggaggagcctgaccgcggcgacaactgccggagatggcgctgcctcgactacggccaggcgtacgccgccaagtcgttcttcgacgcgcgcaggaatcggcgtgtgcagtggctgtgggtcaacgagtacgacagcaaggccgacgacgtcgccaagggctgggccggcgtccaggcgttcccgaggaaggtgtggctggacggcgacgggaagcagctgctgcagtggcccgtcgacgagatcgagacgctaaggacgaagcgtgtcgggctgcagggcacggaggtgaaggccggcggcctgcacgagatcgtcggcgtcgcgagctcccaggccgacgtcgaggtggtgttcgagatcccgaacctggaggacgaggccgagagcttcgatcccgactggctggatccccacaagctgtgcaaggacaagggcgccgcctccgcgcacggcggcgtcggcccgttcgggctcatcgtcatggcctccggcgacctgcaggagcaaaccgccgtcttcttcagagtgttcaaacaccatggaaagtacaaggtcttcatgtgcactgacctcacaaggtcatcgacaaaagcagatgtgtacaaggacgcttacggaggattcgttgatgtggacatacagaaggacaagagcatatcactcagaacactgattgaccactcgatgattgagagcttcggaggcggtggccgagcgtgcatcacaacccgggtataccctgagcacgcagcaacaagcagcagtcacctgtacgtgttcaacaatgggtcaggcacggtgaatgtgtccaagctcgaggcgtgggagatggccacggcgaccgtgaactctgcagatgcattggacgcaataacgcgtagctga

SEQ ID NO: 35961 - DNA, 4056 bp, Oryza sativa
  Clone ID: PAT_MRT4530_39832C.1
atgagggtgaggctccaggtgcggcacatgtgggaggcagtccggtacggtgacgtcgactacgatgaggatcggcgggcactggatgccctcatcgctgcaatcccgcccgagatgcagttctcgctttcccaaaagcggactgccaaggaggcctgggacgccatcgctgcggcacgcatcggcagcgaccgcgcccgcaagtccacactgcaggcactccgcaaggagtgggagaacctggccttcaagccaggtgaggatgttgatgactttgctctccgtctcaacactctcttgcagaaaatggtgcagtacggcgacgacacctacgacgaggagagagctgtcgagaagctcttccgctgcgtccctgagaagtacaggcagatcgctcgctcgatcgaatctctgctggacctctccacgatgacgatcgaggaggcgttaggtcgcctcaaggtcgtcgatagtgatgagccacagcctctctcggggcccatcaccatcggcgggaagctccatctcactcgggagcagtgggaggcctctcaaggtgacggaaggaagggggagtcatcttccccgacaggcggctgtaagccgcgcaaggcgcggggaggtgtccagctacggtgggtgcgaagacgtgccgagggtggcgcccgcagaggcgcccagggcgttgccaccggcaaccacaagccggcacgagacgacgcctgccgcaactgtggcaagcttggccattgggccaaagactgtcgacagccacgacgtggccaggcccacgtcgcacgggtggaggaagagccggctctgctcctggctcacgcaagcatcgagctacctccagcggcaccggccgcaacggctttcctccaccttgatgagccgaaggtactcgtctccctctgcaacggctccagcaacgacaaggctgatgggtggtacctcgacaccggcgccacccatcacatgaccggccgacgggagttcttcatcgagttcgactccagcgtccgaggctccgtcaagttcggggacgcctccggcgtggagatcaagggtgttggctccgtcaccttcaccgccaagtccgcgtgggacagctggatgagaacggctcacgcgtgttggtcgaggacggacactaatcgactctacatcctcagcgcacaggtcgcacaaccagtttgcctcaccgctcgtcgggacgacgaggcgtggcagtggcatgagcgcttcgggcacctccacttcgaggccctgaagcagctcggtgccaaggagatggtgcgaggcatgccgtgccttgaccacatggagcagctctgcgacgtttgcgtggtgacgaagcagtggcggctcccctttccccagcagacgagcttccgagccaaggagcggctcgagctcgtgcacggggacttgtgtggcccagtgacaccggccacaccaggagggcgacgttacttcttactgctcgtcgacgacctctcccgctacatgtgggtgatggtcctcggcagcaagggagaggctgcggacgccatcaggcatgcgcaggctgctgcagaggcagagtgcggccgcaagctgcacgtgctgcgcaccgacaacagcggcgaattcacagcggctgaatttgcgtcgtactgcgctgatgagggcattcagcgccactacaccacgccgtacagcccgcagcagaacggcgtcgttgagcggcgcaaccagacggttgtggggatggctcgggccctcctcaagcagagggggatgccggccatcttctggggggaggcggtggtgacggccgcctacatcctcaaccgctcgcctaccaaggccctcgatggcaggacaccgtacgaggcttggcatgggcgcaagccggcggtctcccacctgcgggtcttcggctgcctcgcgttcgccaaggagcttggccacattggcaagctcgatgacaggagcaccccaggggtgttcatcggctacgcggagggctcgaaggcctaccgcatcctcgacccggagacacagcgtgcggtggacgatggttcgactccgacgtacgacgacttcaccgtcgagtacgtccacttcgagggagctgggggagtaggcagctcttcttcacctagcgtgtctaccccagcccccgaatctccaccgactccaacaccaacacaccctcgggccacgacttcgactacgacgagctcttcgtcgacaccaccccagccagtgactccacatgctccagcaccaacagccactcctccaagcacgtctactccgatgccagctcgtgttgagcgcagcccggtggagttcgctactccgctctcccacgacggggagcgcatcgacgcgtaccacgacggcgagcagctacggtaccgtacgatggaggatcttctcggcgaccagccggtgccgggactggtgcctcgcgacctagaggcgcagttgcaccttgcgtgcgacgacggtgagcctcggtcttttgtagaggccgagaaacacgcggcatggcgtgccgcgatgcagtcggagatggacgcggttcaggagaaccgcacctgggagcttgctgacctccctcatggtcaccgcgcgatcacccttaagtgggtgttcaagctgaagagggatgaagccgaagccatcgtcaagcacaaggctcgcttggtggcacgcggtttcgtgcagcaggaggggatcgactacgacgatgccttcgctcccgtggcacggatggagtccgtgcgactccttcttgcgctggctgctcaggaaggctggggcgtccatcacatagacgtcaagtcggcgtttctaaacggcgacttgaaggaggaggtctacgtgcaccagccgccgggatttgtgatccccggcaaggagggcaaggtgctacgcctgcacaaggccctctacggcttgcggcaggcaccgagggcgtggaatgccaagttggattccacgctcaaggggatgggcttcgagcaaagcccgcacgaggcggccatctaccggcggggcaatggaggaaatgccttgctggtgggtgtctacgtcgacgacttggtgatcactggcaccaaggatgcggaggtcgcggcgttcaaggaggagatgaaggccaccttccagatgagtgatctggggcctctctccttctacctggggatcgaagtgcaccaggacaactccgggatcatgcttcaacagaccgcctacgccaagcgcgtcgttgagctggctgggctcaccgattgcaacccagctctcactccgatggaggagagactgaagctgagccgcgacagcacggcggaggaggtggatgctacacagtaccgacgtcttgtggggagccttcgctacctcacccacacacggccggacttggccttctccgtcggctacgtcagtcggttcatgcagcgaccgacgacggagcaccagcaggctgtgaagaggatcatccgctacgttgcggggactctcgaccacggtctctactacccgaggtgtcctggcaaggcacactttgtcgggtacagcgacagcgaccacgccggcgacatcgacaccagcaagagcacgagcgggattctcttcttcctcggcaagtgcctcgttagttggcagtcggtcaagcagcaggtggtggccctgtccagctgcgaggccgagtacatggcggcctccgccgcttcgacccaggcgctctggcttgctcgactgcttagtgatctcctcggcagagacactggaacggtggagctcagggtggatagcaagtccgctctggccctggcaatgaaccccgtttttcacgaacggagcaagcacatccgagtgaggtaccacttcatccgaagctacttggaggaagggagcatcaaggcgagctacatcaacaccaaggaccagcttgcggacttgctcaccaagcctcttgggaggatcaagttcctcgagctctgctccaggatcgggatggcccaacttccccacaagacgacgcacaagacttag

SEQ ID NO: 35962 - DNA, 360 bp, Oryza sativa
  Clone ID: PAT_MRT4530_39833C.1
atggtaccgcagtcaggcgtagggacgaaggcggtggactacgaggtggagcagcgggatggtggtcgcgtggtgaagaggaaggaggccggcctcacgagagggagccatggaggagtgccggtcgcaacatcaagtgttgggcgagacatgcttgcagtttcagacatccaagcagagacaccatatgctcagctcaatgcggcgagcgttccaggggaagctggcagacagggcagatggggaagtctcccaaccgcgagaactttatgtcgcccatgcttgttggcagctgatctctctgatgagcttgctctcacacccatccatcagctgcgccgtctcacatcatgcacatga

SEQ ID NO: 35963 - DNA, 7002 bp, Oryza sativa
  Clone ID: PAT_MRT4530_39834C.1
atgggcaacggagttttcaagaaaactgaagttcttgctgctgttaaacataagaaatctggaatatctggatctacgaattcttacaatgctgtagtgcgtgagaatgcacaacttcgccatgaagtgactgaacagcgtggaatgatacgtgaacagcgtggaatgatacaagaacatcgtggaatgctaaaggcagtatatgagaagcttggaatggacatacctgaggaggtactttcaaggtgggagtcacaaagagaggattctgaattagatgtggactgttctgaggggtctgaagagtatgaaatagaggaagaagatgaggggcagtcaccaaaattccgttctcttgtagtggatgggccgccgccctccggccgacacaacctcgccaccctcgtcggcggcgccggcgccggcgccgcctccgccgggaaggaatgcaacagcaatgcagcatcacggggacagtaccagaatttccatgaaattccaccggatgatgctgattttaataaccttacaatttacttgaagtcagcatcaccgcctgcagctgaactaccatctctgactgatcatgtcaacgaggaggtggccaagctggacagaactgtgcgccgaatcaccgcggtgttggttgatgcagatgaaagggaaatcgctgacgagactatgaagctttggatctctgagctcaagcaagtgacatgggaagctgaggggatacttgaagattacagctatgagttgctccgcagcaccaccgtccaggaagagaaggaaggattgtgtaggaaagaatctaggattagtaggtgcaccagttctttgcttgatccattggaggtctacggccgggaggatgagaaaaaattaataatatcttctttgcttgatgggtgccttacatttaagaagagaagattgaaggaacatgaatatgaaacttgtaaagctggtgctgtaaggcttatttctatagttgccatgggtggaatggggaagacaacactagctaggctcgtctataatgacgcaagggttcaaaatcactttgatatacaagcatgggtttgggtttcagaagtattcgatgaagtcagactaaccaaagcagcaatcgagtcggtcaccgctaaaccctgtgatctgactgagctagagccactccagaggcaattgcacgaggaggtcaaggggagccacatgatcatcactactcgcaacgagaatgtctccacaattgtgcaggcgaagaagttggctggttcacgggagaagtttgtcatagtgcacgacctcattcatgaccttgctaaatcaattgggggtaaagagatccttgtcaaaaagtgttgtggttcatctgttggtggttgcaatactagtgccaataatcatcttcgatatttagctgttcttgttggaacaacgcccttctactcagacaataaattggtgcttgttcagagccagtggtggtataaccttgaaggttgtctgctgcattcaccacacctgaagtatctacgaatcctggatgtatcatcaagtgatcagatcaagctggtggccaattcagggagcggagctgccacgctggatgaaatcaaggacattaacactcttcaagggcagctctgcatcatggatctccagaacatcacacatgacagaatttgggaaccaaggagtgcaaacctgagcaagaaaaaattaactcgcttagaactagtgtggaatcctctgccttcctacaaaagcgtaccccatgatgaggttgtactggaatccctgcagcctcacaactacatccgacaactcgtaataagtggttttagaggattgaacttctgttcatggctaggagaccggtccttgtttagtttacaagaactggagctgtgcaagtgctactacactgatcatctaccaccacttggacaattgccaaacctgaagcagctcaagctgacgagcctgtggaaattgagaagcatagggcctgagttctacggcgattgcgaggccccatttcagtgtcttgagacattggtggtacagaacctggttgcatgggaggaatggtggctacctgaaaaccatccacattgtgtcttccctctccttcgtacgatcgacatcaggggctcacacaagcttgtgcgccttccactgtcaaatctccatgcccttgcagggatcaccgtatcatcgtgcagcaagttagagaccatagttgggctcaaggagcgctgtgaagtgactgctgggaacggtggattgcaagcaggtcagactaacgtgcttccctcccttcgaagggtaaagatcactgcttgcccttcactggaggagcctctgatatcgatgcttcgccggcagacggagatcggcttctcctactgggaacaaagccccagcacctctcccaccgacatcgctgattttggcaagactccatggaaagattctggcaaggacgccgagctcgccgcagcagaagagcgcaggcgagcaacggctcagaccgctgcagcagcagcgagggcggccagactggcggcagcagagttggcagcagccagggcggaggcagaagcagaggcggcggaagatgcggcacgtgcggcggaggtagaggttgagaccttgcgcagcagcatcaacggctccatcgccggcgacatcaccgctgacagggagcttgaggagctggcaagaggaagggcacgggagcgagcagagcggtgggcagcagcccacctccacggcggcggcggcggcccaagggaccgcgcgcccgccgacgggaacccagacgggcgcgggcgtgccggcggcagcccggagcccgcacgcggccctcgcaggcggcacggctccctctcccctgaccggcgccatggtcaccacggcgtccagacggtggtcagggattttggtcccggcggtgggtggcctaccctcaccaaaaccaactacatcgagtgggccgcggtgatgagggtgaggctccaggtgcggcacatgtgggaggcagtccggtacggtgacgtcgactacgacgaggatcggcgggcactggatgccctcatcgctgcagttccgcccgagatgcagttctcgctttcccagaaacggactgccaaggaggcctgggacgccatcgctgcggcacgcatcggcagcgaccgcgcccgcaagtccacactgcaggcactccgcaaggagtgggagaacctggccttcaagccaggtgaggatgttgatgactttgctctccgtctcaacactctcttgcaaaaaatggtgcagtacggcgacgacacctacgacgaggagagagctgtcgagaagctcttccgctgcgtccctgagaagtacaggcagatcgctcgctcgattgaatctctgctggacctctccacgatgtcgatcgaggaggcgttaggtcgcctcaaggtcgtcgatggtgatgagccacggcctctctcggggcccatcaccatcggcgggaagctccatctcactcgggagcagtgggaggcctctcagggtgacgggaggaagggggagtcatcttccccgacaggcggccgtaagccgcgcaaggcgcggggaggtgtccagctacggtgggcgcgaagacgtgccgagggtggcgcccgcagaggcgcccagggcgttgccaccggcaaccacaagccggcacgagacgacacctgccgcaactgtggcaagcttggccattgggccaaagactgtcgacagccacgacgcggccaggcccacgtcgcacgggtggaggaggaagagccggctctgctcctagctcacgcaagcatcgagctacctccagcggcaccggccgcagcggctttcctccaccttgatgagccgaaggtactcgtctccctctgcgacggctccagcaacgacaaggctgatgggtggtacctcgacaccggcgccacccatcacatgaccggccgacgggagttcttcaccgagttcgactccagcgtccgaggcaccgtcaagttcggggacgcctccggcgtggagatcaagggtgttggctccgtcaccttcaccgccaagtccggtgagcacaggctgctcaccggagtctactacatccccgcgttgaggaattctatcatcagcgtgggacagctggatgagaacggctcacgcgtgttggtcgaggacggactcatgaggatttgggatcgccgtcgtcgccttcttgccaagtggcacgagcgcttcgggcacctccactttgaggccctgaagcagctcagtgccaaggagatggtgcgaggcatgccgtgccttgaccacgtggagcagctctgcgacgtctgcgtggtgacaaagcagcggcggctcccctttccccagcagacgagcttccgagccaaggagcggctcgggctcgtgcacggggacttgtgtggcccagtgacaccggccacaccaggaggacgacgttatttcctgctgctcgtcgacgacctctcccgctacatgtgggtgatggtcctcggcagcaagggagaggctgcggacgccatcaggcatgcgcaggctgcagcagaggcggagtgcggccgcaagctgcgcgtgctgcgcaccgacaacggcggcgaattcacggcggctgaattcgcgtcgtactgcgctgatgagggcattcagcgccactacaccgcgccgtacagcccacagcagaacggcgtcgtcgagcggcgcaaccagacggttgtggggatggctcgggccctcctcaagcagagggggatgccggccatcttctggggggaggcggtggtgacggccgcctacatcctcaaccgctcgcctaccaaggccctcgatggcaggacaccgtacgaggcttggcatgggcgcaagccggcggtctcccacctgcgggtcttcggctgcctcgcgttcgccaaggagcttggccacatcggcaagctcgacgacaggagcaccccaggggtgttcatcggctacgcggagggctcgaaggcctaccgcatcctcgacccggagacacagcgtgtgcgcattacgcgcgatgttgtgttcgacgaagggcgagggtgggtatgggacaaggcggtggatgatggttcgactccgacgtacgacgacttcaccatcgatccccgagcctccaccgactccaacaccaacacaccctcgggccacgacttcgactacgacgagctcgtcgtcgacaccaccccagccgtggagttcgttactccgctctcccacgacggggagcgcatcgacgcgtaccatgacggcgagcagctacggtaccgtacgatggaggatcttctcggcgaccagccggtgccgggactggtgcctcgcaacctggaggcgcagttgcaccttgcgtgcgacgacggtgagcctcggtcttttgcagaggccgagaaacacgcggcatggcgtgccgcgatgcagtcggagatggacgcggttcaggagaaccgcacctgggagcttgctgacctccctcgtggtcaccgcgcgatcacccttaagtgggtgttcaagctgaagagggatgaagccggagccatcgtcaagcacaaggctcgcttggtggcacgcggtttcgtgcagcaggaggggatcgactacgacaatgccttcgctcccgtggcacggatggagtccgtgcgactccttcttgcgctggctgctcaggaaggctggggcgtccatcacatggacgtcaagtcggcgtttctaaacggcgacttgaaggaggaggtctacgtgcaccagccgccgggatttgtgatccccggcaaggagggcaaggtgctacgcctgcacaaggccctctacggcttgcggcaggcaccgagggcgtggaatgccaagttggattccacgctcaaggggatgggcttcgagcaaagcccgcacgaggcggccatctaccggcggggcaatggaggaaatgccttgctggtgggtgtctacgtcgacgacttagtgatcaccggcaccaaggatgcagaggtcgcggcgttcaaggaggagatgaaggccaccttccagatgagtgatctggggcctctctccttctacctggggatcgaagtgcaccaggacaactccgggatcacgcttcgacagaccgcctacgccaagcgcgtcgttgagctggctgggctcaccgattgcaacccagctctcactccgatggaggagagactgaagctgagccgcgacagcacagcggaggaggtggatgctacacagtaccgacgtcttgtggggagccttcgctacctcacccacacacggccggacttggccttctccgtcggctacgtcagtcggttcatgcagcgaccgacgacggagcaccagcaggctgtgaagaggatcatccgctacgttgcggggactctcgaccacggtctctactacccgaggtgtcctggcaaggcacacttcgtcgggtacagcgacagcgaccacgccggcgacatcgacaccagcaagagcacgagcgggattctcttcttcctcggcgagtgcctcgttagctggcagtcaatcaagcagcaggtggtggccctgtccagctgcgaggccgagtacatggcggcatccgccgcttcgacccaggcgctctggcttgctcgactgcttagtgatctcctcggcagagatactggagcggtggagctcagggtggatagcaagtccgctctggccctggcaaaaaaccccgtttttcacgaacggagcaagcacatccgagtgaggtaccatttcatccgaagctacttggaggaagggagcatcaaggcgagctacatcaacaccaaggaccagcttgcggatttgctcaccaaaccccttgggaggatcaagttccttgagctttgctcccggatcgggatggctcaactctcccacaagacggcgcacaagacttag

SEQ ID NO: 35964 - DNA, 2566 bp, Oryza sativa
  Clone ID: PAT_MRT4530_39835C.1
tcaccggaggggcggcaatggccggcggagaaaaacgagggaggcggcgaagaccggcgatgccgaggtgcggacgagcgacggcgacaccgggatcggcgggaggtgggggaaggacccgacaggtggggcctcgggggaaaggagagaggaggagacggttggggggagacgatgacaggtggggcctcgggtccaccggtgcaccacgcgcatcaccccctcatagttccacatcagcccccgcagcacgccgtcgagccaccgcagctgcgcctcacagacggcaccgttgaacatcacgaaccgcctggccacgccggcaaggccgctcgggttgttcttgtccgtgttcgggttcctcttgtccaagaatctccccgctgccgcggccatcgggtggtcgcgcgaccatcccacggcgttgaagtcgtacgcgtcgaggaagcggtcaaactcggcgacgacggcctggacggccagcagcgacggcgccaccgccgccgtcattggatgcttgtggttgtgggcattccaggagcggacggctctctggaggacggtgaggctgtggcggtagtagcgggggacgccgaggaaggagcggccgtcggggatgtcagtgtgctgggcgtcggcgttcggcggctgaaccagcatcggtcgtcgttgccgaatgattgccaatcggccgacgaccaccacaagtttgtcttcctctccggcgagcggtgaccactggccagtgaccaagagaggggaggaggaagaggagtatccgccgcgtccaccgctcgtgtcgaggtggacgatgtcgccgaagcgtctccaagtcggcgcgctctgcccctttttttggagcattagtctcgctttttttttttttttttttcagtattccagcaagactttcattaaataagcatctcttgtccgttacaatgtgccttgctcccagtatagacacatatgtacttatgtagtttcgagtctcatgtccgttgaatatatagatatataatatatgacaatatacagaaccaaaaaaaaaagggaaaaagacgaactccggaagctggacgagcaaaatccagtagcttctgcatgtataaacctccttgcctgagaattatttaccgagggaatggatccgagtctcccagtgccgcgaactgccgatgagaactatcgagcctgacattcaaaaaccttccttttctttcccgtttcagagaacagaagaacgcaaaaattgcaagtgaatcgagcttgcctgtaacctatgaatgctttattgagatggcagagaaacaccaccctcgccgagccttctctacagaggccacagctttttattcacattggaggggcctatcataactgtgtcaagtgattgaaaaattgtgctgagatctctcagctcagaaaaatcagcgaccaccgccaggactcgagctaccaccagatgttgtgttagtctgagcacgcatcatggtgtctgctgggaaaacccctttcggcaatattgatccaacaggctcggatgctgccacgggcgatgttacttggtggacgtctttgaaattctggccttaaatccgggaagtggaagccaagggattggccatacggcctgatttaggtgcactcaactctcgggggtgatgatatttacatgtaccgccaaatttgcaacctcctgttcccatataatattgacaatcaggctgcctggccgctcagggaatccatgttcttgttgattgttgctatatggaacgtaaggaccaccataagcaattgtagaggaagatccatggtgccccatgccgtacacaggtccagcttgaacattttgttgagctccacctgacactacagggtttaccgaagccggataagggctccatccttgcaatgggatcattccagatgagagcatcattggggtgtatgagcctggtatatatgatccaggaactacagtggtctccccatttatgtagttccaaatttacattgcccagttttcatgtagtaggagcactccttctcaccctccaccgcgaacccaaactctaatgctgctacccgatgagtgctaccgatgcgccggacaagatctaggcagtggcatgcccaattttcaagctcagtgccgccgcgatcgcgcgggtggttgtagcggcagcggtcaccgaagccgcacgcgccggtgcggaggtagtagacacagtcctcctccccgggccgctccggcagcctccccgccgcgtccccatcccctcctcctccacctccacctcccccgcctcctcctcccagccccatcctccacatcggcccttccaggccggtgtcggggctagccccgccctccccctcccctccaccagctgcggcggcggcggcgtgcggctgctccatgccttcgtcggcgtcagcggcggcgatcggggcggggagcgatcggagtgggaggaggggcggcgcgggggtgggggttgagagagagggagagggaggcgggtgggtgcctcgtgccgaattccttgcagcccggggg

SEQ ID NO: 35965 - DNA, 3875 bp, Oryza sativa
  Clone ID: PAT_MRT4530_39836C.1
aacagaatcttgtcctcgagattcggaagaactggtgaagagatggggatgggtggctttcaactcatcttctctttcccaagttgcttcatcttacgaatgatggctccactatagtctgcaaaacctgatcactttatttctggttctcctctcactggtctccaaaatacatgtaggcttctccacataagtcaaatcctcctgaatctcaacattatctggacttgctggttcctcaagcacacttaggcatttcttcaactgagatacctggaatacatcgtgaatgctggccatgttaggtggaatttcaaactgatatgccacttcacctctacgttcaagaattcggtatgacccgatgtaacgttgcaccattttcccttggtctgaaaacggtgcactcctctgagcgacataactgtaaggtacacttgatcaacaacctcgaaactgagctctctccgatgattatcggcattgcttttctgacgggattgggcaatcgtcaatctctccctgattgctcttactttcacttcggcctaactcaacacttctgtaccaaacaactgacgttctctagtttgatcccaaaacagaggcatacgacactttcgaccttaaagtgcttcaaacggtgccatgtacaaactagcttgataactgttgttgtatgaaaactcagcatacagtagattcttatcccaagatccaccaaaatcaagggcgcaaactctcaacatatcctccaaaatctgatttacttgctctgtctgaccatcggtctgcagatgatatgctgtgctaaagttcaaacgggttccaagttcctcttgcagcttatgccaaaactttgacgtaaactgacttcctctatcagacacgatcttcttcggcacaccatgcaaacagacaatcctcgaaagatacaactctgctaacctctttcctatataagttgtatgaaccggaagaaaatgtgccactttcatgagacgatccactattacccaaatagaatcatgacctgatgatgtccttggcaatccggttataaatccataccaatttcttcccacttccattctggaatctgaatagactgcaaacctgctggtctctagtgttctgcttttactcgctgacatacgtcacggagtgctacgaattctgctatctctcttttcatactgaccgaccaaaacttctccttgaaatattggtacatctttgtgcttcccggatgaattgaatattggatctggtgagcttcactaagagtcaactccttcaactctttgttgtcaggcacacacaatctttcacccatccatatcgttccatgttcatcctcagtaaaatctcgggctttatccactcgcatatttttcttaagctctgctatctctggatattttgcatgcgcaacgagtgtcggctgtgcttccaaagcggcaacaaaaccatgttctacaattcccaaattcagacgttctaggtcttgtatcagttgagtacttacttcttctaagcatgttgcattgcaataatttttccggcttaacgcatcggcaacgacattagctttaccaggatgataatctatacacacatcataatctttgatcaactctaacaatcggcactgacggagattcaaatcgggctgggtgaagatatacttcatgctcttatgatcagtatatatatctcagaacgattaccaatcaagtagtgtcgccagatcttcaaagcatgaaccactactgctaactccaaatcatgagtcggataattgtcttcatgtgtacgcaactgacgcgaggcgtaagcaacaactctaccttcttgaataagcacccatcccaaaccttgacgagatgcatcacaatacacttcaaaatcctttctctgattgggcagaatcaaaattagagcggacactaatctcctcttgagttcctcaaaactctcctgacactgcgaagtacgaacaaacttttcctctttcttcaacaactgtgtcattggcttggcaattctcgagaaattctcaatgaaccgacagtaataccctgtaagtccaagaaaactcctcacttgcatcactgtcttcggtggaatccacttagtgactgcttccacatttcacgaatcgactgctactcttttagtggtaataacatgccgaacttgacttctttcaaccaaaaatcacacttgctgaacttgggatacaactaatgctccttcatcttctccaacactacgtgaagatgattcccatgttcttccttagactttgaataaaccaagatatcatcaatgaaaaccacaacaaactatccaggtattccatgaacacattattcatcaaattcatgaagaatgtgggtgcattggtaagtccaaacgacattactatgcactcgaacaattcatagcgagtcgtaaaagttgtcttaggaatatcctcctcgcgaattctgaactgatggtaacctgatcacagatatatcttcgaaagcacagttgctcccttcagctgatgaaacatatcatctatccttagcaaagggtacttattcttgatcgtaacatcattaagcgctctataatcagtagacatcctctttgtcttgtctttcttctcaacaaaaatcactagagcaccccaaggcgatgtgctgggtcgaatgtatcctttctgcaactgctcatccacttgcttcttaacttctgccatttcttcggctgccatcctgtacggtctcttgtagatgggagctgtacctaggaccaaattgatacggaactcaatgtctttctttggcagcatagctgtcgactcctccaaaaaaacttcagaatactcacaaaccacaggaatgtcttctaactttgggacatctttcatgacttcatcctgttgttcactttccacttaattcaagcttacttctttcttctgaataaatggagattgaattactaccacttctccatttcaattaaccaacgtaattgtgcggcttgcacaatcaataactcctttatgtcttgtcaaccaatccattcctagtatgacatctaggtctttgcactccagaaggataagattggctagaaaaggtgacccttggatttctatcatcaaagaggaacaaaaactaactaatgttaagctattacttggtgtattaactttcatgggagtactaagttacacttttcttaacccgtgtacccaaacaaatctcttggatataaatgaatgcgtagcaccagaatcgaataaaactgtagaaggaattgagttcacagggaacgtacccaaaaccacttctgacgctgcttgagcttcctttgtagacacatgataaacacgagcttgaacgaccttgggtccattgcgcattgttttagggcacttatttgcaaaatgtccggtatctccgtagttgaaacacataaggggcttttgttctgacttcttctttggctggtggggctgcaaagcttgagactgggcgggcgcggaactggattatggttgttctgatttccactgttgcctcggctgaaatttcctagctgatatggcctgtgctatcgaacaatcataatagtagaaccactgtgctgtccataaccacagcgatgcttctgctgtccaccttgctgaaacctgaactgcatagctttcctcttgcgatctatcttgttacgttgatcttcctaacgaatggtcctgtccacaagtctctcaaaatcagcatagtctttagaaatctcctggttagtcaatgtggaggggagcgcagctagccagacctccattctctctcctttgctcgaactctagctga

SEQ ID NO: 35966 - DNA, 7818 bp, Oryza sativa
  Clone ID: PAT_MRT4530_39837C.1
atggcgctggagaggcggctcgcgtacgccgcgctcatcccgttcctccttctcgcgctccccatcctgccgtccgattccccgtccggcggcggcggcggtggcgcgggtgggggtgggggagggggagaaaccctagacccgcccgcggcgaagtacgtggtgcggttcgtcgagtaccggcccgccgacgagcaccgggagtacctggaggacggcctccgcggggccgcgcggcctccccccgccgcgtcgtggcggtgggtggagcggcggaaccccgccgccgcgttccccaccgacttcgccgtgctcgagatccgcgacgcgtgccgcgcggctgtcgtcgacgccgtcagtgcgctcggccgtgtccgggacgtgcacgccgatgcgagctactccaggggcgtcctgtctgcggatcggccgcggcagcaggggaagctgttcacagccatgtcgttcgagggggaggaaggagggggagatagggaggtcgggtgcagcactgatagtaataattcctcttctgctggttggaggcggaagcttctcgtgcagagatcacaagtaacgtctctttttggagctgaacgactatgggggagaggtttcactggtaggaaagtcaagatggccatttttgacactggtattcgagcagatcatccgcacttccgtaatattaaggagcgcactaattggacaaacgaagacacactaaatgataaccttggacatggaacatttgtagctggagttattgctggtcaagatgcagaatgccctggatttgcacctgacactgagatatatgcatttcgagtgttcacagatgctcagatatcctacacatcgtggttcttggatgcatttaattatgcaattgcaactggtatggatgtactgaatttgagtattggtggacctgattatctggatctcccctttgtggaaaaggacgccgagctcgccgcagcagaagagcgcaggcgagcaacagctcagaccgctgcagcagcagcgagggcggccagactggcggcagcggagttggcagcagccagggcggaggcggaggcggaggcggcgaaagatgcggcacgtgcggcggaggtagaggttgagaccttgcgcagcagcatcaacggctccatcgccggcgacatcaccgccgacagggagcttgaggagctggcaagaggaagggcacgggagcgggcagagcggtgggcagcagcccacctccacggcggcggcggcggtccaagggaccgcgggcccgccaacgggaacccagatgggcgcgggcgtgccggcggcagcccggagcccgcacgcggccctcgcaggcagcgcggctctttctcccctgaccggcgccatggtcaccacggcgtccagacggtggtcagggactttggtcccggcggtgggtggcctaccctcaccaaaaccaactacatcgagtgggccgcagtgatgagggtgaggctccaggtgcggcaaatgtgggaggcagtccggtacggcgacgtcgactacgacgaggatcggcgagcactggatgccctcatcgctgcagtcccgcccgagatgcagttctcgctttcccagaagcggactgccaaggaggcctgggacgccatcgctgcggcacgcatcggcagcgaccgcgcccgcaagtccacactgcaggcactccgcaaggagtgggagaacctggccttcaagccaggtgaggatgttgatgactttgctctccgtctcaacactctcttgcagaaaatggtgcagtacggcgacgacacctatgacgaggagagagctgtcgagaagctcttccgctgcgtccctgagaagtacaggcagatcgctcgctcgattgaatctctgctggacctctccacgatgtcgatcgaggaggcgttaggtcgcctcaaggtcgtcgatggtgatgagccacagcctctctcggggcccatcaccatcggcgggaagctccatctcactcgggagcagtgggaggcctctcagggtgacgggaggaagggggagtcatcttccccgacaggcggccgtaagccgcgcaaggcgcggggaggtgtccagctacggtgggcgcgaagacgtgccgagggtggcgcccgcagaggcgcccagggcattgccactggcaaccacaagccggcacgagacgacgcctgccgcaactgtggcaagcttggccattgggccaaagactgtcgacagccacgacgcggccaggcccacgtcgcacgggtggaggaggaagagccggctctgctcctagctcacgcaagcatcgagctacctccagcggcaccggccgcagcggctttcctccaccttgatgagccgaaggtactcgtctccctctgcgacggctccagcaacgacaaggctgatgggtggtacctcgacaccggcgccacccatcacatgacctgccgacgggagttcttcaccgagttcgactccagcgtccgaggctccgtcaagttcggggacgcctccggcgtggagatcaagggtgttggctccgtgaccttcaccgccaagtccggtgagcacaggctgctcaccggagtctactacatccccgcgttgaggaattctatcatcagcgtgggacagctggatgagaacggctcacgcgtgttggtcgaggacggactcatgaggatttgggatcgccgtcgtcgccttcttgccaaggtaaccagaggcactaatcgactctacatcctcagcgcgcaggtcgcacaaccagtttgcctcgccgctcgtcgggacgacgaggcatggcagtggcacgagcgcttcgggcatctccacttcgaggccctgaagcgcctcagtgccaaggagatggtgcgaggcatgccgtgccttgaccacgtggagcagctctgcgacgtctgcgtggtgacgaagcagcggcggctcccctttccccagcagacgagcttccgagccaaggagcggctcaagctcgtgcacggggacttgtgtggcccagtgacaccggccacaccaggaggacgacgctacttcctactgctcgtcgacgacctctctcgctacatgtgggtgatggtcctcggcagcaagggagaggctgcggatgccatcaggcgcgcgcaggccgctgcagaggcggagtgcggccgcaagctgcgcgtgctgcgcaccgacaacggcggcgaattcacggcggctgaattcgcgtcgtactgcgctgatgagggcattcagcgccactacaccgcgccgtacagcccacagcagaacggcgtcgtcgagcggcgcaaccagacggttgtggggatggctcgggctcttctcaagcagagggggatgccagccatcttctggggggaggcggtggtgacagccgtctacatcctcaatcgctcgcctaccaaggccctcgatggcaggacaccgtacgaggcctggcatgggcacaagccggcggtctcccacctacgggtcttcggctgcctcgcgttcgccaaggagctcggccacatcggtaagctcgacgacaggagcaccccaggggtgttcatcggctacgcggagggctcgaaggcctaccgcatcctcgacccggagacacagcgtgtgcgcactgcgcgcgatgttgtgttcgacgaagggcgagggtgggtatgggacaaggcggtggacgatggttcgactccgacgtacgacgacttcaccatcgagtacgtccacttcgagggagctgggggagtaggcagctcttcatctagcgtgtctaccccagcccccgaatctccaccgactccgacaccaacacaccctcgggccacgacttcgactacgacgagctcttcgtcgacaccaccccagccagtgactccacatgctccagctccaacagccactcctccaagcacgtctactccgacgccagctcgtgttgagcgcagcccggtggagttcgctactccgctctcccacgacggggagcgcatcgacgcgtaccacgacggcgagcagctacggtaccgtacgatggaggatcttctcggcgaccagttggtgccgggactggtgcctcgcgacttagaggcgcagttgcaccttgcgtgcgacgacggtgagcctcggtcttttgcagaggccgagaaacacgcggcatggcgtgccgcgatgcagtcggagatggacgcggttcaggagaaccgcacctgggagcttgctgacctccctcgtggtcaccgcgcaatcacccttaagtgggtgttcaagctgaagagggatgaagccggagccatcgtcaagcacaaggctcgcttggtagcacgcggtttcgtgcagcaggaggggatcgactacgacgatgccttcgctcccgtggcacggatggagtccgtgcgactcctttttgcgctggctgctcaggaaggctggggcgtccatcacatggacgtcaagtcggcgtttctaaacggcgacttgaaggaggaggtctacgtgcaccagccgccgggatttgtgatccccggcaaggagggcaaggtgctacgcctgcacaaggccctctacggcttgcggcaggcaccgagggcgtggaatgccaagttggattccacgctcaaggggatgggcttcgagcaaagcccgcacgaggcggccatctaccggcggggcattggaggaaatgccttgctggtgggtgtctacgtcgacgacttggtgatcaccggcaccaaggatgcggaggtcgcggcgttcaaggaggagatgaaggccactttccagatgagtgatctggggcctctctccttctacctggggatcgaagtgcaccaggacaactccgggatcacgcttcgacagaccgcctatgccaagcgcgtcgttgagctggctgggctcaccgattgcaacccagctctcactccgatggaggagagactgaagctgagccgcgacagcacggcggaggaggtggatgctacacagtaccgacgtcttgtggggagccttcgctacctcacccacacacggccggacttggccttctccgtcggctacgtcagtcggtttatgcagcgaccgacgacggagcaccagcaggccgtgaagaggatcatccgctacgttgcggggactctcgaccacggtctctactacccgaggtgtcctggcaaggcacacttcgtcgggtacagcgacagcgaccacgccggcgacattgacaccagcaagagcacgagcgggattctcttcttcctcggcgagtgcctcgttagctggcagtcaatcaagcagcaggtggtggccctgtccagctgcgaggccgagtacatggcggcatccgccgcttcgacccaggcgctctggcttgctcgactgcttagtgatctcctcggcagagatactggagcggtggagctcagggtggatagcaagtccgctctggccctggcaaagaaccccgtttttcacgaacggagcaagcacatccgggtttgggagctcacagcaaataacattattatggtatcagctattggaaatgatggccctctttatggcacgctaaataacccggctgatcagagtgacgtcattggtgttggtggtattgattacaataaccatatagcttcattttcctctcgaggcatgactacttgggagcttcctcatgggtatggccgtgttaaacctgatgttgttgcgtatagtcgtgatataatgggttcaaagatcagcacaggttgtaaaaccctttcaggcaccagtgttgcaagcccggtggttgctggtgtagtatgcttgcttgttagtgttataccagaggagcatcggaaatccatccttaaccctgcaacaatgaaacaagcccttgtagagggtgcttctaggctttcaggaccaaacatgtatgagcagggcgctggcaagattgacctctggcaatcatacgaaatcttgaaaagttaccaaccgcgtgcaagcatctttcctaatacccttgacttcactgattgtccctatttctggcctttttgccgccaacctctgtatgctggagctatgccagtggtcttcaatgctacaattctgaacgggatgggggtgattggttatgttaaggatcctcctgtatggcagccctctgaggatgtcggcaatattcttagtgttcacttcacctactcagatgtcatatggccttggacaggttatcttgccctgcacttacaagttaaagatgaaggatctcagttttcaggcataatcagtggcaaggtcacattgtcaatttacagcccagcagcccatggggaaagcagtccacgaagtagttcatgtgttctttacctgaaggtcaaggtggtgccaacacctgttaggtccagaagaatattgtgggaccaatttcataatatcaaatacccatctggttttgttccaagagattcacttaatgtgcataatgatatccttgactggcatggcgatcacttgcacacgaattttcatatactgttcaacatgctgagagatgcaggatactacattgagacccttggatctccacttacctgctttgatgctagcaattatgggacactgcttatggttgaccttgaggatgagtacttcagtgaggagattcagaaacttaaggatgatgttgtacacaaagggcttggcgttgttgtttttgcagagtggtatcatgtcgacacaatggttaagatgacattctttgatgaaaatacacgcagttggtggactccaattactgggggtgcaaatgttcctgcacttaatgaacttttggcaccatttggcattgcttttggggacaaagtactaagtggtgacttctcaatcaatggtgagcagacccactatgcttctgggactgatatagtgcaattcccagcaggaggttttttgcatagcttccaactccaggacaactctaaaatttctcaggataactcaagaagcgcagatacacaaaataccccagataaaagcaagtgcctcctagtctgtggctctgtgcacatgctctcttctattcttggaatgatggaagcaggcaaaggtcgggttgcagtctatggagattcaaattgccttgacagtagtcacatggtaacaaactgctattggcttttgagaaaacttgtggagttcactggcaatagaatcaaagatcctgttcttttctcagaatctgctcagttaaaatttccagtttttgagagcatccatcaactgtcacgtagaccagatgtgaacttctcaacatattcaactgtcgttggcaatgaattgatctgtcaccaggattcccgatttgaggtttggggaacgaaaggttatggtacccaacaaacaggcacaacaagaaagttgccagagtaccagaaaagtgaagcttacaacatttcaacaccaatagcttctgacagcacaccagatgaagctggcctgcaaagaaatatttcaacaccaatagcttctaagtttgataaaagaatggactattttggttttctcgggcacgaagagaattctggatccctttatgctgtacaatttgtgcacacgcttagtaatagtaagattgacataggaatgctagtggcaagccaatggatggtaccttgctttgctgctactgcctgccttatgttgtacctaagttgcagagtgcaacaaaagcgccgacgacgaaagaaggggtcaacagctgctagattgtcaagtatggaccgtatggtctaa

SEQ ID NO: 35967 - DNA, 1351 bp, Oryza sativa
  Clone ID: PAT_MRT4530_39838C.1
acccccttcggcaatattgatccacaggctcggatgctgccactggcgatgttacttggttgacagattggtctttggtcgaaatgtattctggccttaaatccggggaaggcgaagacggagccaatgtggcaatagagaagccaataggatatggggcaattggcatatcagagaggggcaaagcagacggactgtagccaagcgtgcccattgggtgatcatacttgcatgcaactccatatctgcaatacccattttgggcatagtatgcacaaggctgagcccccggacgaagtggaagacaaagggagttgaccatatagcctgatttaggtgcactcaactctcgggggtgatgatatttacatgtagctccaaatttgcaatctcctgttctcatataatattgacaatcaggctgccctggccgctcagggaatccatgttcttgttgattgttgcttgattgtccagttgaggaagcatatggaacgtaaggaccaccataagcaattgtagaggaagatccatggtgccccatgccgtacacaggtccagcttgaacattttgttgagctccacctgacactacagggtttaccgaagccggataagggctccatccttgcaatgggatcattccagatgagagcatcattggggtgtatgagcctggtatatatgatccaggaactacaggtggtctccccatttgccaatttgcaagagaagcatatggatgaggggaagctatagatggagactgtaatggtgggtatattccaggggtcatcggaacaccaccgaattccggatgatggaatttacatgtagttccaaatttacattgcccagttttcatgtagtaggagcactccttctcacccaggcgtatagggaatccactgttgtttaacataacaggtagcacagctccatcttgcttaggatggtgatatttgcaattggtaccaaatttgcaagtcccagtcttcatgtaatactcgcatataggttgacccgccctttctggataatccaatgctgctgcattccttgcacctccaccaaactcagtgccgccgcgatcgcgcgggtggttgtagcggcagcggtcaccgaagccgcacgcgccggtgcggaggtagtagacacagtcctcctccccgggccgctccggcagcctccccgccgcgtccccatcccctcctcctccacctccacctcccccgcctcctcctcccagccccatcctccacatcggcccttccaggccggtgtcggggctagccccgccctccccctcccctccaccagctgcggcggcggcggcgtgcggctgctccat

SEQ ID NO: 35968 - DNA, 4739 bp, Oryza sativa
  Clone ID: PAT_MRT4530_39839C.1
tcagccagcagcagcagcagcagcaccggttgctcctccttcccctttcccttccccctctccacacagcagccccccggaggtgcgccatgtccgacgctcggtctcggcgttcggtcgcctcgagcactcggcgtcagcaggacgccgagctcgccgcagcagaagagcgcaggcgagcaacggctcagaccgctgcagcagcagcgagggcggccagactggcggcagcggagttggcagcagccagggcggaggcggaggcggaggcggcggaagatgcggcacgtgcggcggaggtagaggttgagaccttgcgcagcagcatcaacggctccattgccggcgacatcaccgccgacagggagcttgaggagctggcaagaggaagggcacgggagcgagcagagcggtgggcagcagcccacctccacggcggcggcggcggcccaagggaccgcgcgcccgccgacgggaacccagacgggcgcaggcgtgccggcggcagcccggagctcgcacgcggccctcgcaggcagcacggctctctctcccctgaccggcgccatggtcaccacggtgtccagacggtggtcagggactttggtcccggcggtgggtggcctaccctcaccaaaaccaactacatcgagtgggccgcggtgatgagggtgaggctccaggtgcggcacatgtgggaggcagtccggtacggtgacgtcgactacgacgaggatcggcgggcactggatgccctcatcgctgcagtcccgcccgagatgcagttctcgctttcccagaagcggactgccaaggaggcctgggacgccatcgctgcggcacgcatcggcagcgaccgcgcccgcaagtccacactgcaggcactccgcaaggagtgggagaacctggccttcaagccaggtgaggatgttgatgactttgctctccgtctcaacactctcttgcagaaaatggtgcagtacggcgacgacacctacgacgaggagagagctgtcgagaagctcttccgctgcgtccctgagaagtacagacagatcgctcgctcgatcgaatctctgctggacctctccacgatgtcgatcgaggaggcgttaggtcgcctcaaggtcgtcgatggtgatgagccacagcctctctcggggcccatcaccatcggcgggaagctccatctcactagggagcagtgggaggcctctcagggtgacgggaggaagggggagtcatcttccccgacaggcggccgtaagccgcgcaaggcgcggggaggtgtccagctacggtgggcgcgaagacgtgccgagggtggcgcccgcagaggcgcccagggcgttgccaccggcaaccacaagccggcacgagacgacgcctgccgcaactatggcaagcttggccattgggccaaagactgtcgacagccacgacgcggccaggcccacgtcgcacgggtggaggaggaagagccggctctgctcctggctcacgcaagcatcgagctacctccagcggcaccggccgcagcggctttcctccaccttgatgagccgaaggtactcgtctccctctgcaacggctccagcaacgacaaggctgatgggtggtaccttgacaccggcgccacccatcacatgaccggccgacgggagttcttcaccgagttcgactccagcgtccgaggctccgtcaagttcggggacgcctccggcgtggagatcaagggtgttggctccgtcaccttcaccgccaagtccggtgagcacaggctgctcaccggagtctactacatccccgcgttgaggaattctatcatcagcgtgggacagctggatgagaacggctcacgcgtgttggtcgaggacggactcatgaggatttgggatcgccgtcgtcaccttcttgccaaggtaaccagaggcactaatcgactctacatcctcagcgcgcaggtcgcacaaccagtttgcctcgccgctcgtcgggacgacgaggcgtggcagtggcacgagcgcttcgggcacctccacttcgaggccctgaagcagctcagtgccaaggagatggtgcgaggcatgccgtgccttgaccacgtggagcagctctgcgacgtctgcgtggtgacgaagcagcggcggctcccctttccccagcagacgagcttccgagccaaggagcggctcgagctcgtgcacggggacttgtgtggcccagtgacaccggccacaccaggaggacgaccaagggaggctgcggacgccatcaggcatgcgcaggctgctgcagaggcggagtgcggccgcaagctgcgcgtgctgcgcactgacaacggcggcgaattcacggcggctgaattcgcgtcgtactgcgctgatgagggcattcagcgccactacaccgcgccgtatagcccacagcagaacggcgtcgtcgagcggcgcaaccagacggttgtggggatggctcgggctcttctcaagcaaagggggatgccggccatcttctggggggaggcggtggtgacagccgtctacatcctcaatcgctcgcctaccaaggccctcgatggcaggacaccgtacgaggcttggcatgggcacaagccggcggtctcccacctacgggtcttcggctgcctcgcgttcgccaaggagcttggccacatcggtaagctcgacgacaggagcaccccaggggtgttcatcggctacgcggagggctcgaaggcctaccgcatcctcgacccggagacacagcgtgtgcgcacagtgcgcgacgtagtgttcgacgaagggcgagggtgggtatgggacaaggcggtggatgatggttcgactccgacgtacgacgacttcaccatcgagtacgtccacttcgagggagctgggggagtaggcagctcttcttcaccaagcgtgtctaccccaatccccgagcctccaccgactccaacaccaacacaccctcgggccacgacttcgactacgacgagctcttcgtcgacaccaccccagccggtgtccccacgcgctccagcaccaatagccactcctccgggcacgtctactccgacgccagctcgtgttgagcgcagcccggtggagttcgctactccgctctcccacgacggggagcgcatcgacgcgtatcacgacggcgagcagctacggtaccgtacgatggaggatcttctcggcgaccagccggtgccgggactggtgcctcgcgacctagaggcgcagttgcaccttgcgtgcgacgacggtgagcctcggttttttgcagaggccgagaaacacgcggcatggcgtgctgcgatgcagtcggagatggacgcggttcaggagaaccgcacctgggagcttgctgacctccctcgtggtcaccgcgcaatcacccttaagtgggtgttcaagctgaagagggatgaagccggagccatcgtcaagcacaagactcgcttggtggcacgcggtttcgtgcagcaggaggggatcgactacgacgatgccttcgctcccgtggcacggatggagtccgtgcgactccttcttgcgctggctgctcaggaaggctggggcgtccatcacatggacgtcaagtcggcgtttctaaacggcgacttgaaggaggaggtctacgtgcaccagccgccgggatttgtgatccccggcaaggagggcaaggtgctacgcctgcacaaggccctctacggcttgcggcaggcaccgagggcgtggaatgccaagttggattccacgctcaaggggatgggcttcgagcaaagcccgcacgaggcggccatctaccggcggggcaatggaggaaatgccttgctggtgggtgtctacgtcgacgacttggtgatcaccggcaccaaggatgcggaggtcgcggcgttcaaggaggagatgaaggccaccttccagatgagtgatctggggcctctctccttctacctggggatcgaagtgcaccaggacaactccgggatcacgcttcgacagaccgcctacgccaagcgcgtcgttgagctggctgggctcaccgattgcaacccagctcactccgatggaggagagactgaagctgagccgcgacagcacgacggaggaggtggatgctacacacgaccgacgacggagcaccagcaggctgtgaagaggatcatccgctacgttgcggggactctcgaccacggtctctactacccgaggtgtcctggcaaggcacacttcgtcgggtacagcgacagcgaccacgccggcgacatcgacaccagcaagagcacgagcgggattctcttcttcctcggcgagtgcctcgttagctggcagtcggtcaagcagcaggtggtggccctgtccagctgcgaggccgagtacatggcggcatccgccgcttcgacccaggcgctctggcttgctcgactgcttggtgatctcctcggcagagacactggagcagtagagctcagggtggacagcaagtccgctctggccctggcaaagaaccccgtttttcacgaacggagcaagcacatctgggtgaggtaccacttcattcaaagctacttggaggaagggagcatcaaggcgagctacatcaacaccaaggaccagcttgcggacttgctcaccaagcctcttgggaggatcaagttcctcgagctctgctccaggatcgggatggcccaactttcccacaagacgacgcacaagacttag

SEQ ID NO: 35969 - DNA, 492 bp, Oryza sativa
  Clone ID: PAT_MRT4530_3983C.1
atgggtataaatctgtacacccgggatcattgtaaagaatatcacacagatcaatacaactactctcggtgcatcgccaccctctttaccgaggatcaaactgactgccacacccgcatctcaccaagatttggacctgcactggagataagcagatctctcaggctagtgagaaaagtttggaacaaaaaaattgacggaggcgtcgccggcgcggtggagggcggcggtggccgaggcgtggtggaggacggcggtggcggccgcgcgttgaaggacggcggcggcggccgcggcgcggtggagggcggagccgatggccgcggcgcggtggagggcggagccggcggccgcgcggtggaggctggaggaggaggccgcgcggtggaggcgggaggaggaggcagtcaggccgagcagagctccgcggtggtgcagcgcgctgttccctgccccaagtgctggccaccgctgctcatgacctcactatga

SEQ ID NO: 35970 - DNA, 1782 bp, Oryza sativa
  Clone ID: PAT_MRT4530_39840C.1
tcagagccacactttcctgtaggctaaatatctcctgctccactgcttcccaagctcggttgagctcttagccagcagcagcagcaccggctgctcctccttccccttctccttccccttctccacgcagcagcctcccggaggcgcgccatgtccgacgttcggtctcggcgttcggtcgcctcgagcactcggcgtcagcaggatgccgagcttgccgcagcagaagagcgcaggcgagcaacggctcagaccgctacagcagcagcgagggcggccagactggcggcagcggagttggcagcagtcagggcggaggtggaggcggaggcggcggaagatgcggcacgtgcggcggaggtagaggttgagaccttgcgcagcagcatcaacggctccattgccggcgacatcaccgccgacagggagcttgaggagctggcaagaggaggggcacgggagcgggcagagcggtgggcagcagcccacctccacggcggtggcggcgacccaagggaccgcgcgctcgccgacgggaacccagacgggcgcgggcgtgccggcggcagcccggagcccgcgcgcggccctcgcaggcagcgcggctctccctcccctgaccggcgtcatggtcaccatggcgtccagacggtggtcagggactttggtcccggcggtgggtggcctaccctcaccaaaaccaactacatcgagtgggccgcggtgatgagggtgaggctgcaggtgtggcacatgtgggaggcagtccggtacggcgacgtcgactacaacgaggatggcaaagaaccccgtcttccacgaacggagcaagcacatccgggtgagtttcaccttttcaggacagcatctactcctttagcatatttttcagttgctaggacagctgcgtttggatgccctctaggacagcatcccattcaaatttcgaattttagactaggagggtgcagcaataggctagcagcgagctatggctatatatatatgtatccaacctccctcggatatgaatactactttgctttattgcgggacttcccagatgtgcagtttactctaaatggaggtataactactattgatcaagtcactgcatccataagacaaggtgcacatcgagttatggttggccgggctgcatataataatccatggaacatgctggggcatgtggacagtgaagtctatgggatgccgacaagacgctcttctcgtcgccagatccttgagagctaccaggtttatggtgattcaataatgggccaatatggccccagcagaccaaacgtgagacaacttgtcaagccattgttaaatttattccactcggaacctggcaatggcctttggaaacgcaaggctgactctacactgcgtcattgcaagacacttgaatccttcttagaggagactcttgacgcgataccaaactctgtccttgacgcaccaataggtaaggaggcatacatcgaggagggacattttgctgatatggattcattattgccgcctagatattcatcactgaccaacggtagctgtgaaattccagcacttgtaactgcatccacctgaccaccatattttccgtggagatgctaaaatttactgaaaaaaaaagataagcctgcaagattactgttataatacagacccctcctgggttagattagatacgcgggaacactattgattgtaagttgaaacaaacatcatgaaatgtgtatatattctttgggaggaaggatatgtcatcgttcc

SEQ ID NO: 35971 - DNA, 426 bp, Oryza sativa
  Clone ID: PAT_MRT4530_39841C.1
agccttcggggaagcgtgggggaaaccttagccaaaagggggaaccggatccccctggccaacttattggtgattttggccaagggaaccaaccaccaaccgggtttaggaggccccttaaaaaggttcggcctttcatgaaaaaaggatctgggggaaaaggccaaccttgaaagggagaacagggattaacattttacggaaatggcctggaagaagggaaaaacaacttctggccattgccccggttttaaaaaatccatggttgcttccttttttcttttcccccattaaaactttaaaccacctggcttgcttggttattaaaatgggccccaagggctgggtaattaaaaaaaaaaaaaaagggcgggccgttttaaagaacccagcctaactaccccggccttccaaggtattagtttt

SEQ ID NO: 35972 - DNA, 2973 bp, Oryza sativa
  Clone ID: PAT_MRT4530_39842C.1
atggtggcggctcgccggagcgcggcctcctcctccttcttcctcctcctgctggtgctcgccgtccgcgtccgcgcctcttccgaccgtgtccaagaacgggacagatcggcgctcctcgagctccggggcgccgccgggctgctggggcggtggccgacgggctccgccgtcgctgaccactgctcctggcccggggtgacctgcgatgcgagtcgccgggtcgtcgccgtcgccgtcgccgcgccccctgcctcggggagctcggagctcgccggcgagctttccccggcggtggggctcctcaccgagctgagggagctctccttaccctcgcgcggccttcgcggcgagatccccgcggagatctggaggctggagaagctcgaggtggtcaacctcgcggggaactccctccatggcgcgcttcctctcgccttcccgccgcggatgagggtgcttgacctcgcctccaaccgtctgcatggtgagattcagggcactctctcggactgcaagagcttgatgaggttgaacctttccggcaaccgcctcaccggctcggtgccgggtgttcttggcagcttgcccaagttgaagctgcttgacttgtcccggaaccttcttaccggaagaattccctcagaattgggggattgtcgggagctccgctccctgcagctgttctccaatttgctggaaggttcaattccaccagagattggaaggttgaggaggttgcaggttttggacatatcgagtaaccgattgaacggtccggttccaatggaactagggaattgcatggatttgtcggtactcgtattgacgagccagtttgatgctgtgaatttatctgagttcaatatgtttataggaggaattccggaaagtgtgacagctttgccaaagcttcggatgctatgggcgccaagggcaggttttgaagggaacattccgagcaattggggaaggtgtcatagtttggaaatggttaaccttgcggagaacttactctctggagtgattccaagggagctagggcagtgcagtaacctcaagtttctcaacctcagctcgaataaattgtccggttctattgataacggtctttgtccgcattgtattgctgtttttgatgtcagcagaaatgaactatccggcacaattccagcatgtgctaacaaaggttgcacaccccagcttttggatgacatgccatctcgttatccgtcattcttcatgtccaaagctctagcacagccatcatcggggtattgcaaatcaggaaattgttctgttgtataccataattttgcaaataacaatcttggaggccaccttacatcattgccatttagtgcagaccgatttgggaacaagatattgtatgcttttcatgttgattacaataacttcacaggatctttgcatgaaattttgctggcacagtgtaataatgtggaggggttgattgtcagtttccgggacaacaagatatctggtgggctcacagaagaaatgagtacaaaatgcagtgctatcagagcattggatcttgctggcaatcgaataacaggagtgatgcctggtaacattggtttgttgagtgctcttgtcaagatggacatcagtaggaatttgcttgagggtcaaattccttccagtttcaaagagcttaagagcttgaaatttctgtcattagctgagaataatctcagtggcaccataccatcctgtttgggtaagttgagatcactggaggttttggatctctcgtctaactccctatctggaaagatccctaggaatcttgtgacactgacatatcttacttcacttttgctgaacaataataagctttccggaaacattcctgatattgccccatcagcatcactatccatttttaacatttcattcaataacttgtctggcccattgcctttgaatatgcactcattggcatgcaacagtattcagggaaatccatccctccagccttgtgggttgtctacacttgcaaatacagtaatgaaggcccgatcactcgcagaaggagatgttccaccatcagatagtgcaactgttgatagtggtggcggcttcagcaaaatagagattgcctcaattacatcagcatcagctattgttgcagttctcttggctctgattatcctatatatttacacacggaaatgtgcatcaagacagtcaagacgttcaatcaggagaagggaagtgactgtttttgtggatattggtgctccattgacgtatgagactgttgtacgtgctacggggagttttaatgcaagcaattgtattggaagtggtggctttggagcaacatacaaagctgagattgcacctggagttctggtggcgataaagaggcttgcgattggaaggttccaaggtattcagcaattccaagcagaggtaaaaactcttgggaggtgccgccatcccaatcttgtgacactcataggataccatctcagtgattcagagatgtttcttatatataattttcttcctggtggtaatttggaaagatttatacaagaaagggctaagagacctattgactggagaatgcttcacaaaattgctctagatattgcacgtgcacttggattccttcatgatagctgtgtcccacgcattctgcaccgagacgtgaaaccaagcaacattttacttgataatgaatacaatgcatacctttctgattttggattagcaagactactcgggaattcagaaacacacgcaacaactggtgtagcagatgtgtacagctatggagttgtacttcttgagcttatttcagacaagaaagcactggacccttctttttctccatatggaaatggcttcaacattgttgcctgggcttgcatgcttctgcagaagggtcgagcccgtgagttcttcatagaaggaagcaatggaacatcagagggatga

SEQ ID NO: 35973 - DNA, 299 bp, Oryza sativa
  Clone ID: PAT_MRT4530_39843C.1
tgttttatcggggtgctagccgataagttatctggacgttgcatcggcttataaggattacatccgattggtttctactggattatattgctatattatattatcatcagtcgattgccttcatatcattatatacatttgacatatagccgataactcaaaaccctatcgctatcggctgataataactgactggcacgccctcatctcatcaacttttagacctgcacaggagctaagcagacctcccaggccaattaatgtgtgtttttcgggtcaacagttataccgtataatgg

SEQ ID NO: 35974 - DNA, 597 bp, Oryza sativa
  Clone ID: PAT_MRT4530_39844C.1
atgggcggggaggaggcagacggggggaggagaagctcgagggcgctgctgcgggtgtccgacggcgggagcgccgcagtggatcaggcgacggcaggaggacaacctgcgcgcgggtggctgacggcgggagctcgtgctatggcgaaacctccagatctgcccggagagcccagctcggagattctactccacgactgtgtttttcattgctccatgaggaacgcggaaccaattattgctacaggtacctcgccaggatttgcatgtttggacccaccactttcatgccccgcgccacagggaagggagagggagaacgggaagaaagcatccgaccgaaggaggccgcatcgactgccaccgaagagctcaacagggacggtagcctcccgctccgtgccgccgccagggagcttgtcgaccctccctccagtttgcaccgccaatctccatcttcatcgctcgatccgcccatggcccaccaatggcggcgagatgcagggattggtaggcaaaatcagagaagagaagggagagccgcagccctcgacggagctcgcctcgacagcggcgcttcatcccttgtcagcatga

SEQ ID NO: 35975 - DNA, 1197 bp, Oryza sativa
  Clone ID: PAT_MRT4530_39845C.1
atgcgtcaatttggacctgattttggtggtgttacgaagaagagtttcttacacttgaagaaaattgaacttgttggtttaccggaacttgtggagtgggttgggggagatcattgccatatgttttcaaagcttttaagcatcagatgtgaagattgtcctaatctcaccgtgctcctgctgccatcgtttgagtgctctatctctgacacaaaagacataaacaccatatggtttcccaacttgtgttctcttaagattcgaaattgccccaggttgtcactgcctcccctgcctcacacttccatgctaacctgtgttactgtgaaagaagatgatacagatttgatgtattttgatggaaaaagtctgaggttaaatcgctacggtagtgctttggccttccataacctgaacaaagtagaagatatggaaattgtagacatgccgctcgtttcatggactggtctccaaaagctgaactcccccagaagcatgcaatcgatgggtctgctctcaaacctctcatctctcactcatctagaactagtaaattgtgataacttaagagtcgatggttttgatcctctcaccacatgcaacctcaaggaaatggcagtttacaatagtaaaaaccatcacccctccatagcagcggatttgttctcagtggtggcaatgatggaagtaatacctgcaggttccttccagcagctggaacaactctcggtggacagcatctcagcagtgcttgttgcccccatttgcaacctcctggctagcaccctctgtaagatggaattcccgtatgacatgtggatggaaagcttcaccgaaacgcaggaggaggcgcttcagctcctcacctccctccaatgcctaggattctatgtgtgtccccgtctgcagtccctcccagaagggttacatcgcctttcttcacttcgtgaactaattatccataaatgtcctgaaatcagagcgcttcccaaggaagggttccccgcatcactgagatatgtatttgcatacgagggcatcagtgttgatctaaaggatcaactcaagaaactaaaagcatcaacgccaggtttacgtgatcgctgctcaaggagcattcctctcttcattgagatatccaagggcaagaccgcaagaggatgcagcatcgtctacaggatcaactcaagaaaatag

SEQ ID NO: 35976 - DNA, 452 bp, Oryza sativa
  unsure (1)..(452): unsure at all n locations
  Clone ID: PAT_MRT4530_39846C.1
gcacgagggaggagagagaactagtcacgagttttgatcaaagtttcattatactcaacagactagttcaatatattttgttcttagcattgggttgacttttgcaaatgttttggactttaggtagatttacatgatattaactgaagtacaagcataaattcacataaattgagaactaactctctctctctctctctctctctctctgaaagtagaagtgtgtaaagaacatggtagattctattttatattgntatgataacaacaaacttgaaagatataaaacctttctaatcaatcagtaggatcctggaagcagtacttgtgttcttttcctatgaatatacttgtagggtagtcgtcaataaagactcgcataatcagcaagcccatatggctggaaccattcaaccagtactcctttcttccttttagggttgcatccaatg

SEQ ID NO: 35977 - DNA, 305 bp, Oryza sativa
  Clone ID: PAT_MRT4530_39847C.1
acaataacttgctcctgagttaaatagctatcctctacttattcctgacatcacacaccgcctgtagaggaaccctgttattatctcaggtgactcatcaacagcaaacacctaacattactagctttacggtccataggccctttacgatccagaaaaattactcgacgtgggcgctgatgaagttgttggcgaaccaggataccccgcttttctttggggcgctcttactggcggacattatcaaactgcttaagaagtgacccacccggtatattcagcggaataaggtcactcacaggctg

SEQ ID NO: 35978 - DNA, 3145 bp, Oryza sativa
  Clone ID: PAT_MRT4530_39848C.1
atgtcaagagattaccttgtaatccatctacaaattatctttgtggctttggattgacaatcagaaattgagaatacaaaatatcagaaaaaaggattgacattttgatgttacagcacagtaagcttccacaaataaggatgaatgatctactggttgcataaaagaacatacaacatggggttggcaccaactattctgaaataaatgggggtttctaaatagggtggtagcttttttatgcatgatcatagtccagaccatcacctttcatcagttcaaacaattcaaatgctatatcgatttgtccatgcatcccatatcccaatatcatagtattccatgaagcaacatccttctttgtaatcttattaaaaatctttgatgcagtgactagcattccacccatctttagagaggccatcctcgcacaagccggaagcacattcactagtgtgatagaatttggggattccccactttattgcatatctgtcacaagcctgaacgcctcagtctcagctccattttgcacaagatttgcgatcattgcattccatgacacaacattgcggtccttcatttgttcaaagatggtagatgctttctccaaagaaccaaatttggcatacatatcaacaagtgagttggcaacaaaaatatccaagtccattgctctctttatgctatacccatgcacctcccttcccaaagggtacagctgaaaccacttcagaagaaaagtatgcgaatccgcggcgatcttgaggtccccggtgttataatccgaagtattcttggagtatgacagccccacaccagcaggggaatccaagtagatcacactggataccttggaccagctatagggattgagatgaagcttcggtaggctcttggctgaccctcctgactcgaaattgaatggtccgtgctcgtagacgaagccgtcgaagctggagcagccggggccgccgttgagccagagcacgagggggtccttcgccgggtcgcgctccgactccaccaggtagtagaacaggttccgcccgtgctgctcctccaccgtcacgtacccggcgtagtgcttcgacgggagggcgccgtcgaatcccgggacgctcttcacgaccgcgctcgccggcgcggccttgcatactccgccgccgccgccgtaggcgaggaagacgaaaagggcgatggcaacggcgggcgaagcaggggagcggcggccgcgcctggccatcgatggtgcgggtggtcggcagcagcgtggcgcagtggagcccgcggtggtggtgggaaagttgagcctcgcggatagaaacggcagcgagagagcgtccagcgcgcagggaaaggtgcggtcatccgggcgcacggcggagcggagcatgaggttgtacacccgcagggcctcggaggggagggacgcggaggagagcgcgcgggagagggagttccagaggaatgcggagcggagacggagcgggtggtggcggaggacgaggcgcgcggaggcgaggtcggagagcgcggcgtacgagaggagcagcgcgcccgcgagcggcagggacgtggcgagcgcgccggagacgagggacgccgcgtgggcgcggcggagcgcgaggcctccgccgccgccgccgcatccgtggagctcgaggacatgcgcgtggaggcgcgccgccgacgcggcgggagcgcgcggcggcatgagaagcagaggaagtggaaatttagaaccagcaagccagcggctatagaaagccaatgattcttgtggtttgtattcaggaacagtgtgcccagcacccttaatggtagcaaaggtgaggccatgttcatatccttgggtgtacctgtatatgaaagcacgataaccctggcctgtgaggttcttgtgataactgatcatacttccagcatcatggatgaaatccaacacgttggtgcatataagccacgagccaattgagcttactggttgggcatgaattgctgctctgacgtcatcgttgttcagccatgctgttgcaacttcatcactcatacaaggaactccactggggcgagatcctctggcaaactcctgccaggatggcacacgccccgctctcacaggagctctcagaggccaagcacgcccatgcattcttgttcttacagcaaggggcttggtagttgtaccaagatgttggaaacttttgggcaatttggtatttgctggggtcactttcttgatagttttgctgtggtagcatggctcaagaatgtcataaatatttaggtcattaattgacgtatcgactttgtagagtgcattttcacatttatcagtggtagtattccagtagtttccgtggcatgcagtctgagcttcctggtatatatcgtctgaaattagagccattccatgagcaaatggcacaagagcattaccatcaaaaacagtgtcgcaaacaccatttccgaccatgtagcccttgaagtttattgtaggcttcactccatcatgtaatcctttgacaacttcatgcgaaagagtaggaacataaaccccagcatacgactccccagctatgtaaaatggattgctcaggaactcagggtacagctacttcagaagaaaagtatgcgaatccgcggcggtcttgaggtccccggtgttataatccgaagtattcttggagtatgacagccccacaccagcaggggaatccaagtagatcacactggataccttggaccagctatagggattgagatgaagcttcggtaggctcttggctgaccctcctgactcgaaattgaatggtccgtgctcgtagacgaagccgtcgaagctggagcagccggggccgccgttgagccagagcacgagggggtccttcgccgggtcgcgctccgactccaccaggtagtagaacaggttccgcccgtgctgctcctccaccgtcacgtacccggcgtagtgcttcgacgggagggcgccgtcgaatcccgggacgctcttcacgaccgcgctcgccggcgcggcctcgcatactccgccgccgccgccgccgccgccgtaggcgaggaagacgaaaagggcgatggcaacggcgggcgaagcaagggagcggcggccgcgcctggccat

SEQ ID NO: 35979 - DNA, 705 bp, Oryza sativa
  Clone ID: PAT_MRT4530_39849C.1
tgtttttttttttttttatgagaaaaaaggattgacattttgatgttacagcacagtaagcttccacaaataatgatgaatgatctactgtttgcataaaagaacatacaacatggtgttggcaccaactattctgaaataaatgtggctttctaaattggtttgtagtttttttatattatctttgtatcaacctttatctgattcatggctgtatggatatgtatgcttcccattattggatgtcggattcacaagcatttacaatttagaaccagcaagccagcggctatagaaagccaatgattcttgtggtttgtattcaggaacagtgtgcccagcacccttaatggtagcaaaggtgaggccatgttcatatccttgggtgtacccagaaacttggccattcaggtgccacggtctccatgaatcaataactccgtagcccaaagatctggtccatgcttcagtcccggtataaggtacacacatatcatgatcaccactgtatatgaaagcacgataaccctggcctgtgaggttcttgtgataactgatcatacttccagcatcatggatgaaatccaacacgttggtgcatataagccacgagccaattgagctcactggttgggcatgaactgctgctctgacgtcatcgttgttcagccatgctgttgcaacttcatcactcatacaaggaac

SEQ ID NO: 35980 - DNA, 223 bp, Oryza sativa
  unsure (1)..(223): unsure at all n locations
  Clone ID: PAT_MRT4530_3984C.1
cncnctctctctcctncgcatcaccaccaacgacnacnacgagctncggtggccgccgggagacggcgccgcgngatccnggagatgccgccanttacngggcccaagtccggngacgntctcttnggcagngtngagcangtcaacgcggagtaattcacgctcacgtatggggncatnntgaggcagctnctnacggatctngaggaggtcgaggaggtca

SEQ ID NO: 35981 - DNA, 483 bp, Oryza sativa
  Clone ID: PAT_MRT4530_39850C.1
ctattggccctgcatacataatgagctgaaattttctgttgtctgaatgagactggtgatatttttctgtgtgtgagcttaggtatccagtgtgatctacttggattcccctgctggtgtggggctgtcatactccaagaatacttcggattataacaccggggacctcaagaccgccgcggattcgcatacttttcttctgaagtggtttcagctgtaccctgagttcctgagcaatccattttacatagctggggagtcgtatgctgaggtttatgttcctactctttcgcatgaagttgtcaaaggatcacatgatggagtgaagcctacaataaacttcaagggctacatggtcggaaatggtgtttgcgacactgtttatgatggtaatgctcttgtgccatttgctcatggaatggctctaatttcagacgatatataccaggaagctcagactgcatgccacggaaactactggaa

SEQ ID NO: 35982 - DNA, 582 bp, Oryza sativa
  Clone ID: PAT_MRT4530_39851C.1
atggcggaatcgctgcttctccccgtggtgtgcggggtgatcggcaaggcgaccgacgtgcttgtccagaaagtcacccgcatgtatggcgtcgacggcgaccgccctaagctagagcggcagctgctggcggacgccgagttgaagagcgagaccaaccccgccatcaagcgttggatgaaagacctcaacgccgccgccgacgaggccgatgacatgctcaacgagttccagtacgaggcgctgcgccgcgaggccatgagcctcgagtcactgggacacaaggtacgaagctgcatgaccccactcgagttccgttttaccatgagcaggaagcttgccaaagtgctcaagaacatcaacgagctggttgaagagatgaacatgtttggcctgttgctgcaagatgagccagtacatcaacttccttactggcagacgtactcagtgctgccatcaaatgaattagatgatatctttggcagagacgacgacaaggaggcggtggtgatcaaactgttgctcgatcagcgagatcagcacaagtgggagaacctcccatcgtggggatgggtggtttaa

SEQ ID NO: 35983 - DNA, 615 bp, Oryza sativa
  Clone ID: PAT_MRT4530_39852C.1
atgctgtggaagttcagcgggaggtggagcgcaggccacctgttcgacggaatgcatagccctggagaggcggcgcgcggcggcggcggaggcgaggatgacctcctcagcgccctcccggacgcgctgctgcaccacgtcatggagttcgccaagttcgcctaccgcttcttgctcgagcgggaggtgtccgcgccggtggacactctccgagtgctgtccagccccgtgtgctacgacaatggggaacgagaggattactccactcgggatgtcgaggcgtggatccgtgccgccatcaagcggagagcccgggtgatccagcttaccgaccatcaagacgacgaggtcttctctgacttcgaccatgtccccatcgtcacccgccacctcaaacacctgaagcttctgaagagcttgagcatggtcgagtgcaagatcgaggaggagctcaccgttgctgctcctaacctcgtgtcactgtgctgcatcaagccattccaccaagctcccttgttcgaggattcggggtccctcgcactggcgacgggcactatcgtgctcgatgattcattcttctgtggtggttttaagaccctatttagatgggactaa

SEQ ID NO: 35984 - DNA, 1826 bp, Oryza sativa
  Clone ID: PAT_MRT4530_39853C.1
ggcaacgaaagcaaaagagatggatacggcagcggctgtaggcaacaccaggcaactattcagactaataaaagaaaccggaattaagaagtcaattgttagtgagacaatctcggaaaaagacggaacccttatctgctctcagcccagacgtwtagaacgatgggcggaacactttaaggagcagttcagctggccttcggcatctgcacaactacccactattcccagaaaacctgaatggaacattgaagtaggtcccccgactctagctgaagttcaaaaggctataactaatctgaaacaaggaagagcaactagtccagatgaattggctccagaggtctttaaatatggtagtccaattttagcgactaggttgactattattttggctaaaatctgggagttggacgtaatctcatccgactggtcacattcactgattgtcccaatatataagaaggggtcaaaatcatcccgtgataatcatagagggattagtttgactaatatagtatctaaaatacttgcctcaataattatcaggcgcctaactaaaactcgtgaactgcaaacacgagaaaatcagtctggcttcagacctggtcgtggctgtatcgaccacatattcactattcgtcaggttttagagcacagacatgtttatcggcgtycgacaatgatagtttttcttaacttgaaatcagcatttgactctgtaggtcgagatgctctgtggcagtgtctgtcactgaaaggtgtacctcmagagtacataaaccttgtgaaggctctctactcgaacactaccagtcgagtgagagcttatggcgaactgtcatctgattttacaacctcaagtggtgtccgtcaaggctgtccactatccccatttttgtttaacttcattatagacctgttgctggaaataacactctcgtcgactgaattttcaggaattgatcttctaccaggaggttcacttatcgacttagaatacgcagatgacatagtcctgttttgtgaagacgctggtaaaatgcagagtcttctgttagtagtcagtaataatgccagaatgtttgggatgcgtttctccccatctaaatgtaaattgttactccaggactgggatgaactaaggatagggagtgaagtagtcgaacgcgtggacaacttcacttatcttggaagtctgatcagccctaatgggttggtgtctgacgaaatctcagcacggattcaaaaggctcatttagcttttgccaacttacgtcacctatggtgaagacgagatatccgtctatcaattagcgggcgagtatactgcgcagcacttcgttctgttctactttacgactgtgaaacatccatcaagagtagaagatactcgtaagttactagtatttgatcacagataccttaaaaatattgcttgcatctgctgggatcaccgggtgagtaatagtgaggttagacacagggtgttagggaatgatggtaaatcagttgatgaggtcatcaatcttcatcgactgagatggttgggccacgtgttacgtatgcctgaacaccgattaccacgacgcgctatgctgactactatacgggatggttgaaagaaaggtagaggcggctaaaccaaaacatggcatcagtgcttgaagtcaccaaattctagtgtgagccatattggtagatgcagactacctggttggtgtccgcgtgactatcgtaaccaatggttggagactctgtgtgacatggctcagaatctatcacaatggcgtaggtgtatacacactttgtcttcccttaaaccg

SEQ ID NO: 35985 - DNA, 799 bp, Oryza sativa
  unsure (1)..(799): unsure at all n locations
  Clone ID: PAT_MRT4530_39854C.1
gatggcatttgatgacttcacttcgggcgaacncgagctcggtacccgttttagaagatattgttaaaaaaattccagcaccagaaggcgatccagaagcacctttactttctttgtttattgattcttggtttgataattatttaagtgttgtctctttagtccgcgttaaaaatggatcaattaaaaaaggcgacaaaatcaaagtaatgactactggccaatcgtataatgttgaccgtttaggtattttcacaccaaaacaagtagatacgacagaatttaaaacaggtgaagtgggttgggttgtttgtgcaattaaagatattttaagtgcaccggtaggccatactttaacacatcaacaccattctgctacagaagttttacccgtatttaagaaagttgtaccccaagtttatgcaggttattccggatcgtttacatgatattgaacttttctggattgcttagggcaaattagccctaatgacgcttttttattttatgcaccaagaaatttcaccccgttaggcttttggtttccgtggggattcttacgtttattacatatggagatcatttcaagaacggttagaacgtgaatattgatctgatttaaattacccctggcccctacacgtaggtattgaggtattaccaacacaattggcgaaccgattaacgtattatggcccggcaaaattaaccgcccattatgtcattttgatgaaatttcgcgaacccaattgctgaatgttatattcttgctcccacaaggattattatggtattatat

SEQ ID NO: 35986 - DNA, 5460 bp, Oryza sativa
  Clone ID: PAT_MRT4530_39855C.1
atggacgagtcaggcagaggaacaggtgatgatcatggccgggagacgaaggatgctgcggcggcggcgtcgtcgtcgtcggggaagaaggtgccgctgttcagcttgttccggtacgccgaccgcctcgacgtgctgctgatggttgtcggcacggtgggcgcgctcggcaacggcatctcgcagcccctcatgacggtcctcttcggcaacgtcatcaactccttcggcgcgaacaccagcggcagcgtcctccgcagcgtgaccaaggttgtcctcaacttcatatatctgggaattggaacttcagtagcttcctttcttcaggtatcatgctggactatggcaggagaaaggcagtctgcccgcatccgttctttatacctgaaagccgttctgaggcaggatattacattcttcgacacagagatgacaactggtgaagcagtttctagaatgtctagtgataccctcctaattcaaggtgctcttggtgagaaggttgtgtccttcaatggtgagaagaaagcgatagcaatgtaccgtaattttataaagaagtcatacaaggctactattgaggaaggcattatcactggttttggcatgggctctgtcatgtgcgtcgtatttggcagctatggattagccttctggtatggtggaaagctaatcattgagaaaggttacacaggaggaaaaatcatgactatcttgtttgccgtgttgaccggtgcatcctcattaggcaatgcaacacctgcagttgctgcagttgtggaaggtcaatctgcagcatacaatttgttcaaaacaattgagaggaaaccagagatagattccgatgataacaatggcatggttttagaagatatgaatggcgatattgagctaaaggatgtgtactttcgttaccctgcaagaccagagcagttgatattggatggattgtcgttacaagtagcgagtggaacaacaatggctatagtcggagagagtggaagcggaaagtcaactgttatcagcctagtcgaaagattctacgatccacagtctggcgaagttttaatagatggaattagcatcaagaaactgagacttgattggataagagggaagatcggtcttgttagccaagagcctctgctttttatggcctccattaaagataacataatatatggtaaaaaagatgcaacgcttgaagagatcaagagagcagcggagcttgcaaatgcagctaacttcattgacaagttaccaaatggttatgatactttagttggccagcgcggtactcagctctctggaggacaaaaacagagaattgcaattgcaagagccatcctcaaagatccaaaaatccttttgctcgatgaagcaacaagtgcacttgatgtggagtctgagaggatagttcaggaggcactaaatagaatgatggtagaaagaaccacactcgttgtcgctcatcgtttgagcactgtgaggaatgttgattgcatcacagttcgtccgcaaaggaaaaatagttggaacaaggtcctccatgatgcactggtgaagggatcccgatgggagcttactcccagctaattaggctacaagagactcatcgtggatgaaaggcataaactaccagattccagatcaaaaagtactagtttgtcattcagacgatcaaggaactaaagattttctcagcaagagcaacagtggggcacttggtacaaggctctcagtcgatgcgttgaatgtccgccgtttagtaggagataacctggcccttatagtccaggctgtagctacactaatcactggctttgccatagcttttgcggcagattggaggcttgcactgatcatcacttgtgtaattcctttagtgggtgcacagggctatgctcaagttaagttcttgaaggggttcagtgaagaatctaagaccatagcacttgttggagaaagcggtagtgggaagtccacgataattgctttattagagcgtttctatgatcctgattctggtaatatctcactagatggagttgaaattagaagcttaaaagtcagctggttgagggatcagatggggcttgtaggccaggagccagtgcttctcaacgacacaatccgtgccaacataacatacggggaaacacagtgtaggttacagaagaagagatcactgctgtggccaaggcagcaaacgcccatgagttcgtatcaagcctgccacaaggataccacacagtggtatgttagaaaggggttcaactatctggtgggccaaaacagaaggttgcaattgccagggccatcctaaaggaccctaagatactgctacttgatgaggcacaccgtgctctagatgcagaatccagaacgtgttgttcaagatgcattggatcgagtcatggtcaacaggactaccattgtagtggcacaccgcctctccacaatcaaaggggctgatatgattgcagtcctcaaggaaggaaaaattgcagaaaaaggaaagcctgaagcactattgcggatcacaggatggtgccatatgcttcacttgacgccgagctcgccgcagcagaagagcgcaggcgagcaacggctcagaccgctgcagcagcagcgagggcggccagactggcggcagcggagttggcagcagccagggcggaggcggaggcggaggcggcggaagatgcggcacgtgcggcggaggtagaggttgagaccttgcgcagcagcatcaacggctccatcgccggcgacatcaccgccgacagggagcttgaggagctggcaagaggaagggcacgggagcgagcagagcggtgggcagcagcccacctccacggcggcggcggcggcccaagggaccgcgcgcccgccgacgggaacccagacgggcgcaggcgtgccggcggcagcccggagctcgcacgcggccctcgcaggcagcacggctctctctcccctgaccggcgccatggtcaccacggtgtccagacggtggtcagggactttggtcccggcggtgggtggcctaccctcaccaaaaccaactacatcgagtgggccgcggtgatgagggtgaggctccaggtgcggcacatgtgggaggcagtccggtacggtgacgtcaactacgacgaggatcggcgggcactggatgccctcatcgctgcagtcccgcccgagatgcagttctcgctttcccagaagcggactgccaaggaggcctgggacgccatcgctgcggcacgcatcggcagcgaccgcgcccgcaagtccacactgcaggcactccgcaaggagtgggagaacctggccttcaagccaggtgaggatgttgatgactttgctctccgtctcaacactctcttgcagaaaatggtgcagtacggcgacgacacctacgacgaggagagagctgtcgagaagctcttccgctgcgtccctgagaagtacagacagatcgctcgctcgatcgaatctctgctggacctctccacgatgttgatcgaggaggcgttaggtcgcctcaaggtcgtcgatggtgatgagccacagcctttctcggggcccatcaccatcggcgggaagctccatctcactagggagcagtgggaggcctctcagggtgacgggaggaagggggagtcatcttccccgacaggcggccgtaagccgcgcaaggcgcggggaggtgtccagctacggtgggcgcgaagacgtgccgagggtggcgcccgcagaggcgcccagggcgttgccaccggcaaccacaagccggcacgagacgacgcctgccgcaactgtggcaagcttggccattgggccaaagactgtcgacagccacgacgcggccaggcccacgtcgcacgggtggaggaggaagagccggctctgctcctggctcacgcaagcatcgagctacctccagcggcaccggccgcagcggctttcctccaccttgatgagccgaaggtactcgtctccctctgcaacggctccagcaacgacaaggctgatgggtggtacctcgacaccggcgccacccatcacatgaccggccgacgggagttcttcaccgagttcgactccagcgtccgaggctccgtcaagttcggggacgcctccggcgtggagatcaagggtgttggctccgtcaccttcaccgccaagtccggtgagcacaggctgctcaccggagtctactacatccccgcgttgaggaattctatcatcagcgtgggacagctggatgagaacggctcacgcgtgttggtcgaggacggactcatgaggatttgggatcgccgtcgtcgccttcttgccaagtggcacgagcgcttcgggcacctccacttcgaggccctgaagcagctcagtgccaaggagatggtgcgaggcatgccgtgccttgaccacgtggagcagctctgcgacgtctgcgtggtgacgaagcagcggcggctcccctttccccagcagatgagcttccgagccaaggagcggctcgagctcgtgcacggggacttgtgtggcccagtgacaccggccacaccaggaggacgacgttacttcctgctgctcgtcgacgacctctcccgctacatgtgggtgacggtcctcggcagcaagggagaggctgcggacgccatcaggcatgcacaggctgctgcagaggcggagtgcggccgcaagctgcgcgtgctgcgcaccgacaacggcggcgaattcacagcggctgaattcgcgtcgtactgcgctgatgagggcattcagcgccactacaccacgccgtacagcccgcagcagaacggcgtcgtcgagcggcgcaaccagacggttgtggggatggctcgggccctcctcaagcagagggggatgccggccatcttctggggggaggcggtggtgacggcaacggcaacctcaacaatggcgtcggatggtcagggacaggggcggatgtggctaggggcagatgcggcggcgtgggaaggcagagaggagtgcaagcggcggcgccggatgcagccgggggtggaggtgatggtgtcggatgtggcggctcaaccgggggagccggatgaggcgggaaggagcgacgctggaatactcgccatggggtttggccagcgggatagcttggtcagcccgttagagaggctgttggaggacattttttttcatgtggttgctataatttggtttggagatgctctaacaattggattatatcacggtagatattacaagtttttagctctgaacattgagctaaaagagctcgtgctagcggcggcggtcgtggcgggcgacgacgcggactgcagcggcggtcgcggcgggcgacggtgtggccgcggacggcggcggggctcgcggacgacggcggaggtcgcggtcagcgacgacacggatggcagcgacggtcgtggcgggtga

SEQ ID NO: 35987 - DNA, 234 bp, Oryza sativa
  Clone ID: PAT_MRT4530_39856C.1
atggtgatggtgccctttccacgcctagatccagtgtccttcctcaagctcattgttcctccagtgtgtgcatcgagctgtgctgcagttctttgccatgggagacacatcgacgcgtcgtggaaaggggtggaggggctcagccatagcgataacgggaggcaaggtggagcgaacggcgattgtgatgacagagatggggattcgtcggtatctacggggcaccagccctag

SEQ ID NO: 35988 - DNA, 361 bp, Oryza sativa
  Clone ID: PAT_MRT4530_39857C.1
caaaagttagtagttgggaatattcatgtcctttttaatccaaagaggggagatgtaaaactgggccagatccgcatgctactggagaaggcaaatgctcttgctgaaaaatggggtggaattcctatcgtgcttgctggtgatttcaacagcacacctgatagtgccatctacaagttcttgtcaacaatgaagcttgacatttctttgcatgatagaaggcagttgtctggacttgatagctctgagtttgctttatatgatctttgtagttcactgaagtaccaatggagcggcgaagaagtaagaaatgcaactgggtcttcaaatgtcatggttgctaaacatccattgaatattt

SEQ ID NO: 35989 - DNA, 1023 bp, Oryza sativa
  Clone ID: PAT_MRT4530_39858C.1
gcactccaaaaccgtgacgctctgtccaaaggccagagagctatagctagcccagattctccagtgagattgtcagccggtcagcaataaaggcagcaaggcctagccactccccgcgcgcgcgccgaagattctcagcaagattctgagccgtcgtcggccgttcgtccgtccaaggaaaggagagccatggtgggaacctcctcctggtcgtcgtcctcgtcgtcgtcgctcggctccctcgacgacgacatcatcgtcgcgtgcgtcgtcaaggcagcggacgccgccgtcgagggggcgtgcgtcaagttcctctgcagctacggcgggaggatcctaccacgccacgccgacggcgggctgcgctacgtcggcggcgacaaccgcgtcgtctccgtcgaccgctccctccctttccacgagttgcaacggaagctgagggagatgtgcgggtgggaggcggtgtgcctgcggtgccagctcccgacggaggacctggacgcgctcgtctccgtcaccggcgacgacgacctcgccaacctgctggaggagtacgacgcggccagccgggaccgcctccagccgctcaagatccgggcgttcctgttcccaaggacgacagcgacaacgaccgcgccgctatcgcgcagcccgtcgcccaccgctgcgtccaggacggcaccccgtgcccactaccagcatcagactggcagcgcgccgtcgtgcgcatcccggtgggcggcgcgtcagatgtcgttgcctcctgctcgcgttccgcaccagcagcagcattacaaccggcacggcggcgacgcgcggccgcaacggtacctagtccagagtgccagcagccgctggtaatagcgatcagattgcgaaccggccgcggtctagtatctgcgtgccttacacgtactcggtactcgcgtaaccctgcgctgtacgtactaatgaaggtgtttaattagcatgtactgttgtgctgggtcttttaaagcaaaaaaatggacgaacttgatc

SEQ ID NO: 35990 - DNA, 694 bp, Oryza sativa
  Clone ID: PAT_MRT4530_39859C.1
aaggccagagagctatagctagccaagattctccagtgagattctcagctgtccccggccgttcgtccgtccaaggaaggagagccatggtgggaacctcctcctggtcatcgtcctcgacgtgcacgtcgtcgctcggctctctcgacgacgacgtcgtcgtcgcgtgcgtcgtcaaggcagcggacgccgcagccgaggggacgttcgtcaagttcctctgcagctacggcgggaggatcctccctcgccacgccgacggcgcgttgcgctacgtcggcggcgacaaccgcgtcgtctccgtcgaccgctccctccctttccacgagttgcaacggaagctgagggagatgtgcgggtgggaggcggtgtgcctgcggtgccagctcccgacggaggacctggacgcgctcgtctccgtcaccggcgacgacgacctcgccaacctgctggaggagtacgacgcggccagccgggaccgcctccagccgctcaagatccgggcgttcctgttcccaaggacgacgacaacgacaccgccgccgccgtccaggacggtaccccatgccctgtaccaccgtcagactggcagcgcgccgtcgtgcgcatcccggtgggcggcgcatcagatgtcgtctcctcccgctcgtgttctgcaccagcagcagcatcacaaccggcacagcggcgaggc

SEQ ID NO: 35991 - DNA, 186 bp, Oryza sativa
  Clone ID: PAT_MRT4530_3985C.1
aagcttcgggtaaaccaacggtcgtatcctctaggggccttgtccctgttcaagaagaaccaaagacacaaaccgcacaacctgttttagaaaggaagagtgatctacctgtatatcaaacaagaaaagaaaaagaagcgcaagccctaaaagaagcgcaagcccaaaaggaaaaaaaaaaagctt

SEQ ID NO: 35992 - DNA, 327 bp, Oryza sativa
  Clone ID: PAT_MRT4530_39860C.1
tcagccgatggcaccagcatcggctcccgcacctactgtaccaccttcggctccaggccaattggtcaatccccgattgtccattaaggcaacaggttgtccagccgattcaacagcaaggttcaatgaattcatcggcagggtttgcaacacctggtgggcagcctgtgcaacatgcagggggcaatttgaattatcaatatcagccaccatcacctcatgttcaataccagcaagcaggatcggctcagccccaatttgttcttcaatacaaccaattcgagccgatgccacaacaacctcaagggacacctcaatagtggccat

SEQ ID NO: 35993 - DNA, 2300 bp, Oryza sativa
  Clone ID: PAT_MRT4530_39861C.1
gcgccgtccccgtgcccgcccgccccacgcggcccgccggcatggctggcccccgccgcgccgccccgctcgcccggccgcgcctctccgcggggcgggtggcgctcgccgggccgatggccgcgcttctgggcatcctcctcgtggccttcctcgccgccgccgtccctttcgcgctccgcctgctccactccttcctgtgggtcccgcgccgcctggagcgccggttccgccggcagggcatccggggcccgccgcgccgcccgctctccggcaacgccgccggctaccgcgacctgctcgccgccgcccagtccgcgccgctcgcgtccttccatcacgccgtcgtggcccgcgtcgcgccgcactaccgcgagtggcccgagcggtacggccgcccgttcgtgttctggctcgggccccgcccgcggctggtggtctccgacccggaggtcgtgaaggccgtgctgaccgaccccacggggaccttcgataaggctggctccggcggcggcaacccgctcgcccggcagctttttggcgagggtttggtggggctcaccggggagaagtgggcgcgccaccgtcgcgtgatcgcgccggcgttcaacatggagaggatcaagatcatgttgggtacttcccgctctcaaaacaaacgacttgaaattattgtaactctaaaacatatgtatttcttagatggttggatttcagaaataacagctatcacctcatccatgctggataaatgggaagttcaagatgaagcacgcgctgagtttgagatcgatgtacataaagaatttcacactttgattgcagatgtcatttccagtgtggcatttggaagtagctatgaggaaggaaagcgcgttttcgaattgcaggaggaacagctaaaacttgcaattcttgcaatgacgacagtctatattcctggcttcaggtttgtgccaacaaagaagaaccgacgacggcatatgctaaaccaggaagtcaggaattccttgcgcaaattgattgagatcaatggaaggaagtgtgaggattcgaacaatctgcttgggatgatgttatcggccagtaaacttggtagtgaattcagaatgggaattgaagaaataattgatgagtgcaagacattttactttaccgggaaagaaacaacagctaacttattgacatgggcaactcttctcctagctttacatcaagagtggcaaaacaaagctcgcgatgaagtccttcaagcttgtggcaagtctgagcacccaaacgcggaaaacctgagtaatctcaaaattgtgagtccaagttttgtatactttggttttcatctcttttataattttattgaatacaggcatacagcaagtgacacttttttaatgtttgaatgcaatcaggtaaatatggtgctaaaagaaaccctcaggttgtatcctcctgctatgtttctcaataggatggtcaacagggatgtcaagctgggcaaactcgacattccagctggcacgcagctccattttcccattcttgacattcaccatgatgttaacatatggggcaccaatgcagatgagtttgatccatcaaggtttgcagagggcaagagctatcaccttggtgcatactttccctttgggattggccctactatctgtgtcggccagaatcttacgatggttgaagaaaaggtggcccttgcaatgatccttcagcgtttcgcgcttgttgtctcgcgtcctatgttcatgcgccaatgcatggagtcacactccaaccccagtacggtgctcaagttcttgcccataagatttgagacttcgatggatttgtgtgtggatttctgggtctttgcagtaaatatggtgaatgcagcagacgtacatcgtgtattatatatctttgtgaacaattttggaaggatgtttccagctcgtctgaactttctatcaaaagtggaatttgctggagccatgggagcattttccatgtacaaacaactcttaatacctgcagaaatgtacagaaaataaggtaagttattggtgaaacgatttttggaaaggaatgtttccccaagctcggttctgaaactttcttatcaaggaagttggaaatctgctgagaagccatgggagcaattttccgtgtacaaacaacactatagtacctgcagaaaatgtacagaaaataaaatggtttgcaactcttcatgtttttgccatgtacaaataggtcttacttgctgaaatgtagtaatacacaaaataaaatggttcggaattgttagt

SEQ ID NO: 35994 - DNA, 2722 bp, Oryza sativa
  unsure (1)..(2722): unsure at all n locations
  Clone ID: PAT_MRT4530_39862C.1
aaccgcctccgatcccctctcctcactccttctcggcggctgcggcggcggcggcggcgaggcgtctccgacgaaaaccctagcacgtatctcttcccctctttcccatgcttgttctgccttttgggtgttcaggatagaccacagagctacgcgggttcagcaagaaggggagcgggtatgattttagcaagtatgtcgagagggagttgatggagagctcgatcgcggcaacagcattaagaattttcctggagctccggtggaggaggatgaggagggggatggagtgtacggcctggaggaggatgatgattttgaggagttccggctgccgatgagccaccgtccgacggagaacctcgacacgcagctcacctcctccaacgtcggctccagaagatgggttggaagggcaaaagggttcggcaagcaaggttttacttcctcttcactgtcatcttgcttgctccttctccatacagttactcgttgcatctcgtaacactccctaaaaacattatcatgtcttatctaaactttatagtagtacggantatgtcgcagtcaggcagcgaaaactagacacgaagagtgtacatatctatcctatagagggaagatgccttcataaaatccttctgtagggaatgcgtgctatatcgtcccaatttgatcccaagaaaaggaatttgcagccaatggatcggaagtacagcagagatttaggtagttttggaagggaccggatacttccacagaaatcaaaatataactccttaagtgcggtgaggttctccaagttgttgggtaagctgttccaatggcaggaagtaaacccaaggtaagctagtgaagtcaagtgctctaggatccactctcccctcagttccaccgagtgttcgagcgcaagccatttcagtgatggatatgcccctcttgacaaaagcttgggtacaagggacatgtcatcgacggttagccgaggaactgcgtgtgctttgccggctactttcaagtccataaggctgggacacttgatgatggtaaggtgctccaggctatcaagatggttcaggccttccaagcgaactaattgcttacagccaccgatgtagagatccctaagcctcactagagacctcattgtctcagaaggtatctctgtgaaagagtcaatttgacttagtttcaggctacccaggacagtgcatcctctcaatgaatcgcgcaggacagtgtcttcgacagtgcatcctgtcaagtggagacattctagggatgcaggaaacaacctttggtcatccatggatgtcacctccaaacgcctgcagccgctgatttccaggctcttcagcatgcctggaagtcttgggagccttgtcagattgggaagaacattgagcctaagcttgcgaaggtcagtgaagagcttggcgatctcagggagagtttccaggttgtaacactccctgagttcgaggaattgcaggttactgacgcccccatgttcccttgacagccaacttggtgttgtgcgacccaggtagtggcagatgttgaggcatgtaagttgctctggtggttggaggccgtcgagtatctccacttggaggctgtagatccttgtcagcttgaagtgacttagctcttgcagttgctttaaatcctccacgtaaggaattcccaaatcaacataaggagatgaaatagaccgcaagttaatcagctggctgctcatccttttgacattggaacagtttaaatctaaataatatgaaagagggaactctaggttctgcaaatggtagagtttgccaaattctgttggcaacttcacctgtcttatatgggatcccaaaatgctgagaaaacgtaaatgctttaagccacaggctgactccgggacaatcactctatcttgatccagatatgtttgcaccacacgtaacttcttcaattctttcagcattcgctcaagaacttgttctgttatccccctcgatccatcagcgctaatgattaatgtccggagtttcttcattttgtagatatcatgtttatacttcattgcattgctggaagtaataaacagatggcggacatcggaacggaacacttccacctcatcccccagaactcgtaagcaatcatttccggcaaccatctctgccaattcgtgcagcatatcaggtatagtaaaccactcatcgtcactgtcagcaagctttccttctgattttataaatgaccatgactttaggtcttcaaagtatttttcacctatatcttccattttctgtccattgctagtcttgataaacccttcagccatccacagcttaaccaatgcattgcgtttgaaccggtagttccgtggaaacatactacagtaagcaaagcatcgccggacctgttcgttaagtttctggtagctccgccactgttcttgtatgatgtcagtacacggtacttcattatctctaattttttgccaagagctggcatctaaatttttgcatagcctgtctcctactcgccttgctgcaaccggtaatcttcttagcttatttgcgatccctctgccaatcgaatgtagtttttgaagtttttggctatcaagtactctcacaccatcaagtgcataatgcatgaatagatcaaggaaatcattatcatccatctcagaaatttcaacggggctcttggcacctagggacat

SEQ ID NO: 35995 - DNA, 1551 bp, Oryza sativa
  unsure (1)..(1551): unsure at all n locations
  Clone ID: PAT_MRT4530_39863C.1
cttatagggcaaattgggtacncgcccccccctctttttttttttttttttttttgctgatatgaaccctattattgactcaaagtcacagttcacttggaaaatattctcaacagcaatcctcacaaagtctcaattctttctacattacatctggatggggatgtcatccttttctttcttttttcactgtaatcaactacaacagaatttaaccaataaataataagaaaagagagtaaaatatcatatcattggtccattgtaaactgaattgcattctccagaacacaaattttcggtgttacaaagcacataggcaggtggccgtggctcctatcgcagtatggtgtgttgacagtggacgagctatattaatcttctgctgtggaatggcccagagctggggcttccgtgtctgctgcatggtctgcagccaacctttcctcaagaaccctttcgccacgctcccttcttctcgatgcctttgcaggatctgagactgggagggccagttcagaaggtctagaccttgcacacagcatccgatcaaagaggttagcaacagggtctgtgactggccgcatggcatccgggaacaagctggggaaggagaagtcatcacttgaatcacccttaagccctgtcagtgggttcctctggaagtatctcaggtaaatccagctgacatacatccccgatagcagagttggaaggaagttaatggaatcaggtacaatgaaggccatgatagttgagaagcatagcacgaagaatggcatccacttagcctttattttccagaaaaagcacatggggagctcaaggtttggtaaaagttgtttcaggccaacaagaaagccagcaagggcaccatggaaaccagaaagtggtgtaacaaggaagctctcctttccagtgacatagtagagtgcaacagcaaagcagaatgcaaggacaccgcagatggagttgaccaagatgataaacttcaagaattctttgcggccccacactggttcgatatccttcccacagaagagaagaccaagggaactgccgatagcccctggaagaacttgttcgatgtagccagctgtgaagacagtccatacaaatggaatagtcttggcggggatgatggcgaggtagtcgagggaggaggggaggagctggagcagcacatatccgccgacgaggacgacgacgaggcccttgcaggtgcgggtgaactccttgccgggaaccacggcgggaggagctccggcggcggcaggctcagctccatggggctcggcgacggggtcctgcagcgcctggctctccatcatcacgaacctcctctcctccctcctcagatctcaacccccgtgtacctgctcctccctttactagaaggaggaggaagtgggtacgtgggggcgggcacgttggagagggcgcgcgagaagggagaagcaggcagagatcgagcaggaggtctccgttcgtccgcccgtctccctctcccgaccgagcacccacgagccccggtcgtgccgattcctgcag

SEQ ID NO: 35996 - DNA, 620 bp, Oryza sativa
  Clone ID: PAT_MRT4530_39864C.1
atgaccctagcgcccaagccggtggaccccacgaaaatttatttcctcggcttttcgttccagccctcacctcctctcctcgatggcatcgagtactacttctcctctccatcctcgagtcgagtactactccgccactccaccttctccctcgatgcgacgccgacgggaagccgcggcgagaaggtgtccccggcggcggtggctggcgcgccggcgggaggcgtcctcggcggtggtggctggcgcggcgaggaggaagcgggcccgggagaagggcggaagcgggcggcgtccccggtggccggcgccggatctcctccctctggcgccgacagccgtggttgccgactcgcgcggtggcggtggcggtggctggcccggcggcagaagacgtccccagcgggagcgactggcacggtgaggaggaagtgggcgcgggagaaggatggaagcgggcggcgtccccggtggccagcgtcggatctcctcccttcggcgccggcagccgcggttgccggcccgggcggtggcggtggctggcctggcagcgggagacgtccccggcgggagcggttggcgcggcggcttgatctgatgatggattggctccaactccg

SEQ ID NO: 35997 - DNA, 663 bp, Oryza sativa
  Clone ID: PAT_MRT4530_39865C.1
aggaattccttcacatctattctaccatcctctatgcagctggcgcaacgacaacgttttggtaaactacctatccactacattgaaaggccctgcctgctcatggctcatgcatcttcccaaatcttcgattggatcatgggcaaagctctatcaattcgtggccaattttgccaatttcaccaatttccagggcacatacaagaggcatccaaatcgaggatgaccaccatgcaacaagacagagaaacggtgaagctcttagggacttcatacaacgctttaatgagtgccatagcactattcccaaaatcaccaaagccttcatcaacacggaagagttatcatcactcaaatatggagtccaagatcgttataccatccaagagaacatggaagaaaacttcagcaatgaagttgttcaaaatcactgataactcatgcagacgaggttgactaacaaaactaaaaggaagatgtctgacgagaagttactcgccaagaaagaagaatctggaactagaaagacgctagaacaatccagaaagcggaacaaatagcacaagccaaaaggagaggtcctcgttgtacagcgagaaccacaatattttctaactccgcgagatcctgacccatcttcttctgtaattcttcaagtttcaa

SEQ ID NO: 35998 - DNA, 1878 bp, Oryza sativa
  Clone ID: PAT_MRT4530_39866C.1
atggcggcgacgatgaacaagacgccggcaaccaccttcctgctgataccggcggcggcgtcgctggttctcctcctcgcggcggccgcgtcggtggaggcgtcggcgttcgactacgccggcgcgttcgacaagtgcctcctgttcttcgaggcgcagcgctccggcaagctccccgacgaccgcctcgtccggtggcgcggcgactccgccctcaccgacggcttctcccagggggtggatttggtgggcgggtactacgactccggcgaccacgtgaagttcgggctcccgatggcgtacgcggtgacgatgctgtcgtggggggtggtcgagttcgagaaggagatggtcgacggcaacaagctccaccgcgtcctcgacgccatccgctggggcaccaactacttcgtcaaggcccacacccagcacaacgccctctgggtccaggtgggtgacggcgacagcgaccacctgtgctgggagcgcgccgaggacatgtcgacgccgcgcacggcgttcaagatcgacatcaacaaccccgggtcggaggtcgccggcgagaccgccgccgctctcgccgccgccgccaaggccttcaagccctacgaccgcatgtactccgacctcctcctcctccactccaagcagctgttcacgttcgcggacacgttcaggggcaagtacgacgactcgctgcagagcgccaagaagttctacccgtcggcgtccggctaccaggacgagctgctgtgggcggcggcgtggctgtacgaggcgaccggcgacgagcagtacctccgctacgtgtcccagaacgcggaggcgttcggcggcaccggctgggccgtcaccgagttctcctgggacaacaagtacgccggcctccaggtcctcctctccaaggtcctcttcgagcagggcggcagcgccgccggctacgccgacacgctgaagcagtatcaggccaaggccgagttcttcctctgcgcctgcctccagaagaacaacggccacaacgtcaagatgacccctggtggtctcatgtacgtgagcgactggagcaacatgcagtacgtgagctcgtcggcgttcctcctcaccgtctacgccgactacctcgccgagtcgcggggaacgctcaggtgcccggacggcgaggtgaagccggcggagatcctcctgttcgcgaggtcgcaggtcgactacgtcctcggcaagaaccccaaggggatgagctacatggtcggatacggcagctactacccgacgcacgtccaccaccgcggcgcgtccatcccgtccatctacgccatgaacgccaccgtcgggtgcatggaaggcttcgacaagtactacaacagcaagaacgccgaccccaacgtcctccacggcgccctcgtcggcggccccgacgccaacgacgcctacgacgacgaccgctgcaactaccagcacgccgagcccaccctcgccggcaacgcccccatgtccggcgtcttcgcccgcctcgccgcctcgcccgccgataacacgccggagtacacgccggcgccaaatgccccctcgccatcaaatggtgggtcgccgttggagttcgtgcacacggtgacgaacacgtggaaggcaaacggcgtggactactaccggcacgtggtgacggcgaagaacacgtgcggccacgccatcacctacctgaagctgcagatcaaggagctctccggggagatctacggcgtctcccgcacgaacgccaaggacatgtacgagttcccgtcgtggatgacacggctcgacgccggcgcgcagctcaccatcgtctacatccagggcggccccgccgccaagatcgccgtcgtcgagtacaagacggcctga

SEQ ID NO: 35999 - DNA, 398 bp, Oryza sativa
  Clone ID: PAT_MRT4530_39867C.1
aaagggctaatatgagtagccaaagttactaataaacataattaatacaacatcaaatgacagcacctttgtcctgaaaagtatcctcactctaatcaactatgccaaatttagagaagggttttgaggggcggcgaaaaaggaaaaaaaaattaccggcccaggaaggatgcacaaagacctcttagttgaaataaacaatttaataacgagggccataggctaaatcaaatttttgttaagtcgggaaaagggaaatgcaggacttttccggggttgtattcgggatggggatccaaaatgaaacttagggggggtcatgccagggacatgggctctatggattgttacttttttaactcagtggttgaatggcaaaatggtttttttaacttgga

SEQ ID NO: 36000 - DNA, 2335 bp, Oryza sativa
  Clone ID: PAT_MRT4530_39868C.1
tttttttatttattttttttttttttattagttaaaagcccctttgctggagcaatatgtttttcgctgtcaaatttgtacaacctaaaatgaagtctactagtggtggctttcagtcatctgcaatcactctcacacacacacacatcaggatttttttttctcacctccaggttttcaagctaaaatctgccttgtcatctcttcaacaaactatgctttgcatcgcatcatccgcacatcagaacgatacaatggagaagctagcttaacccccataaactgggcatgaaaaaaattctgacaatagaacagaacagcacaaagatcattggcaatggcagtaagaatggcaatggctctcctgcgtcgaagacgacgacgacgacgacggtctgcaggggctcgtcggagtccgaaccaccggcaggccacaggctcgccggagctcgtcataccggcggagatcgaaatcccgggcgtgcatcaaccgcttctgcttcgccgcaaaccggctctcgaagaagccctcgaaggagggctccttcttggtccggaggaagaaggtgtagccggccatgaagtacatggaggtcacatagaagcagatgggttccatgacatcccatgagagctcccagaatgtgagcctcatgaagccgggagtctggacgacgaggtatgcccgagcctgccaaagctaaaaaagattttcccaaaaacatctatgccatgcccaccaccaccacttccatggggtaaactgccaaattgtctgactaaccgtacttgcatggaacaaaacaaacagtaaatagtacaaattatgctgcctacgaatgctgtgacgggcttgaggaagacggtcatgccgaggacgatgacggatccggactcgtcgagcgcgcgcgcgacggaggcgccggactccgcgccggcggcgtcgcagcagagccggaggaactcggcgtacggcacggtgcccgcgcccgacgcccgcagcctcgcccgcgccgcctccatctgcgtcgcccgcagcaccttcctcgcctcctccaccgtcagccccgccaccgccgacgccgacgcccgctcctccctcgccaccgtcggatgcgtctgcggcggcgccggggggacgaggccgtcgaggttgatgcgcgggaacgcggcgccgaggtcgcggatccggtcggcgagggggatgaacccgcgtcgctcgggcggcaccaccggcaccgccgcgggacggaacgccgtctgctcctgcatgaagcggcggagcccgcacgccgccggcggcgcccgcgccgccctcctcatcagcgccgccgccattgcaacctctctcttcctctctcctcacggagctcagacatcgagggaagctgcacaaacaagaattggggggaagaagaaatcgaaacgcacccggttcacgcatgatgtcgtaactaactttcagttttggccctcaaatttgttgggaggtatcacaaagttaaaaggtactacatcaatacttcaccaccactggcatgtgatggggaatgcaatggcatcttagatactgaatcctctgccatgcaattcaaacatcatttttatactatcagttgtgcagcccatgccctgtaagagagaccaaatatgtctccaattgttgtcctcatgacatggcatttaaattgcatggtagaaaatccattagaatactaactatgaacattccccgtgatgatataatatcagggaacataaaagtttgacctgcagcccggggccatccaaggcaatgggttgcgctctcggaatcggtatggccttctagatggctttgacaacctgcaatggtgaatagaaagaccaaaaaaacatttcgaaaatttacttggttgctcttcttctcaacagagaaccatcaaagaaagagcgatgttcgcaagagaagattacagccatgaaatgcgaatcagttttcaaatgattaaatttccaaaaggaagtgcaagatataattgtgtttccaacacattgcaaatgtgttttcaaaagtaaaagaattatttgatactgaaagaaaaaccaatattgtgtatattgttaggacaataatgttaaattgcttaaagaaaagaatccccacgccgagccaagaggatcagtctgtgcaggataagattgtttagttggacaaggaacatatgccgcaaaagcctcaacctctatttttatacttatatgaacagcaaaaaagactgtaaaataagaacagtttacttccaagactaaaacatgcaaaaaagattttcccacgcgtccgcccacgcgtccg

SEQ ID NO: 36001 - DNA, 780 bp, Oryza sativa
  Clone ID: PAT_MRT4530_39869C.1
atgagcaccgctcccaccggcgatccgccggtccgcgtcgccgtcgctagcggcggtggcgggatggggttggggaaggagctgcgggagccgccgtcggacggcgtctccagcctccggttctccaagcacagcgatcgcctgctcgtctcctcctgggacaagacggtgcggctctacgacgcggaggccaatgtgcccaggggggtgttcatgcacgcggcgtccgtcctgggttgctgctttcacgacgactcctcggggttcagtgccagcgccgacaacaccgtgcggagatcactcatgttggccttcagttctggtgggaattatttcttggtacgccatgatgccgcagttagttgtgtcgagtactcctactctactgtatcaggatataacttggttgtcgcaacagcaggaaggcatgtgaatgtttatgatttgcgcagtatgtctaggcctgagcaacagagggagtctccactaagacacggcacatttgccactggtggatgtgatagatttgtgaacctttgggatggcgctaacagaaggaaactgtttcaatttcccagatacccatccagcatcgctgctctgtctttcagtagggatggccgtctgcttgctgttgcatccagttacacttacgaggagggagacataccccatccgcctgacgcaatctttatccgtgatgtcaacgaagtacaagtaaagcccaggcccaagatcacattcactgatccgccatcagtagcgtccccatcagtttga

SEQ ID NO: 36002 - DNA, 907 bp, Oryza sativa
  Clone ID: PAT_MRT4530_3986C.1
tagacaagtagctatctatctctatctagcaagctagctaggttgcttgcattctctcctctctctcttcctgtgtcaccaatggcgccggcggcgtcctccaagtccaacccaagggtgttccttgacatcgccatcggcggcgagtgggttggccgcgtggtgatcgagctgctcgccgacaaggtgcccgacacggcggagaacttccggcggctgtgcaccggcgagcgcgccgggcgctccggcaagagcaggctccactacaaggggtcggcgttccaccgcgtggtgcccgggttcatgtgccagggcggcgacatcacggccgggaacggcaccggcggcgagtcggcgctggacggcgccgcgaggcacttccccgacgaggggttcgcggtgaagcacgacgggcccggggtggtgtccatggcgaacgccgggcccaacaccaacggctcccagttcttcatcaccgtcgacaaggcgccgtggctggacggccgccacgtcgcgttcggccgcgtcgtcgccgggatggacgccgtccgcgccatcgacaggacgggaacctggagcggcaagacggtgaagcccgtcgtcatcaccgactgcggcgtgctctagaaatacatatacatacgtatatatgccagtgtataccgtatacgtacgtgtaccggtgtacgtacgtatgctgtacggttcggtatacattaaaattgtgtctactctagctactgtgtgatgagcgtatgagagtgttagctgatgtaattttttgaggttgcgacatggtggttacacaactatcgaggacgttagctgcctcactgatggtgacttaatctagctacctgataataaaattgagtgattgagcacataaaaaaaaaaaaaaaaaaaa

SEQ ID NO: 36003 - DNA, 642 bp, Oryza sativa
  Clone ID: PAT_MRT4530_39870C.1
gcacgaggggaaggcctctcctcctcgtggccatggccatggaagcctccatgtccaggacagtgtccatgctcttctccgccaggaggtgcatcgtcgccagcgccgccaaggacatcgagatagcacaaggaggaagaaggagaagaagcaacgatgtgaagcagcagcgagggtcacacggccagctcgccgtggccgcggcgacgacggcggcggccatgaccggccaatgccacgctgctgctgctgctgctgcaccggagcgtcagtggcaggaggtggcggagtgggtgtgcagggcggtggcggtggtaggggagctggacccagcgacggcgaaggcggcgatcggggtggccgggccggcgctgtcggcgttcgggttcctgttcatcgcccggatcgtgatgtcgtggtacccgaggctccccgtgagggagttcccctacgtggtggcgtacgcgccgacggagccgctcctcgccgtgacgaggaaggtgatcccgccgctcggcggcgtcgacgtcacgccggtggtgtggttcggcctcgtcagcttcgccagcgagatcctcgtcggcccacagggattgctcgtgctcctctctcagcaaaagccttagcaaactctgtttcgtt

SEQ ID NO: 36004 - DNA, 317 bp, Oryza sativa
  Clone ID: PAT_MRT4530_39871C.1
gcacgaggaaggaaaaaaattaccaataaatcgcggatttcccaacgccgccgctcctctcgcggattccccaaccctaaaccgccggcggtttctgcggcggcggcggcggcggcggcggcgcgtcgagtcggcggagtctccggtcagcttcccttccgcgattctcccgcagccgcgccgcgtggtttgacccctgtctctggtttcccccatcgcattgacgaggttacggtttcgcaggatcggatcgggttcgtcgctgatcgaggagagatcgcgtcgccgtcgtctcgggggagaggagcaggatggac

SEQ ID NO: 36005 - DNA, 1032 bp, Oryza sativa
  Clone ID: PAT_MRT4530_39872C.1
atggtgctcgaccacgccaccggcgacgccatctgcaccgggtgcgcgttcgacctcggcaacggcgccaacgcgtgccccgagccgccgcggtggcgcgccgccgctggtcatggtgacagtgatggcgaccgtagcagcagcagcagcagcgtgggaggagacgtctcgccagctgctgccgatccgttgctccagggcggcgagggcgttgcctgctctgtcggggcgccgccggtgcagccgagggtgcgcggcgccgttgtgccgccgaagcagatgcgcgccggcggtgccgtcccgccgaaggtgcggtgcggcgtccctgacacgagcaaggcgctcgccgaggggttcgacgccatcgtcggcatggcgtcccggctcgggctcgcggacaaggtcagcgaccgggcgaaggaggtgctgaggaagctggaggaggccagggcgtgccccaagggacggagccgggacgcgctctacgcggcgtgcctccacgccgcgtgccgcgtcgagggcgcgccgcggacgctcaaggagctgatcgcggcgacctccgacgcggcggcgacgaagagggacctgggcaagttcatcaacgcgatcaagaggcacctcgggatggaggagcgcgggcaggatcaggcggcggacatgaaggcgagcggcggcggcgtcggcgtggtggtgcgcgccggcgactacctgcaccgctacgggtcggcggtggggatgagcggccaggaggcgagcgcggcgcggcgcgcggcgggcaggctggacagcctcgacgtgcggcgcaacccgcagtccatcgcggccgccatcgtctacatggcggcgcaggggagcagcggtgtccggaagagcgtccgccgccacgggcgtcagcgagtcgaccatcaaggacgcgtacaaggacctgtgcccgcacgccgccctgctcttcgcctgaaacacacggcgacggcgcgacgcgacgcggcgctacttaatttgttgtgtgtattgcgtgttgttggttactga

SEQ ID NO: 36006 - DNA, 1227 bp, Oryza sativa
  Clone ID: PAT_MRT4530_39873C.1
atggaggcggcctgtcaccgggatggtcttgacaaggacgaggtggtggccagagtcagagtaggcagtagagaacctattgcaaataccggaattgcgacatcaaacgtcgacagagctgataaagcaccagaaccagatggcttcactggggcattctttaaagtttgttgggaaatcatcaaggaggacatcccactggtgttcaactccatcttcaatcttaggtgtgcgcacctcaacctaatcaactcagcgaacattgtcctaatcccaaaaaaggatggggccgagagtgtttcgaactacagaccgattagcctgatccatagcattgccaagatcttctcaaagttgcttgcgttgcgtcttaggccccacatgcatgccttgatctcggtcaaccaaagtgctttcataaaagggagaagtatccatgacaacttccttttcgtgcggaacatggccagaagatatcatcgcttgagacgggcaatgttgcttttcaagcttgacataacgaaggctttcgactcggtcgtggccatcagatgtgacagcatagacctgaccgaggtcctccagggcatcccagtaatgagggcaaattttcccctaaaatacttgcgcctccccctagttctgggaaggatgcggaaaacggacttacaaccggtcttcgacaagatatcaaggagggttgcaagctggaggggcaagaacatgggagctgccgggagtaccacactcgtcaaatctgtgctctcagcgcagccaatttacctcctgactgccttgaaggtgacaaaggagtctttggagcaactagacaagcagcgacgacgattcctctgggcaggcacgggtgatatcaccaggggaaaatgtaaagtcaattggataaagacgtgtttgccgaccagccaggggggcttgggagtcctaaatctggacaagttcacaagggccttgagattgcgatggctttggcatgaatggaaggatcctaccaagccgtgggtgggactggacacgccttgtgacggtttagacaaggacctttttgccgccgcgacaaaggtaacagtcggagatgggaatacggcacgcttctgggacgctgcatggatagatgggcagagaccaaaagacctcatgccacttttctatgctatctccaaaaatagaagaaagtccctgcgccaaggaaaagagggtgacgcctag

SEQ ID NO: 36007 - DNA, 345 bp, Oryza sativa
  Clone ID: PAT_MRT4530_39874C.1
atgtggtggctgagtcagcgtggaacccacgtgggccccacatgtcaggatgccacatcagcaggccggcctccgctccggcccacagtgttcgccgccgtcatcgaccaccttagcgccgcttctcgccccgacgccgcagtcatcgtcttccgcgtcgtacgtgccttctgctcccactccgctgccacattccattcactccttaacgccctcgtttccaatggtcgcgcggatgccgccaaggacatgctcccgttcgcccccaagcttggcgtccgcctcaacgctgtgtcgtacaacatcatcctcaacctcctccccactgccggtcgtcctgcctag

SEQ ID NO: 36008 - DNA, 306 bp, Oryza sativa
  Clone ID: PAT_MRT4530_39875C.1
atgaattggtggcagactgatactgtgacagtgacttattatgttgcatgtcaactcaccagcctttggttccatgctaaaataattcgaccgttttttgtccccgatgggggcattaatactccaaaaatatcgacgtcgcgacgagcaaaaaggtcgccgatcgatcgattaatttatataattaatttaatggttattcttttcttaaaacatatgacatacgtatgcactcgtataaacgtgtacacgcacacccgctggatggctccaaccattgaggtcgtcctaaggctagagagtcca

SEQ ID NO: 36009 - DNA, 3030 bp, Oryza sativa
  Clone ID: PAT_MRT4530_39876C.1
ctacagagaagaatggagattgttcaactcagatgtttttgtgcagaaattctcatcaggttgctggttgtgtgggctgctacttgacacctgagaagtgtgataggttgcaaaacctagatgcgtcgtgaaagtcggatctaagccagagggcatttcatcatagctaattgggcccatcggacttgaaagatcaatccccctgtaggttttataggtcggagtttgggtacccagtggggacatgttaggaggaccctcgaaagcctcaggtctcaaatgatcccgcacatcagactggaagcggtcgttcaatcgtgtgcctttcattccagctgaaaagacccctctcatataaggtctagcccatttttctttttcttcaaatacctttttcaaccatacattatcatgaaggttatgcttattgatcatagcatcccaagaagtgagaaattccgtctcctcttcatacaaattgatgcatgccttgaactccttcatgaaatcactgtcacttttaagctgatttatgttcctcgttgcagcatgctttaggtgccatgcacatataacatgggttgtgttgtagtcagtaatcatccttggatcggcccagaaaacatttgccaccttatcctcgacatccaactgcacggaatggtagaacgaggggttagccagagactggtcttgaaaataatttaacaaagcaccagcttctccatacttcatctcccattgcctcctggttcgcagcggctgccggcgcccttcccctgcactcgcggtactattctcttcggtagaattctgccctcccacctcacccccgtccatcagaagatcaggcggcgtaacggcatcgggcaatgtcgtccagtgcacgacattgggctgcagaggattgggcatgcaggatgtagcgaagagcgggtggttgtgccgcggctggaaggcgtaaacctccagcttggcgccgggcttcttgcggcggatgacgaggtgcgcgttgcagccggtcctcgagtccggcatcggcaccatgtggttgccccgcttgacgttggccctgtagccctcgcgggagcaggcgaacttccgggaggtgatctcgccggtcttcttgctcttgttggcgtactccttccggacgttgaaccctactttccagccgtagtagcggtagaactcgtacgcctcgtgctcgctctcgaactccatccccatccgcggcgtgtactcctccgggcgtgtaggagcggcccggaatccgcccctccccaccgcggcaacggtggcggtggcggcggcggctcccgtcaagggatttcgggatgccgcgtgggtcgtcgtggcatcagttgccctcaagggaattcgggaggccactgcggcggcggcggcggcgggccttcgggacaccgaggtggcggtagtggtggtggtggccctcgtggcggtccgggacgccgcggtggtcgccgggatgttccgggcggcgacgggggcagtggtcccggggggcttccgaggtagcacaccggtggtggcggcggctacccccgaggccttccgggtcgccgccgcgggggcggcggcggatgtagacccggattcctttcgggatggcacgggggctgcggcggcggcggtagccggcgatccggatggcggcgcggcggaggcattccgggcaggcgcgggtgtgattggggggttaggttttggtggggcggcggcctcattgccaggagtccaggagcagctgtcactttcgcggcttccttccctcatggccttgaagctcaagcagctgtcatccttgctcccgctggtggacgcgcttacaacatcagctagatactcatcttgagtccaccttggcgggacactgacatttaacttgcacagtctgggtctctgtattgttgaacctccaatgttagcattcccattaagcacggacttcgcgattccattgaaatggtagatagtgaattgcttcttgcccataaggcctgtaggatccttcatgcctccagcccttttatccaattgtagcagcgcctgccagaattcactccatactataatgccagcattacagaggtcctcaagcttatcagaaggaaaatttatgtcagtgtccctcagaacttgttggaacccctcaacgctaataaagcctccacctccactttgatcttgtgcatcaaatgccctccttattttagattcccgctcttccagctcattctcttcttgaacattgggatttagggcaaaaaggacggagtagtgactttcacttcctaccacccatattggccatttcgggcactttaagtattgaccaaccttgcagaagtttagtgattccagaagggtaaggaaaccaacttcaacatcatttggtatcccattcaggaacatgccaccaccaaagtccaccttgccatcaaatacatttgacacagcctctccacatagcaataaattcacaacttccgcttcattgacacttccaatggttgctacaactgctctgttccccgttccgcataaaaatagaatttccagcatggcatgaaccagtgctctgatgccctgattgctccactgcgccaacacctccttctcaagcttgttgccgaacaccattagccacagcttctcggccacgtccgtaggcaaccgctcccctttctcctcctccacctcctccgccttcgcctcctccatagatacccccgatggccccgggtccgccttcacctccacctccacctccctggcgaccacctccggggccggcggccgcggagccgccgcggcgggggagggggcgaccgcgcggagccgcttctcggcggcggccgccctgagctcgcgctgcttgcggcgcgcctccgcctccgcgtccgccgccgccaccccctcctcggcgggcggcgggggcggcttgctccgcttcggctcgggctgctgcgccggcggcgagccctggaggctcatgcggagcgccat

SEQ ID NO: 36010 - DNA, 3311 bp, Oryza sativa
  Clone ID: PAT_MRT4530_39877C.1
cccatcctccggccacacgttctacagtcaccaactctctatcagatttaaaatagaaccacaaggtgtgtgtgtacaaaaaagaatgtatcttgaactgaaaacatattcataaaatggagtatacagctaatgtcattataggaaaaagaatgttcgggtccctgataaaattacatcaaaggatcattcacgcaaccaagaaaaatcatatattcatcagctggaacagtgataacaccaggagtccaggagcagctgtcactttcgcggcttccttccctcatggccttgaagctcaagcagcctgctctgcaatagccactttaaaatcagactagcacgcggcatggcatcagacaatactaggcatatctccaacccagctacaaactgcccgtggccatcgggttctaatgcagtccaccaacggtgcatgctgagaagtttgaacaggtggagcaagtgaaagaacactgtcatccttgctcccgctggtggacgcgcttacaacatcagctagatactcatcttgagtccaccttggcgggacactgacatttaacttgcacagtctgggtctctgtattgttgcaacttcaatatgagcactcccattaagcacgtgcgtcaaccttccgcttctttggtaaacctttttcaatgcaatttcttgattggatcttatttttctgccccttcttctttgactcttttgctgttgtgccacttgatttgtccatgatattttctgcttgagtgccgtttgtaatagaaggtaaggaaaccttaaggttctgaacatcagtctgggtcagagttgcatcgacacaagtttgtttctgtaggatttcttcaactttgttgctaagatctacccaacattggtccagtactctgtaggattcctcacattctgatgctcgagcaacaagcctaacatactttgggcacatgtattgatagcgactggaggattctgataatttatctgcttgaattgcttgaccttgaacatctccagacatcaaagtcctagcatattttgtccagcgcttcataatatatctgtctggtagatattttatatccattgcatctaaaattttcagcgcgtggctacacaagaaaccatttctttcaaacttcttacatgagcatgaaacagtctgctcagtagggtttccataaactgtatatcgcttctctttctcaacaactgaaacgacatactcacgacaagggccactttcatcacggtttacaatgtaagctgactggaattcttcgtattcttcttgaaaaagcggaaagatcgtattggtataagcctcaaaagcttgtgtcaggataggagctttaattttaaagtacagcaactttagccttgaactatactcaacctccaattctttccgccgcctatcattaataactgtctcaagatgcctcaacaataaaagaatatttacctcaggtctcaaatgatcccgcacatcagactggaagcggtcgttcaatcgtgtgcctttcattccagctgaaaagacccctctcatataaggtctagcccatttttctttttcttcaaatacctttttcaaccatacattatcatgaaggttatgcttattgatcatagcatcccaagaagtgagaaattccgtctcctcttcatacaaattgatgcatgccttgaactccttcatgaaatcactgtcacttttaagctgatttatgttcctcgttgcagcatgctttaggtgccatgcacatataacatgggttgtgtctggcatcactatagagacagcctttgctacaaccgcatcttgatgtgaaaagaaagttttgggtgctcgtccagacattgcatgcaagaaagtctcaaacagccactggaaagactctgcagtctcgtcatacatgagcgctaacccaaaaacaataggctcaccaaaattgttacaaccgacaaaagaggcaaaatgacggaggcttatactgttcctagacaccacatcaaatgcaataacatcaccgaactgactgtagtcagtaatcatccttggatcggcccagaaaacatttgccaccttatcctcgacatccaactgcacggaatggtagaacgaggggttagccagagactggtcttgaaaataatttaacaaagcaccagcttctccatacttcatctcccattgcctcctggttcgcagcggctgccggcgcccttcccctgcactcgcggtactattctcttcggtagaattctgccctcccacctcacccccgtccatcagaagatcaggcggcgtaacggcatcgggcaatgtcgtccagtgcacgacattgggctgcagaggattgggcatgcaggatgtagcgaagagcgggtggttgtgccgcggctggaaggcgtaaacctccagcttggcgccgggcttcttgcggcggatgacgaggtgcgcgttgcagccggtcctcgagtccggcatcggcaccatgtggttgccccgcttgacgttggccctgtagccctcgcgggagcaggcgaacttccgggaggtgatctcgccggtcttcttgctcttgttggcgtactccttccggacgttgaaccctactttccagccgtagtagcggtagaactcgtacgcctcgtgctcgctctcgaactccatccccatccgcggcgtgtactcctccgggcgtgtaggagcggcccggaatccgcccctccccaccgcggcaacggtggcggtggcggcggcggctcccgtcaagggatttcgggatgccgcgtgggtcgtcgtggcatcagttgccctcaagggaattcgggaggccactgcggcggcggcggcggcgggccttcgggacaccgaggtggcggtagtggtggtggtggccctcgtggcggtccgggacgccgcggtggtcgccgggatgttccgggcggcgacgggggcagtggtcccggggggcttccgaggtagcacaccggtggtggcggcggctacccccgaggccttccgggtcgccgccgcgggggcggcggcggatgtagacccggattcctttcgggatggcacgggggctgcggcggcggcggtagccggcgatccggatggcggcgcggcggaggcattccgggcaggcgcgggtgtgattggggggttaggttttggtggggcggcggcctcattgcctgaggcggcggggtgtggaggcggggaagcgggcgctggcgctggagctggagtaggggggtgctccggtggagggggctctgccggcgagctcat

SEQ ID NO: 36011 - DNA, 358 bp, Oryza sativa
  Clone ID: PAT_MRT4530_39878C.1
tttgtttttttttttttttttttttttttttttttttttttttttttttttttttttttttttttttttggaaaacctcgagggtaatcatttcaaagaaaaaccgaaattaaaaaacaaccagaacacagggttttttttggggcccctcacaagggacattgataaaatctggaaaaaacccgaacatatgggggccaaaataacaagggggaacccaacagggggccaaaaggagttaacagcctttgggaaagaagaaacaaggatacacaaaaagggccggttggaaaccctttgtcccccccttattgaagaaacccgcccccaaatgggggaaacaagcaggaggacgggg

SEQ ID NO: 36012 - DNA, 1866 bp, Oryza sativa
  Clone ID: PAT_MRT4530_39879C.1
atgggggatcggggggaggaggaggaggaggagctgcagatggcgctccgcatgagcctccagggctcgccgccggcgcagcagcccgagccgaagcggagcaagccgcccccgccgcccgccgaggagggggtggcggcggcggacgcggaggcggaggcgcgccgcaagcagcgcgagctcagggcggccgccgccgagaagcggctccgcgcggtcgccccctcccccgccgcggcggctccgcggccgccggccccggaggtggtcgccagggaggtggaggtggaggtgaaggcggacccggggccatcgggggtatctatggaggaggcgaaggcggaggaggtggaggaggagaaaggggagcggttgcctacggacgtggccgagaagctgtggctaatggtgttcggcaacaagcttgagaaggaggtgttggcgcagtggagcaatcagggcatcagatttagctctgatcctgaaacaaccatgggactggtacagcatgaaggtggcccttgtggtgtcctagctacagtacaggcctatgttcttaaatatcttttgtttttctctgatgaattgggtaatccggaggttagtgatccgttttatgccctgggacaaaggcgcttttatcagagctcttttgctgcgagggatgatttttcttctctgactgatgacagaaagatgagagcactggttcatgccatgctggaaattctatttttatgcggaacggggaacagagcagttgtagcaaccattggaagtgtcaatgaagcgaaaactgctgcagtcttggaaggcctttctgttgactcagctatggatctgcagaaagttcttagaataagtacatttacctcaaggaaggatgcattcaacagtcttatagcaaacatttctttgtttgaaagtcgattaggagccatgctattccttatatctgctcttctctctcgaggattggaacgtattcaagcggatagggatgatccaagcctaccattggtcactgccccatttgggcatgcttcacaggaagttgtgaatttattgctatgtggagaggctgtgtcaaatgtatttgatggcaaggtggactttggtggtggcatgttcctgaatgggataccaaatgatgttgaagttggtttccttacccttctggaatcactaaacttctgcaaggttggtcaatacttaaagtgcccgaaatggccaatatgggtggtaggaagtgaaagtcactactccgtcctttttgccctaaatcccaatgttcaagaagagaatgagctggaagagcgggaatctaaaataaggagggcatttgatgcacaagatcaaagtggaggtggaggctttattagcgttgaggggttccaacaagttctgagggacactgacataaattttccttctgataagcttgaggacctctgtaatgctggcattatagtatggagtgaattctggcaggcgctgctacaattggataaaagggctggaggcatgaaggatcctacaggccttatgggcaagaagcaattcactatctaccatttcaatggaatcgcgaagtccgtgcttaatgggaatgctaacattggaggttcaacaatacagagacccagactgtgcaagttaaatgtcagtgtcccgccaaggtggactcaagatgagtatctagctgatgttgtaagcgcgtccaccagcgggagcaaggatgacagtgttctttcacttgctccacctgttcaaacttctcagcatgcaccgttggtggactgcattagaacccgatggccacgggcagtttgtagctgggttggagatatgcctagtattgtctga

SEQ ID NO: 36013 - DNA, 154 bp, Oryza sativa
  Clone ID: PAT_MRT4530_3987C.1
cgcatgcacgcctccttcagcttgtttcctcctttgttggccgccctctttttttttttttgtgggtttttttattttcccgggatagaacaaccctggttctttcatttcaattgcaaaaagcttctttcggccaaaacatacgccacaggtc

SEQ ID NO: 36014 - DNA, 3159 bp, Oryza sativa
  Clone ID: PAT_MRT4530_39880C.1
atgtcctgcaggtcttcaggggcagtcacagaagtcacaaaccatctgccgcctatagccaaatggttcgacaacatgcacgtagacgtacgcgtgaactacattcgaaaccaagatgagcactcgcagaaacgtgcccggatatttgaaaatataatcgaaaagatgattcatgcctttgctaggacagtaggaattttatcagattttcgacacaagaggtgtgaatccgcagcggtggcgatggccagcgaccttccaggaggactttatggggatgtttcgaagaatatgctcaagccagctgctgctgtttcagttgagcaagctgaagctagtgctcaccttccaaaaggtgacatgtggtctgtgcataaatttggtgggacctgcatgggaacctcccagaggattcagaatgtggctgacataatccttcgcgacccttctgagaggaaactggtagttgtgtctgcaatgtctaaagtcactgacatgatgtacaaccttgtaaataaggctcaatcaagggatgattcttatatcactgcacttgatgaagttttcgagaagcatatggcagcagcaaaggatctgcttggaggagaggaccttgcaagattcttatctcagttgcacgcggatgtcagtaacctaaaagcaatgcttcgtgcaatttgcatagctgggcatgccacggagtctttctcagattttgttgttggacatggagagatatggtcagctcaattgttgtcatttgccataaagaagtctggaaccccttgcagttggatggacacacgagaagttttagttgtaaatcctacaggttccaaccaagtagatcctgactatttggaatctgagaaacgacttgagaaatggttcgctcgacagccagctgagacaataattgctactgggtttattgcgagtacacctgaaaacattcctacaaccttgaaaagagatggaagtgatttctctgcagccataattggttcacttgttaaggctggtcaggtcactatctggactgatgttgatggggtctttagtgcagatcccagaaaagttagcgaggctgtcatattaagcactttatcatatcaggaggcgtgggaaatgtcgtattttggggcaaatgtattacatccgcgtaccatcatacctgtgatgaaatacaatatcccaattgttataagaaatatgttcaatatttctgcccctggtaccatgatctgccagcagcctgcgaatgaaagtggtgatttggaggcttgcgtcaaagcatttgcaactatagataaattgtctcttgttaacgttgaaggaactggaatggctggtgttcctggtactgcaagtgccatatttggtgctgtgaaggatgttggagctaatgttatcatgatatcgcaggctagtagtgaacactccgtatgctttgctgtaccagaaaaggaagttgctgcagtttctgcagctttgcatgtcaggttccgtgaagcattatctgcaggcaggctatctaaggtcgaagtcattcataattgtagcatccttgctgctgtcggcctgaagatggcaagtactcctggggtcagtgcaaccctttttgatgcacttgcaaaggcaaatattaatgtaagggcaatagctcaaggttgtagtgagtacaacatcactgttgtattgaagcaagaggactgcgtaagggctcttagagctgctcactcaaggttcttcctctccaaaaccacacttgctgtcggaattattggacctgggttgattggtcgtactctccttaaccagctgaaggatcaggctgcagttcttaaggaaaatatgaacattgatctgcgtgtcatgggaatcactggttcgaggacaatggttttgagtgatacaggaatagatttggcccattggaaagagcagctacaaactgaagcagaaccagccaaccttgacaagtttgttgatcatttgtccgagaatcaattattccctaacagggttttggtggactgcacagcagacacaagtgttgcatcccactattatgactggttaaagaagggaatccatgtcatcacgccaaataagaaagcaaattcagggccactggacaagtatttgaaacttaggactctacaacgtgcatcatatacccattacttctatgaagcaactgttggtgctggccttcctatcattagcactctgcgcggtctcctggaaacaggtgacaagatattgcgtattgaggggatcttcagtggaacattgagttacattttcaacaattttgaaggaacaagagctttcagtgatgttgtttctgaagcaaaagaggctggatacactgaacctgatccaagagatgatctgtctggaactgatgtagccagaaaggtaataattcttgctagggaatctggattgaagcttgagctttctgatattcctgtaaggagtcttgtgccggaggcattgagatcctgttcaacagctgatgaatacatgcaaaagttaccatcctttgaccaggactgggcaagagagagtaaagatgctgaagctgccggagaagttttgcggtatgttggagtggtggatttggtgaacaaggagggtcaggtcgagctgcggaggtacaagaaggaccacccgttcgcgcagctatctggctccgacaacatcatcgccttcacgacgtcaagatacaaggagcaaccgctgatcgtgcgaggcccgggcgccggtgcagaggtgaccgcaggaggtgtcttcagtgacatactacggctggcctcctacctaggcgctccctcataagctttgtagcaggaagcattttctgatggtggtcaagatggctttgaatcttgtaaggttgcctggtttcttcttctcttttcctttgcacaagcattctaaatcacagtgaggaaataagcctttgttctgtagtgatgttcgtcaagggcaataggtaggagttgtgcaggtcttgttggaaaacaattcttgttcgttgcaataatggtgtggtcgtcaggtttgtttttgatggtgacgctagtgaggtgagacggcattacaagtgaagaatcaataatgcaaagcttcgaatcgtgatgatggaag

SEQ ID NO: 36015 - DNA, 213 bp, Oryza sativa
  Clone ID: PAT_MRT4530_39881C.1
atgcggatgccgaggcaagagcaggccatagaggccaattcctctagctgcaacggagaggacaataggggcagcggcaacgacgacgatcgacggcggcggcggcggcagtggcagtgcggtggcagtggtggggaagagataaaagaggataagagggtggcggtggctcatgttcctcacctccgtgtgggcacatcaaccggcgagtag

SEQ ID NO: 36016 - DNA, 444 bp, Oryza sativa
  Clone ID: PAT_MRT4530_39882C.1
agttcgcaaggcagtactttggcatagcggatagccccttattgcattcagctgcgttccaactgacaaacacccaagtctggcgacagctcgcgctgggggcgcaacaatctcactatcaggacattaacattgttcaggccatagcgcagtagctacaacttcagcagctgggtgatctctactctgatcggaatcggtctcaggctcaagctctgttggcttttaacgcgccatatacatatggaatctaccctagatactatggtgcacaccagtaccattaccacccttggcggtgttttgtcacgagttctaacactatcgcggtttgaaagtcaagaatacgctcagatatcatcatatgtgacatgtgaaactgtggctgatataaagagaacaaaagttgactctcatattgagtaaacattgaaaatcctagtc

SEQ ID NO: 36017 - DNA, 360 bp, Oryza sativa
  Clone ID: PAT_MRT4530_39883C.1
cagcccaagaagctccaagaaccgccattgaattcttgcgcgcctgcacggattcaaggagccaaaagcctaaaagaaaaagctgcagcccggccgcatccagcgccgccgcccccgcgcccggccgcatccgccgcggccgcctccacgcctggccatgcccccacgctcggccacatccgacgcggccgcccgcagccctcccatcgtcggcgtcgctcctctctgtcttgccacgccgctgcatccgaaaagtgccaagaaaagagaaaaagggagagaaagaggaagaaggtatagcagaggctgacgtgtgggtcccagtgtcggagagtgtagttagagaggctgttgaagtgg

SEQ ID NO: 36018 - DNA, 3675 bp, Oryza sativa
  Clone ID: PAT_MRT4530_39884C.1
atgcccatgggaagcaggctcggtgcaagccctgagatgattgagaggaatatgtcactaatgctcttactcatagttgaaaagactggaccatttgatatatatgctaaagaggttgaaaaggagaaagcttccttctcacactacaacattctaccccttaatatttctggtcagcgacaaccagtaatggaaattcctgagattaaagcagcagtggaccttcttcgcaagatagacggcctcccgatgccaaggcttgatccagtttctgctgaaaaagagacagatgtacctactgtccgtgatttgtttgattggctctggctgacatttggatttcagaaaggcaatgttgagaatcagaaggagcatttgattttgctgcttgcaaatattgatatgagaaaaggggctaatgcctaccaaagtgacagacacaatcatgtgatgcatagtgatacagttagatccttgatgaggaaaatctttgaaaactacatttcttggtgccgatatttacatttggagtcaaacataaaaattccaaacgatgcctccacacaacaacctgagattctttacatagggttgtatttgctgatctggggtgaagcttctaatgttcgctttatgcctgaatgtatttgttatatcttccatcatagccatcagtacaagaacacaattatacccatgtgtttattcatggaacatgtaagacaagattttgatccaccctttcggcgagaggggagtgatgatgcctttctacagcttgttattcaacccatctacagtgttatgaagcaggaagctgcaatgaataaacgtggtaggacaagccactcaaagtggagaaactatgatgacctgaatgaatacttttggtcaaagagatgcttcaaacagcttaaatggccgatggattcagcagctgacttttttgcggttcctctgaaaattaaaactgaagagcatcatgatcgtgtgattaccagacggagaatacccaaaacaaattttgttgaagttcgtacatttttgcacctattcagaagttttgatcgaatgtgggctttctttatattagccttccaggcgatggtaattgttgcttggagcccttctggattaccgtctgctatttttgatcctactgttttcagaaatgttttgacaatattcataacggctgcatttctgaacttcctgcaagccacgcttgagataattcttaactggaaagcttggaggagtctggagtgctcgcagatgatacgatatatcctgaaatttgttgtagctgttgcttggttgataattcttcctacaacgtatatgagttctattcaaaattccacgggccttatcaagttcttcagcagctggattggaaatctgcagagtgaatcgatatataattttgccgttgctctttacatgttaccaaacatattcagtgctttgtttttcatatttctaccatttcgaagggtattggagcgttcaaattctcgcattattagattttttttgtggtggacacagccaaagctatatgttgcccgaggcatgtatgaggatacatgttcacttctaaagtatacattattctggatactattgctcatatgcaagctcgccttcagtttctatgttgagatttatcctctcgttggaccaacgaggacaattatgttcttgggacgagggcaatacgcatggcatgagttctttccatacttgcagcataatttaggtgttgtaattactgtatgggcaccaattgtcatggtatacttcatggacacacaaatatggtatgccattttttcaacaatatgtggtggagtgaatggtgccttcagccgcttgggtgagatccggacccttggaatgttaagatcacgattcgaggcaattccaatagcatttggcaaacatcttgtgcctggacatgatagtcaaccaaagagacacgagcatgaggaagacaaaattaacaagttctctgacatatggaatgcatttattcactctttgagagaagaagacttaataagcaatagggagagaaatttactgattgttccatcatctatgggtgatactactgtttttcagtggcctcctttccttctcgctagtaagattccaattgcacttgacatggctaatagtgtcaaaaaaagggatgaagaattgagaaagaggataaatcaggatccatatacctattatgctgtagtagaatgctaccagacattgtttagtattctagacagccttattgtggaacaaagtgataagaaagttgttgatagaatacatgataggattgaagatagcataagacgtcagtcacttgtaaaagagttccgattggatgaacttcctcagctaagtgctaagtttgataagctgctaaatctattgttgagaactgatgaagacattgaaccgataaagacacaaattgccaatttgttacaagatataatggaaatcatcacacaggatattatgaagaatggacaaggtattttgaaggatgaaaacagaaacaatcaattgtttgcaaatataaatctggattcagtaaaagataaaacttggaaggagaagtgtgttaggcttcaactattattgacaacgaaagaatctgcaatatatgtacctacaaacttggatgctcgtcgcaggatcactttctttgcaaactcacttttcatgaaaatgccaaaggctccacagcctttctgcttttgcatcagtgttttaactccctacttcaaagaggaggtgctcttttcagcagaagacctttataaaaagaatgaggatggaatatccatactgttctatctacggaaaatatatccagatgaatggaagaattttcttgagaggatagaatttcaaccaacggatgaagaatcactgaaaacaaagatggatgaaatccggccctgggcatcttatagggggcaaacactcaccagaactgttaaactggaacatcgtagaacagtagagtcttctcaacaggggtgggccagtttcgatatggcacgggcaattgctgatatcaaatttacctatgttgtctcttgtcaagtctatggaatgcaaaagacatccaaggatcccaaagacaaagcttgctatttaaacatccttaatctcatgttaatgtacccatcgttacgtgttgcttatattgatgaagtagaagctccagctggtaatgggacaacagagaagacttattattctgttcttgtcaaaggaggtgaaaagtatgatgaggaaatttatcgcatcaagcttcctggcaaacctacagatattggagagggaaaacctgaaaatcaaaaccatgccattgttttcaccaggggagaggcactccaggccattgatatgaatcaggataattacctcgaagaggcatttaaaatgagaaatgtgctggaggagtttgagagtgaaaagtatggaaagagaaaacccactatattaggcctccgtgagcacatttttactgggagtgtttcatcacttgcttggtttatgtccaaccaagagaccagttttgttaccattgggcaacgagtcttggctaatcctctcaatttttatggcccttcattcattgatagacaccactaa

SEQ ID NO: 36019 - DNA, 2133 bp, Oryza sativa
  Clone ID: PAT_MRT4530_39885C.1
atggcgagttcctcctcctccatagccgccacaaatcctctggttggcatccaggtctctgaaaaactcaccaagcaaaattatgctctctggtcagcgcaagtgctcacagccctgaggggcgcgcggctggaaggattcatctccggcaagactactccaccacctgccgagatagagaagaaagaaggagacaagaaagaaggagagaagacaatcaagattgctaatccggcagtggatgaatggtttgccacggaccaacaggtccttggcttcctgttctcctcactgtcacgtgagatcctgtcccaggtcgccggtgcaacaacggcggcacaggcgtggcaggccatcagcgacatgttcgcgtcgaagtcccgagctggcctcatcaatatgcggctggcactcacctctacacagaagggcaccatgtcagtcacagaatatgtggccaagatgagggcgattgcagatgaacttgcagcagcaggcaagccaattgatcaagatgatcttattgcttatatcattaacggtcttgatgcaaactttgatcctgttgtcgaggctctcgtcgctagggttgaacccatcacagtgcaagagatgtattctcatctgctgaactttgagaacaagatccgtcttcgtcaagcgttcctgactgcctccaccaacgctgcaaatcgcaacaatgtcacccgtggtggccgtggtggcatgccgcgcggacgcggcggtcgtggcggcggtggccgcggcggcaacggaggacgcggcaacaatggcgggggtcgaggcgataatcgccctacctgccaagtctgcaacaaaagaggccatgtggcttcagattgttggcatcgtttcgatgaaacgtatgtccctgatgaaaagattggaggtgcagcaactcatgcctatggcatagacacaaactggtatgtagatactggtgcaacagatcacatcacaagccagcttgacaagcttacaacaaaggagaaatatcaaggcaccgatcagatccacacggcgagtggcgaagaagtttttgaaaaattccatgagttccaaaatatggttgaaagacagttcaatcgtaaaattgttaccatgcaaactgattggggagggcgtgtatatgtttcccgagatgttacctttgatgaacatgagtttcctttttcccaccttcactccaatgcaggggcacgtctccgcgctgaaatttccctcctaccagaacatctcctctctcatgcctatgatcaagggggagagaaacatagcactgaccatatgcatgaatatatcctgcctgtctccactaactcccaagatttgagtcctgtttttacagaaattggcacaggaggaattattccaggtacatcagatggcttgcacccagaaaatgacgatcaggcgggaaaaactgcctcagatcagccgtcgacatcagccgtcttgcctctgcagccgcagcagtcactggagcagcaaccggacggcaccacgtcgtctcatcatccagcatctcctgcgcatgcatctcctccacgccaaccagcagtcgacgtgtcagctggcacacatcatgatgcctccggatcgtctgcatctgatgaaccagtggccacgacagcgccacctgaggtaacactcagacctaaaaccagattgcagagcggtattagaaaggagaaaatttatactgacggtacagttaagtatagctgcttcacatcatctggtgaaccccaaaatttgaatgaggctttaggagataaaaattggaaggagactatggatgcagaatatatggcacttatgaaaaataaaacctggcatttagttcctactaagaaagggattaatataataaattgtaaatgggtgtataagattaagaggaaaactgatgggagtctagatagatacaaagctagacttgtagcaaagagttttaaacaaaggtatggtattgattatgaagacaccttccgtccagtagtaaaggcagctactattagaactattctttctatagcagtgtctagaggatggagtcttcgccagttagatgttcaaaatgccttcttacatggtgttttagaagaataa

SEQ ID NO: 36020 - DNA, 195 bp, Oryza sativa
  Clone ID: PAT_MRT4530_39886C.1
atggctggcacctcccccaagctcccatcgaatccaccagtctcctccaccaccagacccgcctactcagtgacgacggtgaggaggaagcttgtggcgccgcggagaggcaatgggggcggtttcaggctcgataggcttgtgagtggtcataagactcatgacctccgtgcgcggcggagctcggtgccatga

SEQ ID NO: 36021 - DNA, 2280 bp, Oryza sativa
  Clone ID: PAT_MRT4530_39887C.1
atggcgctcctaatgggggcgaaacccaccgccccattatactcctccctgctccagtgctgcatcagctcctgcgcattccggcaaggcaagtccgtccacggcagggtcgccgccgcgtccgcctctcctccggacctgcacctgagcaccaagctcgtcatcttctacgcgcggttcggcgacgtcgccgccgcccgcaaggtgttcgatggaatgccgcacaggagcgtcgtgtcctggacggccatggtctccggctacgccaggaacgggcgcccgcgggaggcgctggagctgttcgcgctcatgcgcgcgtcgggcgcgcggccgaaccagttcacgtacgggagcgcggccagcgcgtgcgcgggggccgggtgcgccaggagcggggagcaggtgcacgcgtgcgctgccaaggggaggtttgcgggcgacatgttcgtgcagagcgccctcatggacatgcacctgaggtgcgggtccgtggaggatgcgcggcagctgttcgcggagatggggaagaaggatgtggtgtcctggaatgccctgatcagggggtttgtggaacgcgggcatgacggtgatgcgcttggattattctcttcaatgctgaaagaagcgatgattcctgaccattacacgcttggaagtgctctaaaagcatgtggaatagtcggtgttgctgtcaatgttgagctaattcacagttgcatcatcaaattgggttactgggatgaaaaggttgtcatcggatcacttatcaactcttacgcaaaatgtcggagtatgagcagcgcaagagtgatatatgattccatctctgaaccagatctcgtgtcatcaaccgcactgatcagtgggtacaccatggatagaaactacagtgaagatgcaatggagctcttctgtaaaattcatcggaagggtttatggattgatggtgttctattaagctcagtgctttgcctttgtgcaagcgttgcttctgcaagatttgggacacaaattcatgcatatatgtgcaagaagcagcctatgggtgatattgcattggacaatgctctggttgatatgtatgcaaaggcaggagaattttcagatgccaagcgtgcttttgatgaaatgccctatcggaatgtgatttcttggacgtcacttattactgcctgtggaagaaacggttctggagaagatgctgtgactctttttaataggatggtggaagatggtgttaggccaaacgatgtgacattcctttctcttctatctgcatgtggtcattgtggtttgacaaacaaagggatggagtactttacttccatgatgagcaggtatggtattgatccaagagctgagcattacagctctgctattgaccttcttgctcgtggaggccagttagaagatgcatggaaacttgtccagaagacaaacttaaaacccaactcatcaatgctgggtgcaatgcttggagcctgtaaattgcatggaaacatgcttcttggagaaactgcagccaagaacctttttagtatagatcctgggagttctgtaaactatgctgttcttgcaaacattctgcgaggttttggcacaatagaccgtgtcaaagctaagctggagcaagcctgccctggagttgtgtcctgtgctgatatccttgctctggtagccagagatgttgtcttcttgaccaaagggcctcactgggaagttccaactgggcggagggatgggacaagatcagtgaaggatgatgctgtgaacaacctccctccccccttcttcgatgccacgcggaacttgtatcaattcttcatcccaaagggccttgacgcaaaggatcaggtggttctgctaggtgggcacactcttggaacctcccattgttcatccttcgccagccggctgtacaacttcagcggcatgatgatggccgacccgacgctggacaagtactacgtgccgaggctgaagagcaagtgccagcccggcgacaagacgacgctggtggagatggacccggggagcttcaggacgttcgacaccagctactacaggcacatcgccaggggcagggcgctcttcacctccgacgagacgctcatgctcgaccctttcaccaggggctacatcctccgccaggccggcgtcgccggctacccggcggagttcttcgccgacttcgcggcgtccatggtgaagatggggaacatgcaggtgctcaccggcgcccagggggagatcaggaagcactgtgcctttgtgaattag

SEQ ID NO: 36022 - DNA, 765 bp, Oryza sativa
  Clone ID: PAT_MRT4530_39888C.1
caggttgggacagtacagctagttctagtcgagggaccgaacaagcggggctcctgaaacagagatgattggaaaaaccgacagggggcatagggtttcgtttgcgagcgtccctgtaccgcatacatttgaaggtgatgaactgcgcaagccagtggttggtgacttcattgaggtgaaaatcaccaagtcatcgacagcatcattatccggggatgtaatcgcgcgcacaagcttgagcaagttctacaagaatcattcatctgaagcacatgctgttgcggcttaaggactactagttgagtttgtagcaggccacatctcaactgaatcagatccccttgccatgatctctatcttgaaatgactgataagttagaccatacaatgcaatttaactggtgactcagttttgtgaagacaactaatgtgatgtgcttttggcatttgaagccaaaacaatcaccagcatttagtctgctagtcatgtgaagcaatgcctcttctcttatgaagtctgtattatcatgtaaagagtttaagcactactggccagcaacatttttttttcttttgcaagttactgcaactcggcagcgtgaggtttatttatttatctttcttctttgggaatgaatgttgtccttgtaaaatagaacattcattgtaatgctccagattttgcgatgggcatcataggattctctgttgaatccttagggtatcttggaccctcgtgcaacctgcagcccggggatccactag

SEQ ID NO: 36023 - DNA, 1236 bp, Oryza sativa
  Clone ID: PAT_MRT4530_39889C.1
cccacgcgtccgaggattcctccgggaaaaaccctaccccccgctgccggaattcggcacgaggcgccgccgcgctctcctccggcgagagctcagggggattcgatcgcgaccggcggaggaggtgaggtgaggtgaggcttggcgggcggcaaccatggcggacgaggagcacgcggagaagcgggaggaggtctccgagcttactccttttgacccaaccaagaagaagaaaaagaagaaggttgttatccaagatccttctgatgaggtggacaagctggcagagaagacagaaaacctgacagtcacagagcctggtgagctcaacttcactgggatgaaaaagaagaagaagaaacctgtggatcttgatttgtctattaatgacattggtgatggggaggacattttagatgaccaagttgtagaggaggaagaaggggaaggaattgtgcttggaggtgcccctaggtacccgtgggagggaactgatagggactacaattatgatgagcttctgggcagagtgttcaatattctgcgtgaaaacaatccagatcttgctggagacagacgcagaactgtcatgaggccgccacaggttcttcgagagggcacgaagaagacagtttttgtgaattttatggacttgtgcaaaacgatgcataggcaacctgagcatgtgatgatgtttttgcttgctgaaatggggacaagtggatcacttgatgggcagcaaaggttggtgatcaaaggaagatttgctccgaaaaacttcgaagcaatcctgcggagatatatcatgttagttgacttaagatttcaagggttatatgcaacttattgcgtctttaaacctttcagatgagttcttccttcgctgcgaacagtgtggatcgtcgaggtctgttgctccaatcaaggctggatttgtcgcacaagttggtcggcggaaggcctgaacataagtcgaagctttggatttgtctattcagtgagctgctatattgtgtgagaaatgattttgctctatcttgtactcttgtgtggccagttttggacctagttttggtcatgtaaatgccgatggcatttagtctatcatagggtgattttgaccgcgaatgcaacaacacgaccaagcaaactaggttgtgtgttgtgaacttgtgattgaaattgggtatcagtttcagggtctgagcaaatggatcaaaaaaaaaaaaaaaaaaa

SEQ ID NO: 36024 - DNA, 598 bp, Oryza sativa
  Clone ID: PAT_MRT4530_3988C.1
gcagacatcaaacctcttaccacgttattaacaggtcaatttgtcaacaacccaacccagcaactttgaagaggtttaagaaaatttcaagggcgcctccagggataaaattaaaaaaagaaaattccagggttataaaactgaactcacagtcttcaaaatggtcatcctattcaaaatcaaacaaaacacaacctaaacaatatatcaagtaactttccaggccacaaatattagaagtgccaacactgcaaataagcattgcctttgatttcatccccttgcatccccaccttttgaatctcataattcccaacattttactgtctcagcagttttcaaatctctcgtataaaaatcccttaatgctttttattttcaaagatgcatattgcactaaccaactacctgaacatactcatttcaaagtggatgaaagccgtttgagatacaaacggaacgcttggggatacatgcctgccaaagtacaccttatgccctcaaaaactgggggatatctgaatgaaggcaattcgtcatccaaaaaaacaccatttgttttaccctgaataacaatggttggattccagttgcacat

SEQ ID NO: 36025 - DNA, 300 bp, Oryza sativa
  Clone ID: PAT_MRT4530_39890C.1
atgaagtccaccatcgctccgccccgatctggccccggggaggctagatctgccgccaggggaggcggatcaacatccagcgtggctggatccgccgcgtcgaccacttacccgccgctatcgagcagcctcgatgtccccgccgctaagcttcctcgtgggggagagtcccgccgccgccgtccttatggcaggccggctttgccgccgtcctcgtggcgaaggggaggaggagggagggggcggcggaaggaggatggggcattgtcccgtgctcccgggggcgacgcagaccattag

SEQ ID NO: 36026 - DNA, 279 bp, Oryza sativa
  Clone ID: PAT_MRT4530_39891C.1
atgacgcaggcgagtgccctagggttcgtggcggaggaagaaagactcactggcttgaaagtcctcgaggaaccccatggcgtttaccggagatgggttgctgcgccccctgacctggacatgcgacgagggtgctgggacaggggatcggacagcgccacggcggtgcggccgcgggagaagcctctcgccggccggcacggcgcaggttgggttgggttgggttgcggttcggcgagaccagagatcccctttgcagataagccctccaagagctag

SEQ ID NO: 36027 - DNA, 1034 bp, Oryza sativa
  Clone ID: PAT_MRT4530_39892C.1
gcacgaggagatcattcgctgcatctcacatgccaagcggatctgttgaccagacctactcctggtgaagggaatcaaacaagcagtggtccttctagttacttggaagggtttactccagtgaagtctattgggtcaatgtcagcatcatatctcctagttccctcaccaagcatgcgatacctttcgccagcaacattacagcttccaacatgccttacatcagagtctccacctcttgcacacttactgcacagcaaagggacagcgattcccctagcaatgggctatgtagtctccaaagccgtcccaccggtaagaaaggactccgcacgccttgccaatgaggacagaccctccgtcctctcggttagcatcattgatcactatggaggcagcattcctgctgttcaagagaaagatgacccgaggttctggcaagcagacgaggaactttactccaggaagcagcaggtcgtgatcatgagacggagatgcacaacgtgttggaagcagtggctgccgagctccactccctttcatggatgacagtgagcccggtgtacatggagagacgaagcgccctgccgtcccactgtgatatggtccttcgcttgaggagacttctgcattacgctgatcggcatctctcccaatcgacagagaaaggagatgtagcttagagactactagagaggacaactaattctcatgtagctttcaccacaggaaaaataagggcttagatgatgctgaaaccgttgtctgtatgtatattaggcaggtagatgagggtcacattgacgagctctctagcccgattttgccttgttagtggattgaagagaatgctaatttcttgggctgaggatgtaattacgtgcgcatcgacacctctcccagggccaggaccaagttgtaatattgtagagctaactggtttataatttggtggtatttgttactgatgggttggcttaaccattggttccaagaaaatcaattggtacctgcccgggcggccgctcgaaaaa

SEQ ID NO: 36028 - DNA, 2055 bp, Oryza sativa
  Clone ID: PAT_MRT4530_39893C.1
atggccggagcgagacccttcttctcgccgcacgaagccttcgcccgagcctcgacggcctcctcacccgcggccgccgcgaccgtcgccgtcgcggcacctgctccggacccaagccccgccaccggccacgccgatgctgccgaggtcgccgtcttccgcctgctcctcccccaggccttctccgatgccgacgccatgcgcctctacgccgccatcgccccgctccgccgcctcttccccacgctgcaggtccgcgtcgagaccctcggagtcggagcctcgtccgatgatgccgacggcgacggcgacggcggaggtggtggtggtggtggtcgcgtcgccgtcgtcctcggccccgcctccccggcgcgccgcgtcgaggcctcctcgtcctccggggagcccctcgagctctcccccgcgcaggaggccctcgtcgccttgctcgacagcggctgggtcgtccacctcaacggcgaggcgtggggagcggagcggatgacgtgcctcgtcctggtcgaggccgggcgcctcgaggcggcctccgggaaggggatcctgtggacgatcgccaacgagtccggcgccgaggtgcgcgtcacgccgtggggtggtgagggcggggcggcgtacgcggcgcagccgcccgaggaggtcgtcgagataacaggagatggaaccactgtaaggagagctcttgtttctgtgtctagctgtcttcaaggtgatgggccacttggcagctcaacttctgctcattcagtgaacccaattctcacacaaacatttccaaaagtgcctgagcctgaaatgggatctttgtattcagatatgtcaactgagcgtgcaaacaccagcattcctcatattgattgtccacagggtgctacaggaattgaacaaactgaatgtgtcatgcaattttcatttagactactctgccctgtaactcttgctggaggtttgataggaaagaatggcatggttatcaaagcaattgaagttaactctggtgcttctgttgatgtcggtggacctgttcatcggtgcatggaacgtgcgataacagtatcagccttggagaaaccaggacagaaattctccatggtggagaatgcggtacttcgtatatttgacagaatgcaggtggtggaaagcaatatgcattcgagacccaataatccattgcattgctctgccagggttctaattctgaaaggccaatttggttatttagttggtccaggtggttcactaatcaagcatatgaataacacaacaagaacaaaaatgaaaattttagaagagactgctgttccagcttgtgcctcacaatacgaactagttctgcaggcaagcacttttctgatcactggagagccaatgaatgttagagacgctttatctcttgtttgtgagaaactacgtaatcattgcttctcttctgagaaaacaacctacggcaatggtcatgttccctcatcggctattgatgaattaactacaagcagccaggttaatatctcttcaactggtcaatattcagctggcaatttgtcaagggttgatcacaggctttctcagaatgaaattgactcggtacaaaactctatcagcgccttcgacttgggatgtttgggctccccacaaattcagaaacctaccattgggtgtggcactgagatcaacaacccaattaatgaggtggagaaaccagctaatggaaatggcactggaattaacaatttgaatactgggatgcagaatgaaaatggaattgacgtttcaaatcatggagctacatctctggaggaaaaaaaacttttgagaggaatcaagactgccaccataactaggatcacatatgaggttgctgtttgcggagataatggaaacgacttcactatgattagagagatgtctggtgcagacgttactgcccactacccgcttccagagacgagtgacggtatgatcgtgatatctggaacgccagatgaggcgcaatcggctctggccatgttccttgaccttgtcaaagaggggcagtga

SEQ ID NO: 36029 - DNA, 186 bp, Oryza sativa
  Clone ID: PAT_MRT4530_39894C.1
aaagcaccttcattgtcatgtgaacataacataactagaagtagtaccttgagtgatgtttacgcccacgcgtccgtaaattggaacattactttggggggggttcccccccgcgcgttgttcccccccgcctttactttgttgagggctccgatactgaaaggggatctactggcactgaatctt

SEQ ID NO: 36030 - DNA, 648 bp, Oryza sativa
  Clone ID: PAT_MRT4530_39895C.1
actagtggatccccgggctgcaggtttttaaagagatatatggtgatataatttacataaaccatcagaaaccagccagtacacagaagctgaaacccgcctgaatctaacattctaaccagtacacagcagctgaaactagatttgaactgcaaagaaacacaaattctaacagcaaaatctaacagcggcagttgtactggctgttcaaggggcctctttgcaaaaactgcctgcacgtgcagttgactctcccttgggaataactcatgtgatatgtatctagttatgtatacttaataaaatgcatggggttctaaaatagatcagcagaaatagcccattaacaattgtttgcagcaggtccaggtgcgtccaaaagtgtaaggtcttaagagagatttttaggaattgctcagtgcagtatccattccatacacccaacatgtaaatatttgtcaaaactgtctgcatggcagtcctatccatgttggaaaactaaaggaaatagcataattgctcattcgtttgaataactctacatagcctgaaaacgatgcagtccaatttgtcctcttatgttaactgattaatgcttctaataattgaaagagttactaaattatcttccttcctcaacaacgcaaa

SEQ ID NO: 36031 - DNA, 444 bp, Oryza sativa
  Clone ID: PAT_MRT4530_39896C.1
atggcggaggagagagaaatccccttggagctatggtccaccttgaatgtggaaaagaagaccctgtgggagatggtggaagatggcatgctgccagccaaagaaatcatcgggtggcgactggcttgcggcaacgaatacccaactcctcacaagatgaagacccaagcacagtttgaagtatttgcatcccgggtcaaaagagctgaagctattcgcaatgatatagccaatgccgctgctccgatactcaatgccatattccaaaacggacttggctcaagctttgatgatgctgtagaactcttcgataagctacagtgtgcactggacaagtactacaaaaacatcgctgaagcagctaccaagtgggcgagtcaagcgttggctatgacgaagaccttaaaccagctaaaattctgtagtaatggcccaggctattga

SEQ ID NO: 36032 - DNA, 164 bp, Oryza sativa
  Clone ID: PAT_MRT4530_39897C.1
ctcgtctaccagatgaagatggggatacagatgggaccgtatcgacgacgaagggagaactcgaactctggcctaccatttcgcccccctccggaggcaatccaccactgcatcgggggcgaggcgtcaccgcctgtgtgtgatgtgctgccgtcccatgatac

SEQ ID NO: 36033 - DNA, 453 bp, Oryza sativa
  Clone ID: PAT_MRT4530_39898C.1
atggcggacatgggaaggcacggcatggccatggccatggcgcctgcggcggctggcggcgcgggcaggaggaagcggtacatgcacatgacgttttactggggcaagaactcggagatcctcttcaccgggtggccgggcgccagcggcggcatgtacgcgctggcgctcgccgccgtcttcgctctggccgtgctcctcgagttcctcggctccccccgcgtgcaggagtcctcctccctcggcagcaggcggcggcgcgcgacggcggcggcggtgcacgcggtgcgcgtcgggctggcgtacctgctcatgctcgcgctcatgtcgttcaacgtcggcgtgctcctcgcggccgtcgccgggcacgcggcggggttcttggcgttcagggcgggcctgtgcggcggcgggtacaagaagggagagctcgcgcctgcggcgtgctgctag

SEQ ID NO: 36034 - DNA, 381 bp, Oryza sativa
  Clone ID: PAT_MRT4530_39899C.1
atgcgcagcctgggcggccgcgcgggggctggcagcggtgactggaggtgcgcgggttggctgcgacgcgcggactgggcggcatcccgcgcgggctgggcggcattgacagcggtggatacaggcggcgggcgaaagtggcgcgggctaggtggtggcggcgcagagcttgttctgcgtactttagggatcggtgacatggtgcttttccttgtccttgttgggcctgatcgtgtcgtcgttctgactgacaatgagctcagtacggttcacatgtgggctgatgacagcggtggttcggacctcttcggctttggacctgcttggcctaatggcatcatcgttcttatagatgagatagcgctagcagcagccgcgtaa

SEQ ID NO: 36035 - DNA, 2778 bp, Oryza sativa
  Clone ID: PAT_MRT4530_3989C.1
acgagggagagagaactagttctctctcagcacgagcacccccacaagctttgtagctctcaagatctaaatcacaagtttgtcttaatctcagcaagatggccgaggtgctggcgagtggtgctaccgggttgatcacatcactcctgggcaagctcgccagcctgctcgatgacgagtacaccctgctccgcgaggtgcgcggcgacgtggagttcctccaggccgagctgagcggcatggacgacttgctggtacggcttgtggagatggagaagaatggacacggcaccaagaagtggagggtgaagctgcgcgagctcgcctacgaagtcgaggacggcatcgattccttcacacaccgccttggctctgcccgtgacagggcagggttcgtgcggggtttcatgaagcagctgaatctgatggtgcgccaccaggtcgccaggcagatccaagaactcagggaccaaatcgaagtcgagtgcgcacggcagatgaggtacacccagcttggtggtggtggctcatcatccattgacgccgccgtagctgaccaaatcgactgccgcgtgaaggcgctgtatgtggatccggaccatcagcttgtggggatggatggtccggtggcgagcatcgtcgagctgctgaccatggaagaagacgagtcgtcggcaaggcagctccggatcgtgtccatctttggccctggaggtctaggcaagactactcttgccaatcaggtgcaccgcaaaatcaaaggccaatttgactatgctgctctggtgtctgtgtctcaaaggccaatcagggacattttgaccaagattgctccttcagtcatcccaactgacagcagcagcagtttagatacatgccaactcatcgaaatcgtcaaagattttcttcaagacaagagcagagtaattactacaactcgcatgtccaatgttgcgagctcacgttctccccggtccaatggtcatatctatgaaatggaatctttaaatgatgctgactccaaagagttattttctaaaatcatttttgaccacaagggtaaatgtccaaaggcattggacgaaatagccgatgaaattttgaaaaagtgtggtggcataccgttggccataattacgttagctagtttgcttgctaaaaaaccaaaaacaaggaaagagtggaagagagtgaaaagttctattggcaatgcatgtgaactagaagggatgagacagacattatcccttagcttttatgacctgtcttatgatcttagaaactgtttcctatcatttagctccttcccagaggattatgaaattgatagagagagattggtactgagatggattgctgaaggattcatttcggggaaagaacaacaggaattaatggaggaagaaggaaacaactactttaatgagctagttaataggagtctgattcagccaattgatattcaatataatggttctgcacgagcttgtcgagtccatgatctgatgcttgagcttatagtgtccctgtcaaaagaagagaattttatcactacattgaatggaccggagtgtctacctatgccgagcaaaattcgatggttatctctccattccaacgaaaatgaagtaatgcaggtggtcacaaataatcgtcgccatgttcggtctgtgagtttcttcccgcctgttgcacagttgcctccttttgttgaattccaagctatgcgggtttttgatgtaaaaggctgtcagtttggggagcacaaaaaaatgaaaaacatggaaagtttaattcagttgaagtatctgaatttggcatataccaatgtgacagaacttccaaaagaaattggggaggttcatttcttagagactcttgatgttagaaattgtcaaatacaaagtttaccaccatcattatgccaattgcagaagttggtgcgactttttgtcagccttggagtcacattgccagataagattgggaagatgcaagcattggaggagctatcacatgttgccatcttatgcaactctttgaattttgtgaaggcactaggggagctgaccaaactgagagtgttccgagtagattgccggtattcatggcttaacgggaagaaacaagccccaaggcaatcagtcagcacgcatgaagatgttttgttgtcatctctgcaaaatttgttaaaaaagaagaatcttcgatcactagagatcgaccttacaaatggttcttccttggtgttttcattgatgaatccatactgtcctcttccccaactcgaagaacttgtcatttccaattccatttccagagttccaaggagcatgagatcgctgaaggacgttatccatttggaaatcaagcttgataggatggaagaagaagatctccatatcatcagagacatgtctcattcactgctttttctaaaaatccacttggaaataaccccagaagagaggcttatcattgactccgagggatttgagtgtctgaagcaatttgagttttgctgtgttggaatggggctgaaatttgtgcaaggggctatgccagatctcgagaagcttgatcttgatattggggttcgaaagaccatgtccaagtatggcggtttcgactttggcatcaagaatcttgaagcactcaaacatgttggtgtcaaacttgattgtcaatatgctgaaaatcgggagatccagtctgcagaggctactatcaggagtggagtccttccaagacgtataatgccacaaattcaaaggattg

SEQ ID NO: 36036 - DNA, 638 bp, Oryza sativa
  unsure (1)..(638): unsure at all n locations
  Clone ID: PAT_MRT4530_398C.1
cactgtgcccgcatcccgcatcgggtntcggaacgggccnctgcntntcgaaaatccccgttgccnccgcctggatggaaaccccggggaccccgatcactctcccgccggntggcattctggctgntgtcaagggtgaggagccacggnccagtgtgcaacagatgccggttntggtgccagcaatgntnccgaaggcacaagaaccgatacaggttcggcatgttgatcttgacattcacaatagttcttgcagtgatgagtacagtagcgacgtcgggagctctgaagaagatgatgaggattagttccttggtaagccattttatgattcatgtttccatgccgttgtaggtcatgtactagtaagaacaaataatgcaagctctcatacatgattattcaagatcatgcagcaatatactggtattgaatagaattgggtggcgtatcatgtatgtgttgattaattaaaccatctcactagtcaatttgcttcgatatatgtaatcaagcatgatggtctaatttcctcaggatgtgctggtgttgtatcgtcagaaacatggcttcttttatggatatttaaacttgaacatggtgtgtttaatgtttgaaaaaaaaaaaaaaaaaaaaaa

SEQ ID NO: 36037 - DNA, 2882 bp, Oryza sativa
  Clone ID: PAT_MRT4530_39900C.1
tctccccgtaaattctcccccgaaaccgcccgagatggcggctgcggcggcgcggctgttggagagggcgacgagaaccgcggcatcctgctcctccgctcttctccgcagtcctctggattctttctccggacgcttcccaagcttccggtcgcccctcctacggccggctccggcgccgtcgaccgtcttcccccggggcctctccgacacggccttcgacgcgcaggcgctggacacccgcgtacccgccaccgtcatcaccggcttcctcggctccggcaagacaaccctcctgaatcacattttaacttcacagcatgggaagagaatcgctgtaattgagaacgaggtccatgatttttcaatgcctgacagagtcaatgccattaacccaggtcttgcaaagcctggtcctgtcattgagacattctgttctgatgaactggtctctagatatgtgaagcttgatggtgtggttactatggttgattgtaagcatgccatgaaacatttgaatgaagtaaaggccaggtgggttgtaaatgaggctgtagagcaagttgcttatgcagacaggattatattgaacaagactgatttggttgataatgcagaactggaggtgttaattaacaaaattaagctcataaatgggatggcacagatgagaaaaacaaagtttggtgatgttgacatggattttgtgctaggaattgggggctatgatcttgataggattgagtctgaagtccagttgcatgaaagaaaagagacaggtcattgccatgctggagaagaacatgggcatcagcaccatcatggacatgtccatgattcagctgtctcaagtgttagcattgtttcggagggagtacttgatcttgatgaggtgaatgactggcttgagagactcgttgaagagaaaggggaggatctttatagattgaagggtgtaatctccgtaaatgagtcaactggacgtttcgtattccagggtgtgcactctatgttggagggatgcccagctaaaccatgggagccggatgagaaaagattcaacaaattagtatttattggaaggaatttggatgaagctgcactgcgaaaagccttcaaaggctgcttactgttcgcactcgatctcatcggagaagagcagccgggtgacaggtttattccggacaggtcggcgatggacatggacatggcgcactacctgctgacggagccgaggaaggacaaggagaacgcggcggcgtccccggccaaggaggcgtaccggaagctgctggccgagaagatcctcaacaaccgcaccaggattctctccttccgcaacaagccgccagagcccgagagcatcctcacggagctccgtgctgatgcggcttccatccaccaggccaagccggccaagcagcggcgctacattccccagtctgccgagaggactctggatgcaccggatcgtcgacgattactatctcaacctgctggactggggaagcagcaatgtgctatccattgcgctgggcaactcggtgtacctctgggatgccacgaacagttcaacttctgagcttgttaccgtcgatgaggacaatggccctgtcaccagcgtaagctgggctcctgatggccggcacatcgccgttggtctcaactcctccgatgtccagctctgggacaccagctcaaaccgactgctgaggacgatgcgaggcgtgcacgattcgagggtcggttcgctggcatggaacaacaacatcctcacaactggtggaatggatggcaagattgtgaacaatgatgtgaggatcaggaaccatgttgtgcagacataccaggggcatcagcaggaggtgtgtggcctcaagtggtcaggatcagggcagcagcttgccagtggtggcaatgacaacctcctgcacatatgggatgtgtccatggcatcctctatgccgtctgctggccgcacccagtggttacacaggcttgaggatcacttggctgctgtgaaggctctcgcgtggtgcccattccagagcaacctgctggcatctggtggtggtgggagtgaccggtgcatcaagttctggaacacacataccggcgcatgcctcaactcgatcgacactgggtcacaagtgtgctcgctggtctggaacaagaatgagagagagctgctaagctcacatggattcgctcagaatcagctcactttgtggaagtaccgtcaattctggaacaaaaatgagagagagcttctgagctcacacggattcacgcagaatcagctgacattgtggaagtacccgtcaatggttaagatggctgaactcactggccatacttcccgtgtccttttcatggctcagagccctgatggtctcacagtagcatcggctgcagcagatgagaccctgagattctggaacgtatttggggctcctgaagcacccaagactgcaaccaagggttcccacactgggatgttcaacaattccaaccacattcacatccgttgaggaacacaatacccttggttctgtgatccagtcataacttacaaagaagcagacttggtgtgaagggtcatttgcaggagagatcatcttacattattagcagaagagttagattttgacatgttgtatataaggttttgtgctatgttgataacaattttatgtacatcaagaccggtttgatgtattgattggcgtagaaaaaatgtaaaaaaattgcttttctgccagtaatatacatttttatatacttgccaggcttttcttgtagtaagttcctctcgttgtgtagtaacttgtaatttgattgattttactctcgagccaattgagatgtctggtaaccagccc

SEQ ID NO: 36038 - DNA, 171 bp, Oryza sativa
  Clone ID: PAT_MRT4530_39901C.1
ctagctgagtgataattggtgcaccactattaataaacaccagagcgggtaagcaggcaggagaaaagtaataacgaaacaacgtacatgataggcgcaggcataactggatacatgaggaggataccgccagaggtatgcccatgatggccaccgcggagatgtgcagca

SEQ ID NO: 36039 - DNA, 378 bp, Oryza sativa
  Clone ID: PAT_MRT4530_39902C.1
atggcgttgtcgtcgtccccatgcacgaaggcggcaacctacacgctggcaaatcatgcaagatcacaggatacagaatcgccgaaggcccatgctaatccaaatttatttccaaattccaaaccaatgatcttgcatctcccattatttgcctgttacatgtggtttggttttgctaagctgctagactgtttcagcagtgaaatattggagaatgatctgttcttcggtggaaagattgaggtcgttcaaagctcgggaccgaaactgacatgcatgatagtggtcatagaaattcagcaacgaaacatctgcaaaataattttggccacaatcatgccctgcttaggtgtaaaggacgaaagtttccatgcttag

SEQ ID NO: 36040 - DNA, 306 bp, Oryza sativa
  Clone ID: PAT_MRT4530_39903C.1
gctgacggtgccggtggaacccacatggccctacgccgcgccgatggggcggttagaagcggaacaacatctggcgctggtgctggaacgggaatcaactagaactcggtgctggtggagctgctggactcgcattacacggagctggcggagctggtggagaaggccctgctgatccagacgctggaggacgccgctggtaagcacaacgaaaccatcttcgagccggggaacgaggcgctggagcgtgacctggacccggagttaaagcgcttactgctcgagccgaggaaccttaagatggtc

SEQ ID NO: 36041 - DNA, 466 bp, Oryza sativa
  Clone ID: PAT_MRT4530_39904C.1
caaaacccccaggacttaaaacttaaaaatgggaacaaaaaaaacccggggggcccaaccccccaaacaaaaaaaggggggggggggcccaaaaaaaaaaaaacccggaggccggccccaaagttaaaaataaccccccaaaaaaaagggcccgggccggaaggggggtttttttttaaaaaggaaggcgtcccttgggggaagggaaacaagggaggggcagccaacccgggcccagaaaaaaaagaaaagcggtccggcccgggaacagaaaagggggggcccccgtaacaaaaaaggagaaaaaatttgggccccaacccaaccccgaactgggaaaggggcctaagttttcgaacacttggcacccgggggccccgggggggcccttgaaaaagccccccagggggtggccgttgccctgaaccgccgggcggggccattggctccccaccaaaggccccaa

SEQ ID NO: 36042 - DNA, 6487 bp, Oryza sativa
  Clone ID: PAT_MRT4530_39905C.1
ttagttcgggcagtgtttcagtgcgttctcattagcctcctttgccttggctacatgaccaagccggtcttccatttgcccaagcattaaccacaatttgaagaatgaggggaataacttcagaccttcctccaacagctttctttcctcgtctacattccctaactccctttcaacaatggcagatttcatccagaccctctcagtgcctcctctttccctggcctttgacaaaagaattcttgctctctctggttcattgttctcaaactcaagcttgaaggcagctagccagatctccttgaggagaatataaagagactcctcagtcccatgtctcttctcaagctgagccgctttcaaccaaatactcttcttgaatttgaagacactgagcacatgtgcatagatggcaggggctgtctcaactgaaccacgcttcttgcattcctcagcatcagcaacccatgtgcgttttctgtcttcatcatcaacaccaacgccaatagtgttcttcacaatagcctggcaagtcatcacagatccagcatgctcagcagcttctgcttcctttagccatgcctccctgtcaatacccaatccttttccctgtaaagtttttatacttctctcaatcacctcgtttactgactcggtgtttccattagcttcctccagctttgcagccataatccagatggcaggctccttagggagcttttcttttgccttgttaagtaccttctttgcttggtcatacgtctccagcctcgctagtgcaagccacagttccaaatggaatgggcagcactccacagccctgtgaagcaacagccttgcatcctcctcatttgcaagctctactactgatttccacagcctgactgaatcaggaatgtgttccaacccttttctcaaaaccctgctcttattcaagtcactagtttccaacttcgctgcctgcaaccacagcttcacagaattgggaatttccttcacacccctggcaatcacggcctttgcctcatctgggctggccaaccggcatgccttgagccaaacatcctcattcgtggggcactcctcgcagccacgctggatgagctgctgagcaacctgaagcttgccggcaacctcttcaagcctagcagcagcaatccatcctggtggatgctttgggttcgtctgtatcactgacttgagcaacaacctggccttctttatgtcagaaatttcagcatcactagtaatcttcatactcttcaggttagtcaggtaaccccttggatcaacaatagtaacaccggataccgaatcggataacctgtccagcttcaaagaaagcacggtgccacggccttcgccgacggctgtcagatcagtaaccggagtctgcgcccatggcgtctctgcgccagcggcggctgcacggctcttggggtccaatgcggtgacatgcccctgctcctgccgggccttctcgagcagggtgtcaggcaccgggacaaagctctcaaatcgcctcttcttgttgcgacgaagcgaataatccccaatctccggtatgctctcccactcctgcgctgacaaatcgaccaatttccgcttcagatcggcgaattgctcggtgattttagggttggacgcgcggtacctctcgatctcctgcttcagccgcgcctctcgccagtccttgcggcgcgagtccatcctccggtcgatgccctcccagaccgcgtccgcctcgcggtcgtcgtcgtcgtcgtcgtggccggcgttggagaagaggccggcgtcgttgccctcgaactcgtcgaacttctggttctcgtcgtaccccttctcctcctcgtcgccaccgccatcgccgtcgccgtcgtccccaggcggcttcccacggccgcgccccatggcgggcccgatatccgagcgggtggtgaacccggcggcgccgcgtcccagtctcgccacgtagttggggggcggcttggagttgaggaagtcgtagcgcgcggcgcaggctgcgggtggcggtggtggtggcggaggcgccgagggggtggtcgcggtcggggaggccatcccgccgcctccgaggagggggaggtggacgagcagcgaggaggagggcgagacccgaagggacgccaggagaggggacggcacggccgggaggaggcggcggtgggagaggtagagacgagggaggcggaggcaattcttgttgaaacttaccagcaacagagaaagtgatttagttggttccacactgacaaagtattgcaatgctttatctgcatgctcctcagtaggagagaagaaagccacagcatcaggatcagtagatccagatcccgatttgctcatgttttgcaggttcagctccttagatggatccacaaagtcatcattcataagggttgctaatgatgcagctctttttgaccaatccagacgccggtatgtgaatattttcatgttaggaacttcattttctagattctttagtatctcagataaagttctttcttcaagctccccattgctagcaggcagccttggctttttagcgagaccaggttcaccatcatgcagatggttaaacccttcatcatctagatgaggaaagaaccttcttttctggtcagtgaaggccttgagagctaacctcccgagcgcgcggaggtcgtcgaagtggcggtgcatggcggcctcctcctgggcgacggcgagcgcggtcttctcaacgtgctgcggggcgctgtgcgggggcgcgtcgccggcgacgaagagcgcctcgagcagacggtccgcgcccagccggatgtccgcgatgagccgccccgcccgccccagccgctccatcgcctgcgccacctgcttcggcggcgcgtcacccctcgccccctcgtgctggtgccccgtcgcccccgccgccgccgccgccgccgccgccaccggcgcggccaccaccgccgacgcctgcgcttgctgcatcttcctcttctccccttctcgcttccgactcgaaacgcctcacctaaataagcccatatccaaacaggcccagaaccaatacaagcccatatctattcaggcccagatccaaacaagctcgtatccaaattcggcccacgccatcggcttccaacgtttcgaacgtttgcgcttcgcttcccacgcggcggcggcgccaccaccaccaccctccgccatgccgctcgccggcggcgagccccgaccaccaccgccgctcccgtcgctggtcaagctcggaagggccgtcacgccgcgccgcgtggacatcctactggcggcgctcctccgccggcggaggcaccgcctcgtcggcgcgctcgcctcgcaggcggtcgccaactccgtgcgccccaccgcgcgcacccacctcctggtcgcctcggcgcttctagattcttcccgtccgcgcgacgcggcagcgcgcctcgcgctcgccggcccggcaacctcctccgcgcgccgcctctgggacgcgctgctccgccgggcctgcgcggtgcgcggcgatgctcgccgcgcgctggaggtgctctccgccggcgtagaggagtgcgggctcgtgttttctccgtccacgtatcgtgtggccctgacgatgctgtgtgcccgcggtgacatggagaccgcgctcaaggtgttcgacgtaatggctgcagcggggtgtcaggtggatgatcgtgtttgcagcgtgatcatttcaggcttctccaaggtcgggaaggctggggatgggctggaattctataggagggtgaggagagagttcaatggatttgagccaggcttgatcacattaaccgcttttgtcgatgtgcttggccgtgtagggagaactactgaggcagcacaattggtaagggagatggaagggaaggggttggttggtgatgctgttttatatggcagcttggttcatggatacatgagtagcgggttattgatgaaagggctccgtgagcatcgggtgatgttagataagggcattgcagctgatgtagttagttatactactgttattgatggactttgcagagaacgtagtgtggaaaaagtgatgggattcttggatgagatgaaccgaagggatgctaagccgaatttgatcacttatacatcattgattggtggtttctgcaagagaaacaggttggatgatgctttttctatagtgaggaaactggaacagacaggagtggtggtggatgaatatgtttactcaattttgattgacaatttgtgcaaaaagggatatttggatagggctttctctttgcttgaagagatggataaaaaggggataaagattggaatcgtaacatacaattcagtaataaatggtctatgtaaggttggtcacaccaagaaggctgttgaaatatatgaaggtattgctgctgataacttcacatatagcacgctgttacatggtcacattaaggtagaagatgcaactggtgtaatggcaataaaaggtaggcttgagagcagcggtgttacaattgatgttgtcacatgcaatgtacttatcaaagcattatttatgattaagaaggtggatgatgcctgcagcttgtttcttagaatgcccgagatgagattaaggcctaatattgtcacatatcatacagttattgacatgatgtgtaaacttggagaaactgacagggcactgcagttgtttgatgattacaaagaagacatcttgttctcctctacaatagtacacaattgcctgattatagcattgtgtaatggaggaaaggtaaacatggctgagcagatttttaatgatcttatccaaagaaatttaaggcctgattcctgtacttacaagaagttgatccatacacactttaaagaaggcggtgaacatggcgtgctgaatttcattcttaaggtggatggatctgaaattgacttattttcatctctatgtaattatgcttccgctttcttaagcacaagagattgctaccaaggagcattggatgtttacaagcttctaagaatgaaatcatttactgtaactagcaaaacatgctacaggctactcaaatgcttgctccgaaatggtcatgaacagaccatccagccattattaagtcagttcattaaaattcatggcctggatgaacctagaatgattaatatgctatcttgccacctcagcaagaacagtgttggtgaagctattgggttttccaattacatgaacaatggccgtgttcctgtcagtgttctaagagaagctgtatacacactaaagagggaaggtagaattctggatgcatgcaactttttgaaggaagctgaacaaaatggttattcagtggatcttgccatgtactccatattagtggaaggcctttgtaaaagtggttatcttgagaaggcattagacctatgcgaaagcatgaaagaagaagggattcagccaaacattgtcatccataactctgttctgaatggtttgtgccagcagggatgccttactgaagcattccggctatttgactacctagaaagcagtgaagtgcttccgacactggtaacttactctatacttatagctgctttgtgcagagaaggttttttggatgacgctcatgagttgtttcagaaaatgtccaccaagggtatcaaacccactacacgtgtttacaacttgctaataagtggttattgtaactacgggttaactgagaaagcactggagcttatatcacattttgaggaaatatttctattcccagacgctattacaattggtgcaataattaatggacactgcctaaaaggtgacattgaatcagcattaggcttctttagtgaatactatcataaggagatggttccagattttgttggcttcatgagcctggtcaaaggactctatgcaaaaggaagaatggaagaatctaggagcatcttgagagagatgtttcagtgcaaagaagttgcagagttcataaacagtgttggggataagatccaagcagaatcttttgttggccttctattttctgcctgtgagcaagggaggattgatgaggtcgtgactatcctaaatgaagtggcgctcatgtctgtatcctcttcagattctaataattgtagcacgcttagtcacctgaagaacgtagagacacctgtggcttatgatcgtaatatggataatcctggacaagttttatgttcaactacttatggtgtttctagcaactgtcttcatggaatttctgaaggcacagttcaacccacaatagatggagctgagaatttatgcacaccaagtgatgatactgatatttactatgataatttgctacggaattctttccatgatgactttgacacatattatccagcaatcgcttcactttgcttaaaaggggaactgattaaggccaacaaagcaattgaagcaatgattcagaattctagttga

SEQ ID NO: 36043 - DNA, 2313 bp, Oryza sativa
  Clone ID: PAT_MRT4530_39906C.1
atggcgagtcctatggaagctgtagcccgttccagcctcgtgctcgcacctcgccggcggcgagccctcggcctcctcccggcggcggcggcggccgccccattcgtgctagattgtcgccggcggcataacggaggaatgcgtcgtcctcatgtcagcttcgcctgctcggccgagctcgacaccggtcgccggcagcttccttccacggggactcgagcggtgatgtcgtcctgtcccggatatgttgaggggaggatggtaggagaaaatacaagtcagataaacatgggatgggaggctagaatacttaggcacttggagaacccggagttcttaccatcttcatatgacatagcatgggtggctatggtgccattgccgggcactgatcatcttcaagctccatgcttccctgaatgtgtggaatggatactacaaaaccaacacagtaatgggtcgtggggtgtcaatgaatttgactcatcagccagcaaggatattctcctatccactttggcatgtattattgcacttgagaaatggaatgtcggttcggagcaaataaggagaggattacattttatcgcaaagaatttctccattgttattgatgaccagattgctgcacctataggcttcaacctcacattccctgctatggttaaccttgccattaagatgggtttggaatttcctgccagtgaaattagtattgatcagattcttcacctccgtgatatggaattgaaaagactggctggtgacgaatctttggggaaagaggcatatttcgcctatattgctgaaggtctagaagaaagcatggtggattggagtgaagttatgaagttccaggggaagaatggatcattgttcaactccccggctgcaactgctgctgcattagtccacagatacgatgataaagccctgggatacctatattctgttgtcaataaatttggaggtgaagtaccaaccgtgtatccgctaaatatattttctcagctttcaatggtggatactctcgtcaatattggaatatctcggcacttttctagtgatataaagcgcattttggataagacatacattttatggtcacagagagatgaggaagtaatgctggatttaccaacatgcgcaatggcatttcgccttttgcgtatgaacggatatggtgtttcctcagatgacttgtcccatgttgctgaagcctcaactttccataactcagttgaaggatacttagatgatacaaaatccttattagaattgtacaaagcttcaaaagtcagtttatcagaaaatgagccaatcctagagaaaatgggttgctggtcaggtagcttattgaaagaaaaattgtgctccgatgacatccgaggaacaccaatccttcgagaggtagaatatgctctcaaatttccattttatgccacgctggaacctctagaccacaagtggaacattgaaaattttgatgccagggcttatcagaagataaagaccaaaaacatgccgtgccatgtcaatgaagatctcttggctttggctgctgaagatttcagcttttgtcagtcaacttaccaaaatgaaatccagcaccttgaaaggtgggatcagtatcacaaagttgagttctactctgagaatgtaaaagcagtatttttcgctctatattctacggttaaccagcttggagcaatggcttccgcagtacagaaccgcgacgttacaaaatacaatgttgaatcgtggttggattatttgaggtctttagcgacagatgcagaatggcaacggagcaaatatgtgccaacaatggaggaatacatgaaaaattcaattgtgacattcgcattgggaccaactatactcatagcactgtatttcatgggacaaaatctctgggaggacatcgtgaaaaatgcagagtatgatgagttgtttagactaatgaacacatgtggtcgtctccagaatgatattcaaagctttgagagggaatgcaaggatggcaaactgaacagtgtgtcactgcttgttcttgacagcaaagatgtcatgtcagtagaagaggctaaagaggcgataaacgagtctatatcatcatgtagaagagagttgctacggttggttgttagagaagacggtgtcattcctaaatcatgcaaggagatgttctggaatctttacaagacaagccatgtgttctactctcaggccgatggattttcctcgccgaaggaaatgatgggtgctatgaatggagtaatctttgagccactgaaaactagaggcaactag

SEQ ID NO: 36044 - DNA, 138 bp, Oryza sativa
  Clone ID: PAT_MRT4530_39907C.1
atggtgattaagatggtggtgaggatgatgttggtgacggggtcggcgaggcccaagcagcatccggcctcgccgaggcagtcagcgagctccgggatgtcgtccaggggaagccggcgcgccgcctcgtcgtaccac

SEQ ID NO: 36045 - DNA, 167 bp, Oryza sativa
  unsure (1)..(167): unsure at all n locations
  Clone ID: PAT_MRT4530_39908C.1
ccacgcgtccgggagtagtcgacactacacaagctttgagaacaagtaaggacacagagaactaattgcgttaacgtggactctccattgcagaataatttgatggaatattactgtatggttgattttgttagggaaggttatcttggaagtngccctgngttccg

SEQ ID NO: 36046 - DNA, 210 bp, Oryza sativa
  Clone ID: PAT_MRT4530_39909C.1
tgacactataagagatatgacacgtcatgtgcacgcacgcgagagcggatactctatagagcgcgcgctctttatttataactagcggacacgtggaaaaaaccgagtatcttgaccggggactggaggagttcaagctacacactatcctgagaaaattttacgatagacaatgaacgagggatatttaaaagctgtgataaaactttg

SEQ ID NO: 36047 - DNA, 1578 bp, Oryza sativa
  Clone ID: PAT_MRT4530_3990C.1
atgtcgtcgtcgtcgtcgtcgaggcggtgggcgtcggcctccgttacggacctgtcgtccgccggccggtcgcctctccccgccgccgcgctctcccccgtccgcccgagcgcccgccgctcccccgccgtgtcgcgccccgatccggcgccatccatcgcccgcacgatatggccttcctcctcctcctctaacagtggcaacacgagcactaggaaggcgtcgccgtcgccctcgtcccctgcgccagccgcgtcaaccccctcctcctcctcgtctgtggccaccacgctcgccgaccacctcgccgaagactctctggacgcgccgcctgctgcgctctcgcggcagcggagctgcaccgagctcccgcgcttcgccgacgcggacgccgaggcgaggaaggtcgtcgtcgccaggtcgggcggccacgcgagcgcgatcggccgctccatgcggctcctcccgtccacgaggccagccggcgtcacactcaccccgggccgcgtcgcgccgtccgacctccgcaggctcgacgccggcgccgacgtcgccagctccgggtcggagtgcagcgacgcctccaggggcggcggcggctccacaccgaggacgacgacgaagctgcccaagccgccgccctcgccgttgatagcgcgaaccaactccacccgcctgctcgggtccagcaacacgcagtgggcgctgtcgccggggcgacggagcggctcgccgctgaagacgacgctggcgacggtgccggagctcaagggcaagacgaagagcctaataggccttggatggggccatctctttagccggaggaaggcggcggcggcggaaacggccaccggagcgcaagcaacggcaacactgtcctcgccggcgtcgcggcggagcggtggaggtggtaatagggagatcggccatcagatgaagatgatgcactgccggctgttgcagtggcgcttcgcaaatgccaaggcagaagccgtcagcaagaacaagctgtctattttcgaggtggaattcatgggtgcatgggctaggatatcagagctgcaaggtaaagtggcaaggaggcgtgtacaactcgagaaagagaagctcaaaatcaagttgaattccgtactttcttctcagatgagaggtttggaaagctgggggcagctggagagcaagcatgctgtggctttggattctaccgtagtttgcacccaggcagccatttgtaagctccctcttaccaatggcgcaaagatctccctgccatcgatgggaatcatactacagcaggcgcttgacctcactatgaccaccaagacaatagttcggtcgtttactccaatggcccatgataccacattgctgatcacagagctagtagctgtggcaagagaagagcatgctctgttgcaagagtgtctcgagttgctgggccgagtgtctgcattgcagaccatcgtcgcgcttgagataaacgaacttgttaacgatatcatcgtgtcctatcgccgcggccactccgccctagccctcccgccgccaccagacctcacctaccgccgtcgtcgctga

SEQ ID NO: 36048 - DNA, 2002 bp, Oryza sativa
  Clone ID: PAT_MRT4530_39910C.1
ttgttttggcacacctttgcgtcctccgctttccatctccacctccaccgcactaccagtaccaccacgtacgtccaccaccacctacacctccgccgtgcggacgccgccggcttcccaatcccagccgcgacgcggaggaggaccaaattcctcccccacccctccgtcaaatctgcgcgcaccacctccgagatttgaggactggagatccaagcagtctgttatgtcactgcggaggcataatgctctaagttcacttaaggaaagaactgctggaatttttgcattcctaggaaaccttgtgcattctgaaaccttagagagatcggtgctgcatgaaatgaagttgacaactggaactcttcatcctatgggaccatttctgcaaagctggaacaagatatttgttttgtcatgtatctttgcagtttctgtggatccattgttcttctatatcccggttatcaatgaaaacaatacatgctggtatttggataaaaagttggaaatcacagcaagtgtcctgcgctttttcacagatatcttctatatactccatatcatatttcagttcaggacaggctatatcgcgtcttctcctacaacttttgatcggggtgtcttggttgaggatagatatgcaatagcaaagcgatacttgtcaacatattttctgattgatgtctttgctgttctacccctccctcaggtggttattttggttgtgctacctaatcttcgaagctcagaggttgcaaaagccaaaaatatcttgatgtttatagttctatgccaatatgtgcctcgactgatcagaataagaccactgtatctccaaatcacaaggtctgctggggtaattacagagacaccatggcctggtgctgttttgatccttttaatttacttgctcgccagtcatgtccttggagcactctggtacttgctttccattgaacgcaaagatgcctgctggagagacgtgtgtcgtaataatagtacaggctgtaatcaggcatacttgtactgtggggataaggaaaacatattcttacagactgcttgccttccaatcaactcaaacaatatagatccgaactttggaatttatgtgccggctctaaataatgtctcacaatcaactgattttttggcaaaactattctattgtgtttgttggggtctgcaaaatcttagctctcggggccaaaaccttaagacaagcacttacgcatgggagaatctgtttgcactttttgtctcaatatcaggcttggttctgtttgcactgctaattgctaatgtgcagacctatttgaagtcagcccatttgagagaagaagaaatgagagtgaaaagccgtgatacagatcaatggatgtcatatcgactgcttcctgagaatctcaaggaacgaatacggcgtcatgaaaaatatagatggcaccagacgagcggggttgacgaagaactcttgcttatgaacctccccaaggatcttagaagggctataaaacggcatctttgcttatcacttcttatgagggttccaatgtttgaaaacatggatgatccgctcttggatgccttgtgcgaccacctaaagcctgttctatatacagaaggcagctgcataattcgtgaagaggatccagtatatgaaatgctcttcatcatgagaggtaatctcatgagtatgacaactgatggtggaataaccggcttcttcaaatctgatgttttgaaaggtggagatttctgtggcgaagagctcctgacctgggctcttgaccccacatcagtttccaggctccctagctcaaccaggacagtggagacaatgtccgaagtcgaagcttttgccctgacggctgaagacttgaagtttgtggccacccagttccgacggctctaccgcaaacagctccggcacacgtttagggcccctttgaattgtagtagcgaaatagtggaggaacaggaaaacacattattctga

SEQ ID NO: 36049 - DNA, 488 bp, Oryza sativa
  Clone ID: PAT_MRT4530_39911C.1
aggcaaaggtgacaagaaggccctgttaatggtacgggcatttacgccagaccaacagaacaaaacaatgctgctaaagggagaacaaagcaaaaaacgcatcacgacacgtaaaacaaatcaaacaagacaaggcgcaagtcgttacaccaccctacacatgtaccaccaccacggaagccgcctttatgggctgcaacatacatcacgagatgcatgctctgatgctggcatgccacctgttgcagcgcctcctgaacggacatgctcgaaccagctccatgtacactttgaaatgagggcttgtccagatagctccgggtggagcgcggtccaggctagcttgggcacgggagccggatcacacagcacccggcgattggccgggtactgaccgatgagggagcagcactacagctgcacattgcaatgcatggacgggaccgccctgccttccggcgagatggtgaaggcgacacacatgagcc

SEQ ID NO: 36050 - DNA, 2592 bp, Oryza sativa
  Clone ID: PAT_MRT4530_39912C.1
atgatgatgggaagagaggacaaatatgtgagatttgaggactggagatctgagcagtcagttatgtcaccacggaggcataatgctttaagttcacttaaagaaagaactgctggagtttttgcattcctaggaaaccttgtgcattctgaaaccttaaagagattggtgctgcatgaaaggaagttgacaactagaactcttcatcctcagggaccatttctgcaaagctggaacaagatatttgttttgtcatgtatctttgcagtttctgtggacccattgttcttctatattccggttatcaatgacaacaacacatgctggtatttggataaaaagttggaaatcacagcaagtgtcctgcgctttttcacagatatcttctatatactccatatcatatttcagttcaggacaggttatattgcgtcttctcttacaacttttggtcggggtgtcttggttgaggatagatatgcaatagcaaagcgatacttgtcaacatattttctgatcgatgtctttgctgttctacccctccctcaggtggttattttggttgtgctacctaatcttggaggctcagaggttacaaaagccaaaaatatcttgatgtttatagttatatgccaatatgtgcctcggctgatccgaataaggccactgtatctccaaatcacaaggtctgctggggtaattacagagacaccatgggctggtgctgttttgaaccttttaatttacttgctcgccagtcatgaagtcataacagtcaagatttacaaaataaaagtcgtaatattggtccttggagcactctggtacttgctttccattgaacgcaaagatgcctgctggagagacatgtgtagtaataatagtacagtctgtaatcaggcatatttgtactgtggggataaggaaaactcgatcttacggactgcttgccttccaatcgactcaaacgatatagatccgaactttggaatttatgtgccagctctaaataatgtctcgcaatcaactaattttttggcaaaactattctattgtgtttggtggggtctgcaaaatcttagctctctgggccaaaaccttaagacaagcacttatgcatgggagaatctgtttgcagtttttgtctcaatatcaggcttggttctgtttgcactgctaattggtaatgtgcagggatatgaaactaaagatatggaaccttgtgctaggtttcgagtgttcattccaataccatttggagataagactagcataatcttgacctatttgcagtcagcccatctgagagaagaagaaatgagagtgaaaagccgtgatacagatcaatggatgtcatatcgactgcttcctgagaatctcaaggaacgaatacgtcgtcatgaaaaatatagatggcaccagacgagcggggttgatgaagaactcttgcttatgaacctccccaaggatcttaggagggctataaaacggcatctttgcttatcacttcttatgagggttccaatgtttgaaaacatggatgatcaactcttgaatgccttgtgcgaccgcctaaagcctgttctttatacagaaggtagctgcataattcgtgaagaggatccagtaaatgaaatgctgttcatcatgagaggtaatctcatgagtatgacaacgaatggtggaagaactggcttcttcaactctgatgttttgaaaggtggagatttctgtggcgaagagctcctgacctgggctcttgaccccacgtcagtttccagcctccctagctcaaccaggacagtgaagacgatgtccgaagtcgaagcttttgccctgagggctgaagacttgaagtttgtggccacccagttccgacggctacacagcaaacagctccagcacacgtttaagttctactcgcagcattggagaacctgggcagcctgtttcatacaagcagcctggcataggtactgcagaaagaagatcgaagactctctacgcgagaaggagaagaggttgcagttcgcaatcgttaatgacggtgctacaactctcagcttcagggcagcgatatatgcttcgcgtttcgctggcaacatgatgcggatcttgaggagaaatgccacccgcaaggctcggttgaaggaaagtgtgcctgcaaggttgttacaaaaaccagcagaacccaactttgctgcagaagagcagtagttctgtttaccacgaatgcgtaaggaattttttgtgcatgggcttgtgcattttttacttgctgatgtttttgctttcagttgacactagacctacaaattaaggagaggaaaaaatcgcaataggtgtctgtatctttctgtaagatctgtatatgtgttcgtgtatgataataggtgatacgtgtaattattaatcaggtgtttatatacaaattgtgtttatagtagtgtagtgagcattccatcccgtgttcccatcaggctcttgaagcccaggcacggagcaagatcacattgtaacggagacacttgttttaactcacatatattgacatgatatagaattaatggattgttaaaaaaaaaaaaaaaa

SEQ ID NO: 36051 - DNA, 544 bp, Oryza sativa
  Clone ID: PAT_MRT4530_39913C.1
gtgggaacaaaaacatttgctccaaaaattttcattgacgggccttgacctgacatctttttttccgattcttttcaaaacttacttggtttcgtctctaccattattaaaagattaaccgaccccttgtccttatgttcatgccaaaattttaaaacaggaaaagcccatcccaaattgtttccttgaactccggaaaaaagtttacagtccattttagtttaagattctggtggaaaaagcccattcgaaaaccatggtcctttttgtgcagcaagatgctttttcacctgagtttttgggattaatggggcaaccctcccatcttttatgtgtcccacgccaaaatccgaaagaagacccttaggaatcctttttatgatgcctttttttattaaagtaatacaggtttctttagctccgggagggtgtggactttggagcagctcttttttttcctaaaaaaaaaatatgcccccccttgatggggttgtcaacctttttaattcccctccgcccccagtttttttcgctttgtctttta

SEQ ID NO: 36052 - DNA, 1035 bp, Oryza sativa
  Clone ID: PAT_MRT4530_39914C.1
ttttttttttttttttgcatcataaacaaagtgtgtcatccacattccacagcatatctccggtatgtcacaataaatccgaacattgagtaaatgtatactagttacatttaactatgatattcttgctcttggcacagctgatgataatacatagacatacattacaagtggagccgtacaattaacactgctcggtttggctgcaggatgcaatccagcagctaccaaaaataattttacctgtagaagaaaaaggaaatacaacgacatgtcaagctatcaaatggttgtgactctaggtctagagtcctgccaacccaattggcgagctctttgctcccataatgctgtgagtttcttttccttcgaaattgccgcttcagaccgctccctagcttcctcgcaagtctctgtggctgcgttacacttctctgcctctcgctggtattgagtagcttgtcttttagcttcaacaagggtggcattcatgtgatggctatgctcctcagctacaatctgctgcagcttgagctcctcattaagaagatcaacaaactgcttctccatctctttactaagttcagggtcatttttgccacaacctgaagttgagaagttgacaagcccgggggcgatggactggagggagagcggcggcgggcagtcgcagctgcagggcgggcaggagggggagacgacggccgcagcggaagcggagaccgaggaggaggaggaggaggaggcgaagcccttcttgtagcgccagtagaaggccggcccggagacgccgagcgcggaggccacggccaggatcaccaggcaccaccgcccgcacgccgccgccaccgccgcgcccccgcgccgccccatcgccccagccccccgcccgcacgggcgggcgggcgggcgagcgggcaatgcgtgtggagcggagcggggacgccgagctcgcgctctcctgcttgctgctgccggattctttaccgtttcgtctcgtcccgcggcgtgtgagtgagtgaccgggcctcgtgc

SEQ ID NO: 36053 - DNA, 279 bp, Oryza sativa
  unsure (1)..(279): unsure at all n locations
  Clone ID: PAT_MRT4530_39915C.1
nnntnnnnnnnnnnnnnntaaatatgaaagacaactttttttctatttatatcacccaaagtttcacatgtcacatatgatgatatctgagcttatttttatcttccgaaccactatactgttaaaactcattacaagacaccgcaggtggtatggtctggtgcaccatatcctaggtgatnatattagatgacttaaagcacaacttgcttgccattcataagtaatacaatgtgagtgatgtgcttgctacatgtattcttataatgtgcacaccag

SEQ ID NO: 36054 - DNA, 729 bp, Oryza sativa
  Clone ID: PAT_MRT4530_39916C.1
aggaaaagggatttattgcgtcagcggctagggtttgcggtggaccgggcgcacggcggcggttcacgagaacggacggccgagatcgatccatccgaaacggacggccgagatcgatcggtccacgaccggctcacggcaaacagccacgatgacgtcagcggtgacgtcattgatgacgtcagcaccggcggcggctcggcggctcgggcgcgcaagctcgctggtgaacgacggcgctgcggcgcgaacggagaacacccacgggtagcggacggcgcggcgaactcaccggtgaccaaagaagcggcggaagatcaacggacggcgacggcgtcgaagttgaagctgcggagaagatcgggtcgacggcggcgacggtgctccggcggtcaacagcgactgcgaaggggcggacgaggacggcgacgcgatggcgatcacgatgacgtccttcccgagcgacggcgacgactggaacgacggcggcgcacggctggagcggcggcgacgacggcggcgctaggtcacacagcgctaggacgcttccgacggcgagagacgaaagcaagggtggcgacgggtagaggagacaccggggatccttttaaaggggctagggggcggcggcgaaggcccacggcgaccggcgacgcgaaggaaacctcgggttcgggagagagagaggaatccgattcgatctcgaatccatcgatttccaaaccgaaa

SEQ ID NO: 36055 - DNA, 803 bp, Oryza sativa
  unsure (1)..(803): unsure at all n locations
  Clone ID: PAT_MRT4530_39917C.1
tcaaatgtcctcgtcccaaattttcagatcttttggaagcatctcacgctgtatgcgtgcaaggccctgaggatttctgcttgcatccagcatcctgtccaagaattcaatgaactggcgatcttcatgagcaacctgaggatatgaaaacctatcgaagcgatactgatccttgatcgtcgtgttgatttgcccccacgcgctgctgcagaaggattgatagcccgccggagaaagacgacggagcccctccctatggaacagctgcagctggcgatggctggagaggcggcagatcgccttctccaccatgcaagaaagctcgccgctctccgtgttgcggcggccaatgacagcggctatcgtgtcctctccagctatgtcagtatcagtgaaagctaagtcaatttgggggccttcctcgtagctgctgacctgtatccctgctttcactgcctcacttgcactgatcgtggacgagggtattccaaggatgccagtgagagaccctcgccggaggcgagtgccgaggtactggatggcgaggccggacgccgggccggagccgagcccgaccaccatgccgctctccacaaacctgtccaccgtgagcttggcggcgtcgaagaggccgacgacgtcggcgtccgcggcggccgcgcaggtcacagcacgtctccggctacggcggcgcacggtggccggtgcgacgttgccgatgcggcgggggcgtgggcacgggcggagccgcgccgaagaggagctcacgcttgccccggcaacggcgtccatggcgtnccgcg

SEQ ID NO: 36056 - DNA, 228 bp, Oryza sativa
  Clone ID: PAT_MRT4530_39918C.1
atgacgacggttggcaacgaagaaaaccagaacaacgaaaatgtggccaacaacgatgtggacccaatagagagagaaacggcaaaagctagctctagtggtgaacacgaccgggaggaacgaaagacggagaaaaatcaactaacactattcatcgtcttccctaacggtgaagccgacgtgcttcacgaggatgcaccggggagaagggaggagagtcagggataa

SEQ ID NO: 36057 - DNA, 3168 bp, Oryza sativa
  Clone ID: PAT_MRT4530_39919C.1
atggagtgcaacaaagaagaggccctcaaggccagggatattgctgcaaagaagatggaaagcaaagactttgttggtgccaaaaggatcgcgcttaaagctcaaaggatttttccagagcttgagaacatatcccagatgttaactgtctgtgaagtacattgtgcggcagaagcaaagatgaatggactattggacttctatggagttctccaagtggatgtaatggcggatgaagcaaccattaaaaagcaattccgcaagcttgctttttcgcttcaccctgataaaaacggtttcgctggcgctgaagctgctttcaaattagttgcagaagctcagtcaacattgtctgatcgaacaaaacggcgtgcatatgacatcaaatggagaattgcatcaaagcaggctacgcaaccaaagcagggtgcccaaccagcgcaggctgcccaaccaaaacagtgtacacaaccaccgctggctacaaaacgaaatcagagtgcacaaccaacgcataatacacagcagagtgcacagccaaagcagagtacacaaccgatgcaggctactcaaccgaagcatgctactgaaccaatggagaaaacagatgcaaatagagctagtaatgctaaggaaggatatggatcatcagttcgaccacccagtgctggagaagcattctggacaatgtgtgttaactgtaaaactaaatatcagtactactccaatgttctgaatcataaactccgttgtcagaactgcaaaaaagattttcgagcagttatgctaaatgaacaggatgtgccttctgtattctcatcaagtgcagccaaaagtgcaggacaacattgtgacgttcccaaacaagaggactgttctacgaagttctcttctgcagcgaatagagatgcaaagcccatggtgaatggaggacaacatgatgaacaaatgaaaaacagtgccagtgtcagagcaggtggtgaggggacagttaaccatacagagtcaatcagaaaagggggacttgaattttcaacactgcatgtatcttctgcagcaaatgttggtagtaaggcagggggaaagatgacatcgtgccctactccagatgttgctggtagacaaaaccctggtaatagggtaaatacatcagcagagacaggtgtgatgaatattcctaatccacggagatcggctaggaggaaggaaaatgctgatgccagcatcatccaggatacgcctagcaaaaagaggcgaaccatattagattggttttcaaatcctgactcaagtcgtaagaaagtggctgatgataatgttgtccgtgctgatggacaagcttgtgaacctcatgtctccagcgaagcacacaaccaccagaaaggaactactagcaatgaaggaaaccaggaaaaaaggaaagatgttgcacatgatacaaatgctcagaagaaatctggcattcctgggaacttttcctatcctgacccagaattttttgacttcgataggtgcagggatgttagtatgtttgcagttgatcagatctgggcactttatgatgaccgtgatggcatgccacgatattatgctcgtataagacgcattgatacaaccaacttcagagttcagttcacttggctggagcatgatgcaaagaatgaggaagaggacaaatggactgatgaagaattgcctgtggcttgtgggaactttttcttaggaaaaacagtggtgtcacaagatgccctcatgttttctcatattgtgtcatgggtgaaaggtagaaaaaggagctcatacgaaatatatcctaggaagggtgaggtatgggctctatataagggttggagtatgcagtggagctcagatgcagataagcatagagcctatgagtatgaagctgtggagatcttgtcaaatttcacagtggaagctggtgctgctgttggccctttggtaaagattaaaggttttgtgagtctctttgcaaaagtaaaggagaaaccatcattcgttataccaccaagcgaaatgctacggttctctcacagtatcccattttttagaacaaagggagatgagaaggtaggtgttgctggtgggtttcttgaactagatactgcatcacttcctagtaacttggacgtagcctttccatcggttactcttgattcttgcatgcctgtctgcaagacaatgaacagtggatttaatgatttcactggatatgagcaaggtgcgctgaaagaaaatttgatgaacgaaggtaaacgtaaagatcattcccttgaacgaaccccagtgcatcaacagagtgctgcctattcctcccccagtacttttgattacccaaactctgaatttcataactttgaagaatatcgatcatatagtaagtttgaacgtggccagatatgggctctttacagtgatcttgatcaatttccaaagtactatggttgggtgaccaaagttgatacagatccgttcagagtgcatttgacttggctcgaagtctgccctcagctggagcaggagaatatgtggttagagcagaatattcctgtgagctgtgggacttttaaaatccgcaactggaggataaagttagacacgaatgatgctttctctcatttagtagaaactagccaagttggttggaaacgatactttgaaattcatccacaagtaggggaaatttgggccatctacaataattgggcacctggttgggttccttccagcaaggatactttcgagtacacaattggtgaaattactgactgcactgaagctagcacaaaagtcttacttttgacccgagtagatggctacagagctgtgttcaagcctgacagtgtaaggggcactctggagatacctacaaatgaaaacataaggttttctcacctgataccttctttccggctgacaaaagaaaacggtggcaaactctgtggcttttatgagctggatccagcttctgttcctgatactttcctgttccggagcggccgctgattggcaaatgttgatgctgactgtcctggagatagtaaggatctggtctcttgtatgctcttctagtagggtgttcatacaccacgcagctgtggtgcaaaccaaaccatgctatcttttctaatgttgaggcctctgtgctca

SEQ ID NO: 36058 - DNA, 1563 bp, Oryza sativa
  Clone ID: PAT_MRT4530_3991C.1
cgggccggccggggcaagccacggccagcgaaaaagcttaagaaaaactgcagttatttaggtaggattaagcatacgcgcacggcgcatcatatcgctcactctgcatggcttcggcttcttctgtcagcttaatgctgctcgtggctgcagctatggcctcagccgcctcggcgcagctgtcggcgacgttctacgacacgtcgtgcccaaacgcattgtccaccatcaagagcgcagtgacggccgccgtgaacagcgagccccgaatgggagcctcgctgggctgtgacgcgtctgttctgctgtccggccaggagcagaatgcaggcccgaacgctgggtcacttcggggattcaacgtcgtcgacaacatcaagacgcaggtcgaggccatctgcagccagaccgtctcctgcgccgacatcctcgccgtcgccgcccgtgactccgtcgtcgcgctcggagggccgtcgtggacggttctattgggaagaagggactccaccactgcgaacgaaagccaagcaaataccgacctccctgccccttcctctagcctcgctgaacttatcggcaatttctccagaaagggactcgacgtaaccgacatggttgctctctcaggcgcacacacgatcgggcaggcgcagtgccagaacttcagggacaggctctacaacgagacaaacatcgactccagcttcgcgacggcgctcaaggccaactgcccacggccgacgggcagcggcgacagcaacctggcgccgctggacacgacgacgcccaacgccttcgacagcgcctactacaccaacctgctgtccaacaagggcctcctgcactccgaccaggtgctcttcaacggcggcagcacggacaacacggtcaggaacttctcctccaacacggcggcgttcaacagcgccttcacggcggccatggtgaagatggggaacatctcgcccttgactggaacccaggggcagatcaggctcaactgctccaagctagctgtggccatctcatcactttcatggttcaatggtttcatcagcaacgccgccgcggccgtggctgcggacgacgtcgacgtcgacctcggcatcctcggcggcgggatgaacgtgtcccgccgaccggccgacacacgcgcgcatcctcggaggtggctgtccacgaagctcttcgtccacggcctcggctggggcaccagagccgacgacctccgctccgcgtttatatgcctaatcatacaaaggtagagccggtgatgacgagtacgtgatggtctcagggaataaagctaggccccgacattgctgccaatagcgtgcagctagctgtggccatctcatcactttcatggttcaatggtttcatcagcaagtgcacggaacagactagagagtgtaggtgtatgcatgtgtgatgtcatgtaacgagttgccatgcaaaggcatgaggattacggacctctctttcgtcgtaatcctagcagctacagatttcaactgtcgtgttaaccaagtgaagtgctagtttcgaatgtattggcccctc

SEQ ID NO: 36059 - DNA, 184 bp, Oryza sativa
  unsure (1)..(184): unsure at all n locations
  Clone ID: PAT_MRT4530_39920C.1
tacgacagacactcacacgggtatgacgtacgacaccctgtacggcctgggttttgtactctgtggactgtgactggtcttgacatactacgtgtccctgactcacttgacaccacctgacttatgacacacacatgacggcctncggttgatccgtggactcntgacacagctgacacattgt

SEQ ID NO: 36060 - DNA, 162 bp, Oryza sativa
  Clone ID: PAT_MRT4530_39921C.1
ttgtcaattattctacttgatctattcacaatggaggtttgaaaataaacagatttaccaaatccaaatagctggtttgggagctggggaaacaggaaaattttgcacaaatttaaaatctggcacagatcttagcattttcattcaagtttctactcttgg

SEQ ID NO: 36061 - DNA, 422 bp, Oryza sativa
  Clone ID: PAT_MRT4530_39922C.1
atggcacgagggccgatggatttgtggaaccagtgggcgacccagatcctggtgctcttgagcctcacgttgcaggttgtcctccacatcttcgccggggtacgccggcgcgaagctacgccggtggagaggttcatcctctggctggcgtaccagctggccgactcgaccgcaatatacgccgtcggtaatctttccctgagcagcaccgcacgagagcacaacctggttgcgttctgggcaccattcctcctgctgcaccttggcggcccagacaacatcaccgcctactccctcgaggacaacaagctctggaagcgtcacctcgtgactcttgtcgtacaggtcctcggagtagggtatgtcctctacaagaacatcgccggcaacgggatgatgatcgtggtggctgccatcctgat

SEQ ID NO: 36062 - DNA, 288 bp, Oryza sativa
  Clone ID: PAT_MRT4530_39923C.1
atggaccaaatgctcgtctccacctacacgaaccgtgctacatccctcgtcttcggcggcatcttcaagccgagcagagccgcgagctacagggattcataatcgagaaaagattatgataagacatcgacaccatcgatacatccacgtcttcacaagtacaatttcattgtcccattatccgcgctcgtgctcgtcaactcaactatcaggaacaatggagaggatccaaaggagagaggattggcgcaggcgggattcggactgcaggacagtgccaacttctga

SEQ ID NO: 36063 - DNA, 2136 bp, Oryza sativa
  Clone ID: PAT_MRT4530_39924C.1
atgtcgtcctccgccagcccgtctgccacgccgtcggcgagtacactgagcctatcgcatgaaaactactactttctcggcccagtcggcaaccctgatcccacagagttctttattggtgaaaccaataggattccttttagattggccaacccagatctaggtcactggaaaaacaccttcaaatcctggccatccctcgagaaaactcgacccgagaaaagttggatcacatggttcaagagcatgtcggctagcaaaagagttcattgggacgagattggaatcggccaagcactcgatctcaccatagccaactcagctaaggatgagcccctaatggcaactgcctcttatttctggtccaacaccatcaacgccttcttgttcaaccaagggccgatgaccccaactctcatagatatcatcatgatcacgggtctggatgtcaccttatcggctaactctatgagcttgaacacgaagaaccaatacgacttcaagaccaagagcataggcggctggtcaggctatgtagcagcatacatgggccagggttccgtcacccctcgagaacatgtggctttcttgctaatgtggctagagaaattcctcttttgtggatcaagctgtggccctacaaccaattggcagtttgtagccgaagccttagaagcaaagaaacaatttcctttaagaaaaatacttctcggctacttgtaccaaatgctaaacaatgcatcggctaagttagctgtcggctcagtagtcggagcagaagctgaatttccaagactggagccgattgtagacaatgatggagaagaacgtactcatcggagatgcacatcttacggagaatatgcctccataccaaccgatgcagaagcaaagctatcggccgagctgcttaaagactggttctgcaatttttatgagggtttccaaaaacatactcaagtttggttcctctatgaagattcaacacttctagaaaatccattggacttcatattcgaagacatcaacaatgaaagatatcagaaacccagagaaatttcttcagctgcaatcagtccatatctctttccagatgttgtccctcagacaacagagttctctcctcctcgccaaagtaacagtggcaggaacattgaatatgcctcgggattaattccaaatggaggtggaccatctcctcctgtcatcggctatgatgcccccaagacttcagctcttcttcaagggctcatcagagaaccagccgatgccggcaagaaaagaaaaaccagatcatcggctgtagatacttcagccccagctccaaagaagaaaaccaagacaaagataactaagccatctgatgatctgcctgccctagatccatccattgaacaagctctggatgaagaggaaattgaagaagacgttgaccaagccgcagccaaatctcctcctccttctcctgtacaacagtcatcaagtgaccagactccatcagctgtagggattcaccatgttgaagaagaagtccaaccgactgctcctgctatcctgaaaattcttgaagatatctctcatcggctagaggcatcatcgttagacagcttagtggttgattgtggctcaattaggactcggctacatgagattcaagctctgatcccagatgagctagccgatgtcctaactccagctgtctatctcgagcagcatcaattcaagctggagaaggccaagctgagactagtcgagcgtcgggagcgcaaagacatcgaggccacaatttaggccaatcggcagcttgttcatgaagagaaggccaagcttgatcagttatctgaaggtccgatcaagtctaatattgatcggcttgaagctcgaaagattgagctcctggcacaacttcaagaatgcagtgccaatctggacatggaacataaaaagctagccgatctcccaaaatctgttgaaaagcagaaagcaagactaaaatcggctataaaaaatgttgctgatctaaccaagtctttaaaagtcatccctggaaccgatgctcaagatgcccaagccatcgaagaagtagaacaaattaggcaaagagctatatcggctatccagcgctatttgtctcgg

SEQ ID NO: 36064 - DNA, 560 bp, Oryza sativa
  unsure (1)..(560): unsure at all n locations
  Clone ID: PAT_MRT4530_39925C.1
gcgtgcngttagctccttcttccctcgtaccattttcgctgttggtctttattgcagcagctgctgctgttgctcgtgctgagctgagctgaacctgccaatctgcaacactgcaatcgttagcaagttcgctcaactggccagctgctacagatatatctgctgataattgagccccaaccacctttctcttccccctttaaacttccctggtctccgtcctcttcgatctcctctgccgtcgatctcatcggaagagagcgccaagcaagaaagaataattattcctgaagattcctcttctgcatgttgaagtgtacaagacagccacaacaactgaggatatgagctggtggtgttgcattccaaaatccaagaaaggagagaatccttactctcatggcgttagcggtattccgcctgagaaaaacataaggctnttctcttattctgagttgagatcagcancagaaaactttcaccgcagtaataaaattggcccgagtggcttttggacagtttacaaggggactattagaaatgggcgagatgttgccggg

SEQ ID NO: 36065 - DNA, 259 bp, Oryza sativa
  Clone ID: PAT_MRT4530_39926C.1
cgaaaatgctcctggattaaagtatctctattctgctgaaattgtgcatcagacagcagaaacagtgtccatgttgcttctggacgatttgtgtgcctccaagctcaaccctgaggacctgcagctcagcacaactggagagtatggaaagaaggttcacagtgcatataggctatcaggcttcagacctttcttgttttttcctagtcactgagaacacattagtagttttgatggccaaaaaaaaaaaaaaaaaaaa

SEQ ID NO: 36066 - DNA, 1929 bp, Oryza sativa
  Clone ID: PAT_MRT4530_39927C.1
gatcataagttcagaactgaaagcgcaactgagtgatggattatacacgatttctctctcctgtgccatgtctacagaagctgttctgttcaattgcccccaaaattaatgtccaacaagcagcgatcttgaattgctctgacgtaaacaagtcaggatcaacctactactatttacaagatctagatgccgcaatttgcacaaggaatggaaagaaacaacacgattcacaattggcacacatctaaacgtgtgccctctatgcactgtcactcaactcaacatgcaaaggtaagacaagaaacatagacccagcatcagcatcaatcagcctggtgatgttttccttccattttcaccttgggctgatctcggacaccgtgggtggcaccaccgtgctgaacatgtcggaggtgtcggacgccgagtgcttgaacctcgagttgctggagttggtggccttggagaccgtgccattgtagtcgtggatgtagcccggcgccgtgagctcgcgctcgttgatgcggatgggcttggacagcatcgtcaccacctgcggcatcgacggccgccgcgccgccgccgcctgcgtgcagaagagggccgtcttgatgtaccggaggacctcctcttcagggtaatctcccatttctgaatccaccagctccttgagcttccctacctcatgtagctcccatgccttctctaggagaatcttatcgtcagccaggagactccttgaactactcttgccacttacgatctcaagtacaaggacgccaaaactgtatatatcggctctcttcgtcaattggccatgccatgcatattccggtgcaaggtagcctgtcgttccagcaacacgggtactgatgtgggtgatattatcagggaataacttggctaaaccgaagtccccgatcttggggttgtaaagcttgtcaagaagtatattgctagccttgatatctctgtgcacaatcggtgacgcaatctcttcatgcaggtatgcaagtcctttggcgattcctatgcatatagcagatcttatgctccaagtaaaatttgcaggttcgctattagaacccaacaatgcacggtcaaggctgctgttttctaaatactcgtataccaaaattcgattgtttccttcaacacaacagccaattaattcaacaaggttgggatgcttcacattggtaataacatcaatttctgtcaaaaattctcgaacgccctgcctggattcagcagaaagaactttcaccgcaacatctcgcccatttctaatagttcccttgtatactgtcccaaagccacctcggccaattttattactgcggttgaagttttctgttgctgatctcaactcagaataagagaaaagccttatgtttttctcaggcggaataccgctaacgccatgagagtaaggattctctcctttcttggattttggaatgcaacaccaccagctcatatcctcagttgttgtggctgtcttgtacacagatgttccactggatgcagaagaggaatgattgcagtgttgcagattggcaggttcagctcagctgcagcacgagcaacagcagcagctgctgcaataaagaccaacagcgaaaatggtacgagggaagaaggagctaccagcacgccacaaaacctgccggtgccagccagggacatatcttcaggaataattattctttcttgcttggcgctctcttccgatgagatcgacggcagaggagatcgaagaggacggagaccaggggagtttaaagggggaagagaaaggtggttggggctcaattatcagcagatatatctgtagcagctggccagttgagcgaacttgctaacgattgcagtgttgcagattggcaggttcagctcagctcagcacgagcaacagcagcagctgct

SEQ ID NO: 36067 - DNA, 252 bp, Oryza sativa
  Clone ID: PAT_MRT4530_39928C.1
atggcggccatgaagaagccgtcatgtgtatgggcgctgcggagtgatagaggcaccggtggggatgccgagttcgtgatcactagacgcgccgactccaagcttgcgcccgttgtcggtgaaggcacggttggcgccggcgacgatgacggggtcaagctcatcatcagtgtcagccatgaagcgaacacaggaggtcgacgatgcgcgagcacatcaccggtggtgacggcaggagtgaagacgccttga

SEQ ID NO: 36068 - DNA, 507 bp, Oryza sativa
  Clone ID: PAT_MRT4530_39929C.1
atggaggcagcgtggtccatctcatatcggcaaaagctcgaaaccttgacggccttttgtgagttgaagtttaacttcaaggttttttttctaggaggatttaagctctttttgaaatttccagatagattagattggaaaaggatttcactctcatatttgagaattttgaatttgaattatggaaatgggggcagccctcattcaacctttgaggactctaaaatagggactattgctggagatgctcggttgtttggccacgcgctggcatggccacctcgatgggctccgggcgtgtcgaagcgcaccgcgcgcgtgccgcagcgtccagtaggccacgccacggagcaccacggcgtcggcgtgggcgcgtggcgaagctgctggcatccacgtcgtgttgatgttcttcgggaccgacgcgacgacctccgggcttgcgagctccaccggctggttgggtttctgacgagtatgaccggagcgcggatgagcatagtctga

SEQ ID NO: 36069 - DNA, 631 bp, Oryza sativa
  Clone ID: PAT_MRT4530_3992C.1
atggtctcccgggagcagaagagagcgagtttgcatgagaagctgcagattctccgaactcttacccattctcatgcggtaaataaaatgtctataatctctgatgcatcaacatacatcaaagatctgaagcagaagattgccgcactgaacaaagaattagggtgtgcaaagaacatgaatatttgcgaagaaccctcacctgtggtgagagttcaagttctagacaagggtttcctcatcaatgtgttcatggacaaaagcagccctgggctactatcctccattctgcaagccttcgatgagttaggactcactgtgattgaggctagggcttcatgctccaattcatttcgactcgaagcagtaggaggagagcacgaggaagccgatggagggatcgatgcaaatgcagtggagctagcggtgatgcaagccatcaagagcactccaggaaaatagagaacattcatgtatatatatgtgtgtgtatatgcatgcttgatcgagctggagcaaggaagagccaaaaatgaccatctaaatctctaattaagattactgctctaatgctattattctactttacattgaaaaaaaaaaaaaaaaaaaaaaaaaaaaaaaaaaaaaa

SEQ ID NO: 36070 - DNA, 447 bp, Oryza sativa
  Clone ID: PAT_MRT4530_39930C.1
gacttatacctttttgactttttttactttgtttttagaacacaaagaggtgaataggtgggttttaacctacacaaaaatttgcgggtacaaaccaggggagttcttgacaatccttcatgtaaaacaaaaaaaattggttacatatctgcccttttaacatggacttgtgtttctacatgcaatttataattgtttcaccacatcgcctatttaaatcaatgaggctgttctgacgatgaaaacatgtagataaatatgatcaaccctgccattagattagttattccaccggtgggattttatacttgggcttcaccaatataaccaagttgatataatttttttggataaatcttgtggccactaattgattactggtctggttttgtgaatggttaacgttgccattattggtctgtgttgaagaaacgctatgctgaaaca

SEQ ID NO: 36071 - DNA, 3500 bp, Oryza sativa
  Clone ID: PAT_MRT4530_39931C.1
tcacagcacgatggggtcggacgactgcgagcccttccctcccacgcgcctgaacctcttcgcctgcacgcagctccggctgctccgccgcaccgcgccgccgccgccgcctgatcccttcgccgccccgtcctcctcctcccgccgccgccgccgccgccacttctgctcctcctcctcctcctcctcctcatcctgctgctgctgctcatcagaccgctccttcggcggcacggcgtcgtcgtcgtcggcgtcgccgcgcacgatccccggagcctccgcgtcccccgtgccatgcggcgcttcctgctcgcgcggtggcatcacagccaggggagggatcaccgcgatcacctggggctggggctgtggcgcggcgtcgcctcgcttaagcggcggagcaggaggggaggcctcgatgagaccgcggatcctggacagggacgtcgccagctcggcggggaggcggtgttgctccagaaaccgcgcgacggtcgggagctcctccctgacgccctccaccacggatatcaggctgagcccaagggaagctcgcgccatggtcgccggagtgaaaacatctgcggcggcggcggcggcggcatctgctgtatgaccatgatcaccaccatctgcagcgttgatcagctgctggaaccgttcgatctctgaagcgtacatcaggctccagtccactgccgggttccacagctgccgctggaacgcggggacatcgttgagcgggcgatgctgttcttgcccaaactggcgagcgaaccggtccggggcgtagatttccttgaggttgaagctgaccagccatgttctggagaagcagaggttatccggagcagcgcaatgcttcggaatggatgcaggatcaacgcccttgtagggctcccagttgacatcagaaacttgaagcaggccgaaggctttcctgatgtctgaaacgttcttggccggttgagagatcgtgctccctgtccacttgagtactcgtgggaagatgtgttctggaggatcatacatgtcagggcgcaatgccggaatatactcatatatccagcccatgagcaaagccgcgctaccgaatagcctttttctggcagaatgggccacggcgatggagagagccttgtagagatgagcaagagcagcagcaccccaagcatattcctgtaccttgtcaaagtctgacagaagtggcaaatactttggtgagacatagcccctgtccctctctggaagtaaggctgatccaatcaagaacaggagatatgccctggtgccatacatggtctgatcattggtggggcgttccgggatccggctaaacttggattgcagccaagagagcttcacatggctgcccctgcagtccctgcaatcaggcacttgccccagatactggaagcagaggtcttcgaccgacttgttgagcacagctccggttgtcaccacacggcctgtcaccggaatccccagtatgtaggcggcgtccctgagtgagggtgccatttcaaagccattgagctgagcagtgttggtctccttgctccacagttcgaagaatgccatgagcgcgatgcgatcgatgactaggcctgctgtgtgtatcaggttgccgagcccgcttgcatcgaccaattgttgctgctgctcattcagcttccatgtgtcgagtctctccgtcgtctggcatacggttagttcatgggttccctgaatgacgcttttgtttgttggttctgcctctgcggattccatcccgtccctgtgcttgaacattttcagctgcacacagagacgcccgctccttcggaggttctcggtgtccctggggagccggatttcgtcgcggtcttgctgcctccgcttccttgattccggcgagctcgagtccagcgaggaacaggacggcgtcgtcaggtgggagttctgccagaggtccatgaccccttgttccttgaactcctccgctccatcgagcagagggacggtgccatccagaaccatgtcgcacttgctatcctgataaggtatcagcacggctgggaatcggtccgcccttgagttcggagggcttgaaggatcttgaaagaatgacggcttccccctctttcttgggttctttgacctgacattgctgtcctggccctgccctgcttgatctttctttcggctactctgtggtggggagtaactcttgatcatcatacccactctctctagaaagcttgcaacttccacagggagtaactgtccctccaggtaacgatcaattactggaaaatcattcctcagatcttcaaccattgaagagaagttctgagatgtgctccgactacatcctgcagcatcttgtttagttatagactcaattgggagggagttgatattggtttctgcaggagtgaaacgacagccaaccaattgatggaactcctcgatttcacgagcatactcaaccctccagtccttccacttgctccaagttcttcttgcccacatgggcaccccatggaggcgaccttgttccctcccaaactgcctagaaaaccgatcaggtacatacacctcttttatgttaaagctgattagccatgtccgagaatagcagatgttatctgctgcaatgcaatattctggaataattgcaggattcatgtccttgtaaggattccagttgaccatgagcaaagttgcactgccgagaaactgggtagtagcattcggtgttacagcaacagatagtcctctgtacaaatgagcaagggctgcagatccccaggcatattcacgtatctttctaaaatcagccagaagaggtaaatatcttggtgatacaaatcccctcatcgtgtcaggaaataaggtggagccaacaaggtaaagaaggtatgcccgggtgctgtaagcaatctcgttgatagttggattttctggcaattgatgaaatttcctgtacaaccatgtcaatctgattaagccacacagttgctctccatttccagggctctctcctaagaaatgcaaacacatccgcctcacagcttcatcaccaattggctcagcagtcaccacatgaccagtcactggaattccaagaatatatgaaacatcacggagtgatggggccatttcaaatcccatgaaatgtgcagtatttgtttcattgttccatctctcacaaaaggctgtaagcaaagaacgatcaatagtaaatcctgtggtgagggcaagatgtccaagaccactagcattaactagttgttgctgttcgtcagttagaacccattcttttagcttccgtgtctgctggctgggaagcagaacaccatatcgctgtggaaaattgagtgtcgtccagatttgtgagcttccaaccggtctccgtccacttggtttttgttgttgtgttaccacaccttgagatgcaaggtccatttctccttactcgccggggaaacctgtgccgaattcgtgcagcccggggg

SEQ ID NO: 36072 - DNA, 960 bp, Oryza sativa
  Clone ID: PAT_MRT4530_39932C.1
atggggaaagccaagggaaaggggaaggttgagactgaagggtcttctcgtgagagatccattagttgggatgatgaacaaactaagttcatgcttgattggtacatcgagtacaagaaagaccaacatgcaaacttcatatggaaatctcagcaccatatgaaatgtgctgatgccttaaataaagagtttgctatgggtgtaacgtctgcccaagtgacccgtcactataggcactacaaagagaactggaagatagttgaaacggctttaaacaagagtggcaatggttttgatgctattaaatgtaaactgaccatatcagagtctgaaaaggctactctcaaagatagggataggcgtttgctttctaagccaataaaatactttcatgagatgcaagagcttttctcaggtagtaacgcagatggctctcttgccatggaccaacaaacatgttgtgacgttgataacaaatctgatagcagtgacgatgaaggattgaatgatatttccagctatgcacgtcctatcgacattgctgcagaagactcggacacattaccatctcccacatgtgcagataatggctcttctggtacatctcgagctggtaaaaagagaccaagaggttcaaagtccccaagtaagaagcagcaaccaaagcctaagaaccgtttcacagatgccactgagaaaattagcaacacaatggaccatttggtggatcagcttggtaatcctcctcctccacctccagtgccacagttttgtgacccttatgcttcattgtggaagaggattgatgcattgcccattagtactaatgataaggttgtcgttggaaattatttgggacgccaagagaatgagggggtgcggggatttcttgcttcttctgctgacacgactgtggagacttgggtgtaccagttcatgtgcgatcgagatggtgcgtag

SEQ ID NO: 36073 - DNA, 1149 bp, Oryza sativa
  Clone ID: PAT_MRT4530_39933C.1
atggcgaggctgcaggaggagagggcggcggaggagatgcagatgagggaggcggcgaaggggtggtgggtgatcctcgtctccgtcccgcacgttgcccacgacgagttccactttcctccgggcaccgagctccggttaaacttcggcgcccctccgttcgcctcccgcatcaccgtgccccgccgcatcgccccggaccgcaaggccatcgacaactacccctacctcgccgccgccgacgaacgccacggccgcctcctcctctacgccacccagggacccgacccggagccgcgccccgccctcgacgcgttctacctcaggccgctcggcgtgcaccacggcttcgccaaggcctacttcatctgcgacacgaccacccgcgaggccagccgcctccctgaccccgaccacccgttcgccatcctctatccaggcaacgtcggcctcctctgctactccatcagcttctacgtcgccgagctccagcccgctcccgcgtccggcaccgccaccctcctcctgtaccgctccgattccgacgcctgggtcgacgaggagctcagctacccgccgcacgaccggccgtggggcggcaacggcatggtctcacaccaggacaggctctggtgggtggacctctcctatggcctcctcacctgcgacgtcgtctacggcgacgaccccccggacctgcactacgtaccgctcccgcaggacagcgagctgcccgccggcacgccggacctcgagaagcgccgctgcgtcggggtgagcgccggccgtctgcggtacgtgcagatcgacgacgagcccgacggcgacccgatcgtcaggatgtggacgctgctcgatgaagatgccggggagtggggcttcgactgcgcggcgagcttcgtggcgatctgggacgacgaggcctacaaggcgaccaagctgccgcggcaggtccccgcggtggcgctcatccaccccacgggccccggcgacgtggtctacttcttcctgcgctcccggatcttcgccgtggacgtgcgcgcgcgcaggctcctcgagtggcggttcttcgagatgctccacccgccgatgcgctaccattcgtcccagttcgtccgtgcctggaacctgccaactttgttccagtga

SEQ ID NO: 36074 - DNA, 321 bp, Oryza sativa
  unsure (1)..(321): unsure at all n locations
  Clone ID: PAT_MRT4530_39934C.1
ccttgaccgtagactgtggcaccgccagcaagaagaagctaaggaacctcgtgttggaagctacaaggaagcagatgtttgagcgggtgacgagggacctgaaggtgacgagggtgttctcgacgctggtggaggagatgaaggcgatcggcgtcccgacggcggcgatgaacggcgactgcgaggaggagccgcactgcaccgacgtgatggcgccggtggcgcacgacgagcggagccccgtgctgctgctcatgggcggtgggatgggcgccggcaagagcaccgtgctcaaggagattctncaggatccactgtggt

SEQ ID NO: 36075 - DNA, 789 bp, Oryza sativa
  unsure (1)..(789): unsure at all n locations
  Clone ID: PAT_MRT4530_39935C.1
gtacgaggggtagagagagagagagagagagagagagagagagagagagagagagagagagagagagagagagagagagagagagagagagagagagagagagagagagagcgagagagcgcgcgtgtgcttgtgggcgcggtggcgtctcccgcccgctctggcggggtggtttcttcccgggggggcgtgtggccgtggtaccgcctctcttcctctttctatctctctcctgctccctactactcggtggtgggtgcgtcggtgcttatctgtctcctgtgctttcttggccccgccggatctgtgttcctgtctacatccctgcccgggtgtatctgcatgactgcgctgttgtctgtgtacgtgtccggcggttttgtggcgctctcccacgagttctcgccagggaccgcggtgtccatgcttctctgcctttggccttttcttcctcgttttttgggattcttccgggcgactggtcttggctattgagggaccagggtttctgcttctttttctttttttcttttccacccccttagccccttgtacaaaacgcccgccctccccccttttttnnntttttttnttnntttnctctcncctcccccctttctcttcctttctccctttcctccttttnntttantntctttccttcccttcgcttgtctccttctcggtgtgcctctctcccttttctccttttttgtcttcttttcccctcccctcttcccccctttccgtctgttttgtttcttcccttcctctctctccttcttcttt

SEQ ID NO: 36076 - DNA, 337 bp, Oryza sativa
  Clone ID: PAT_MRT4530_39936C.1
aattcccgattagagccagcgatatcaaacatatttcacacatatcaaggataggggatcatttcagtcttgcacgtcggaaccatcctattactctacaggcatgccactcctatgaaagctttacacgggaggatacacaacacattcgtaagcgtgatacttgtgtctggggacattgggcgttgtatggacaacgcgtgctgggacatcacccaccttaaggaaaccactgttcttgaaaacacctttagtggcgatatgcactttacattaatccaatttcaaaaggggtccacatttaacactatttacatgtgcaaagagtaccactcta

SEQ ID NO: 36077 - DNA, 483 bp, Oryza sativa
  Clone ID: PAT_MRT4530_39937C.1
atggagtgtgtcagcggcggggaggcgcggagcacgctggagtcagtggagcacgctggagcgtcgtgtagtcatcacgcgggggatggggccgaggtcggctccggtcgcggcggtggacctcagcgccggtgccggcggatggggccgaggtcagaaccggccgcggcggctccggctgcagggaagaagcagcggctctggcggtggggatgcggcggcagtccacacggggaagaatcagaggctccggcggcggcagtccatgcggggaggatatccagcgaggatgcggcggcgcagcggcagaacatccggggaggaggaggagctagcgaggaggaagagaagcgaagtcttcgcgtgtggagcgatgtcttcgcgagtggaggaggagtgaagtattcggcgtggcgtggatggatggatcatgcggtggtgaaatcaagcgcgcagatggacggtagagatcgattcgagtga

SEQ ID NO: 36078 - DNA, 3131 bp, Oryza sativa
  Clone ID: PAT_MRT4530_39938C.1
cgcttcctcgctctgctgtctcttggtgtctttctatatgctgctttcccaactcgttccccttgcttacttccttcctccctccgccctgatcctctctcgggattcgcctacgatcatccgcccgtgcgggagagcctagcggagcagaagcaggcacgcgcggcgacagcggcagcggcaaggagtaggaggaggaggaaggcgaggaccagggcgaggaccaggacgaggagggaggatatggcagcggatagggaagcgaccccggcggcggtgcggcagacgatccataacatcaaggagatcgaggacggccacaccgacgaggaggtctacgccgagcatcgcgaatgcaacatggaacccaactagatggatctttcttatgtcatattccctggagattgtgttgaggtaaacagcatttatggactgtttgagagtgccaaagaatctgccgatgctcgatggaggcctgggatgcaggggcgaggtggaaaaggtggatggggaaactcttcacgccagctatccaactcctctgacataactgggagaaatgctcctgctgaaaaggaaattggagtgaatccaaacatggacaaatgtaacagctctgtacctgtcaatccaaacacagacaccaagacgtctacttcgatctcaagtttgtcagttggccaatccaatggttcatcagagcctgttgcttccatggagaaaagttctcttgctataggtcagttgcagatttcagattcaaaaggaatatctgatttggaaggtaatccagaaaagcttgtcaatggcttaggtccagatgtaagactatctttaatacagtcagcaccatctatatcaggggagtgcataccagctttggacccagtgcttacaccagcccctgaagtccacggccacggtgagactgtttccaccaaacatgcttatgcaagtcagttggcagcaggagaaaaggtggtttctaatgatgtatcaacggcttcacaaggcacatctcgatcttctggtttgtcatccactgtggtaccttctggtagtaggccatcttcaagctgcagtagtcgtgcacagcagttgagcagtgtacagaaagttgttccaaataaagaatggaagccaaaatcaacaaacaaaccagcccatgctgaaaatgttatatgtgataaagtgcctgtttctgtggagactgttccccagtcgattctagtatcggattccatccataaggaagataccacttcaggagtggagacaaggccaagtgacatgcgcctgtctgacaagcagcatgttattattcctgatcaccttcaggttgcagagtcagaaaaatatgggcttagttttggcagtttcggtgcctgttttgagcaatctgcaagcttttcaaaagacactgaaagtgagaaatgctctacacctcaatgtgaatcgtctcaggaggcagatgaagttctggatgaacctgctgcaagtcatcagggtgtgtcctcaactgttgaaatggcagctgagtcagatctgcagcagctgcctgctgaaacggcagataatattttacctcagaaggttgatagttcctcaagtattcctgaagttgcagaatcagaccaatcaaacgatacaatagcttcacatgtacctcaagattcagttgaaactactacaccttacccaccacaacagtcgcatggagatcagattccatcacttgaaacttctgaatctcaggcacgtctggtacaacaggtcaatgactcttctgcaggctattatacacaattttaccgaccacctgctgattttgatggccgtatctcaccatttactgcttctggagctgctatcaagtacggaaacttgtcggttatgcccacacaaactgggcatgcccaagaggctaggctgcagcaactaaatctaccacatgcaatggaaattctcattgcagtttctttcctctctctcttcctcgtgatctggtccactggtcctaggaccctaactactgtcggtgctgtttccaccttctccatcaatagcgttggtgggttcctgctctgcactttcctcttcaccaccatggttcgcttttaccctgacaaagtttcgctgccgagcacatgtgcaatggcggcagtggatcatctgccacagggaatcaactccttcgtgctgccttcagttgggtctactccacttgccaccccaacccctggagccgtaccaaattctgttggtattccacaacagccacttcaattattccgccagcatttaggtgttttacctcaatacccaccaaattatttcccatacagtcagtatccactctatgttccaccacaaccccttcatttcatggttcctcaacccccttcaaccggaggcatgtatccacctgtaagtgcagctgttgcaccaccaggtaaatacccaaccaatacatacaagcctggtgctaacaatggaacccagacacatgttggaaaccatggtgcatatggaacatatgattctagtccgtcaatctatacaaataacactatggtggcaagtggaacttctgtcgagagtgatgatatcagtggatcccaattcaaagaaaccaatgtctatattgccgggcagcagagcgaaggctccggtgtctggattcctgccccaggacgtgatatttctggtctccagcctagcaactattacggactgcctctgcagggacagcacctggcgtttgcccctgctcaagctggtcatggtacttttggagggatatatcacccggcacagacaatggctggagccgctgttcatccactactacagccacctcaggccattgctggggttggtggtgaaatggttggaccacctgccaatggttatcagcagccacaacgggctcagatgaactggcctaattattaacggaggtagtatatttttccgagtagccatcataggatgaaaaagaacagttatttgttggatatctaagtgttggcaaaggaagttttttttgggctttcagcatagaggtgcctgatcaagagtgtatatatcaagcatggatgatctgcaaggaaatgttgcagattccc

SEQ ID NO: 36079 - DNA, 269 bp, Oryza sativa
  Clone ID: PAT_MRT4530_39939C.1
accctttttttcaggaaatattttggtgttcccgaaaggactttggcccaaacggtgaaatgaaatgggagaaagaagaagaaaaaaaatggtacctaggtactaatagtaaagaactatgcacaagagtcaccgggtaaccattccaaccaaaccaaaccgcaaaagctccacaggaaggcgaggcccggccgggccaacggagcccacccaaaaaattacaccacaaaatggcctctcgcggggagaaaaacgcggcaccaagttgt

SEQ ID NO: 36080 - DNA, 270 bp, Oryza sativa
  Clone ID: PAT_MRT4530_3993C.1
atgggtttagggcttggaggggagcgcgtgcgtgaggtgctcgacgaaatggttgggctggtccgcgccgccgcggccgtggctgcggacgatgttgacgtcgacctcggcatcctcggcggcgggatgaacgtgtcccgccgaccggccgacacacgcgcgcatcctcgaaggcggccgtccacgaagctcttcgtccacggcctcggctggggcaccaaagccgacgacctccgctccgcgtttatgtgcctaatcatacaaaggtag

SEQ ID NO: 36081 - DNA, 403 bp, Oryza sativa
  Clone ID: PAT_MRT4530_39940C.1
gtaaagttaagcatgaaacgaccctcgtacaaccgtacttctcgtatgggtatagacctagcggagtacgtagccgagcgaaggcagtatccctgcatagtggttattcttggtgtgtgggagtcagggcctacgatgggacagccattggtggggccgcgaggggcgagtgcctatagtggtgccgccatcggtaggactgccatgtgtaaatttaatttaactaaaacttaatgcatgtgtgagtcttcccttcccgggagcgccagaactcctctcactgctagaaactcatgacacctagatggatttgtgtatgaatgagctacaaagtgtgagccaaactctcccttgttctaggctctcaatctcgccagaatcaaccctctactctgtgggcaag

SEQ ID NO: 36082 - DNA, 886 bp, Oryza sativa
  Clone ID: PAT_MRT4530_39941C.1
tgttaaactggtcagctttggaacagtccattgtacgactggaaagctatggaagcaggtggatttgaatggtggataaaaaggattaatcgtgcccttgatttgtatgatgagttccgtatagaccatttccgggggcttgcaggtttttgggcagttccttctgagtcaaaagtagcgctggttggaagctggagggctggaccgaggaatgcattttttgatgcattattcaaagctgtcggtagaataaacataatagcagaagacctgggggtgataacagaagatgttgttgacctaaggaagtctattgaggctcctggaatggcagttcttcagtttgcttttggcggtggttctgacaatccacacttgccccataaccatgaatttgatcaagtagtatacaccggaacacacgacaatgacacggttattggttggtggcaaactttaccagaggaagagaagcagactgtgttcaagtatctgcctgaggctaataggactgaaatctcatgggcactgatcactgctgccctctcttcagttgcaaggacatccatggtaaccatgcaggacattcttggcctcgacagttctgctagaatgaatactccagctacacagaaagggaactggagatggaggatgccgagctctgtcagcttcgacagcctcagccctgaagcggcgaagctgaaggaattgcttggactgtacaaccggctctaaatatatttcagcgctcgttttctgtcgcttgaacttacagaaatctgtcataaaaataattgagcaatgcaaacattttggctgcaagtattgttctgagactctggtatacctgtcatataataaagcgttgtaccatgtttgtgtc

SEQ ID NO: 36083 - DNA, 1701 bp, Oryza sativa
  Clone ID: PAT_MRT4530_39943C.1
atggcctccccctgcgagcaccacgtcccgtacaccctcctgggcgcgctcctcagcggcggcggcccccacgccgccgcgtgcggcggcgccgccttcctccgcgactacgcggagcggggcaccaacgcgctgctgtgggcggccctcctcgccgtcacgtggctgctcgtcctccgcctcgccgcgctgctccgcctctgggccctcggcgcccgcctccccggcccgcccgccttccccgccgaccctggcctcgccgccggtgacatcaccggctacctatcgaagttacatggcagttatggcccagttgttcgactgtggctcggaccctctcaactgcttgtctcagttaaagattctagggtaattaaagagttgctaacaaaggctgaagataagttgccgttgactgggaagacatataatttgccttgtggaaaacttgtcctgttcatttcctcgttcgagaaggtcaaaagtaggagggaatcactgaagtcattcctggatgaaaaacttagtgttggtactggtggaagttccttcaagatcattcaaattgtccttgatagagttgactccattatggccagggattttctggactgcagatatttttcccaacacatggcatttaacattgttggctcggctctttttggtgatgctttctttgattggtctgatgcttctgcctatgaggagctgatgatgacggttgcaaaggatgcttgtttctgggcttcttatgcagttcccccattttggaaacctgattataggaggtacagaacactatgtgctcgattgaagctattaacacaaggcatcgttgcaaaatcaagaaaccaaaatggtgtacttagccttattgatctgagttcctgtcagagaagtgaaaggatgataaaagatccatgcagaggcttttctctgcttgatggtgtgatttcaagtcgttgtctcaacgaggcagctgaagggcctctcagctcagaagaagaaatatgtggtaacattatgggtttaatgttgcatggaatttccacgtgtgctaacctaattggcaacatcctaacaaggcttgccttgtacccaaacttgcaatgccagctgcattcggagatagtttcaggtcacagtgaatcatctgagcttaagatagatgatgtgcttaggatgaaattcctacttgctactgtatgtgaatctgctcgacttttgcctgctggacctcttctccagagatgttctttgcaacaagatgttaatcttaattccagcatcacaataccagctggagcaatattggttattcctttgcatctcgtgcaaatggaagcttctacatggggaaatgatgcttgccagttcaaccctaatcgtttcctcaaaaaggaaattaattttgaagagatattagcggcagcacataaaggctcaaatgggatcaacctcttcactgacgagtgtgataagactgaatcattccttccatttggctctgggagtcgagcatgtgttgggcagaagtttgcggttcttgggatcgcaatgttgattgcttctctgcttcgcagttacgaggtacaacctcatccagctttatcccaagaaatggaatcattagttgacagcaacagccttcaccatattccgaacccaaagatcatcctcaagaaaaggagcatctga

SEQ ID NO: 36084 - DNA, 1347 bp, Oryza sativa
  Clone ID: PAT_MRT4530_39944C.1
atgacgccgcgcgcctccaacctcaccggcgtggagatctactcgccggtggagatgaagtggaaggagaggagcggcacggcgaagacggcgaagatggcgaagcggcgcggcggttgggaaaacgacgcgacgaggatggcggcgggcgagcaggagcggcaggcctcgcaggtgcttgggtcgatccaagcaagaatgagcagcgacggcgcctctggaagcattggaatgaagcacgacgacggcgatcaccggccgagcaccggagcgtcgtcgcggcggtgccccagctgcggccacgaccctgactgcaacaagccgttcgacatggttgggatgcctgccggcgtcaggttcgatccgacggaccaggagctgattgagcacctggaggccaaggtgaaggatggcggctcaacatcgcaccctctcatcgatgagttcatacacaccattcaaggagaagatggcatctgctacacacatcctgagaacctgcccggtgtgacaagggatggcctgagcaagcacttcttccaccggtcagccaaggcctaccccactggcacaaggaagcggaggaaggtcctggctgatcagcagcctgacgaccatccacaggccagcaagggcagaaatgtcgcggcggcggagacacggtggcacaagaccggcaagacgcgggagatcacggtgcgcggccagcccaagggctgcaagaagatcctggtgctctacaccagcttcggcaagaagcgcaaggcggagaagaccagctgggtgatgcaccagtaccacctcggcgagctggacgacgagaaggaaggggagctcatcctctccaaggtcttctaccagacgcagacgcggagcgccgccgcagcagaggcaccggtaagctcgggtgctgccatggaggtgcagggacagcagcagcaagtgctgaagctgcaggctgatgatggtcacttcagctcagctcctaccaagaagagactgcatcaggatgttgtagcacaagtaaaagttgatcggggtcaccactgcatgccagcacaacgccaagtcaacttcaatttgaaagtaactcctgtgcccaccaccagttcattccctgtcgttgtcgacaaacagttgtattctcctgtggcgctattccgaagtgaacatcttcatgtagttcaacattacgacacttccattttacaaattaaaccttttgacttgtttacattctacagggaagaacttcaattcatcagccccaaaaagcagattggcctcaccagcgctggcctcctgacaaccaagatcaacatggataacttcctggattcacagtag

SEQ ID NO: 36085 - DNA, 692 bp, Oryza sativa
  Clone ID: PAT_MRT4530_39945C.1
aaaaaaaaaagccatttattaaggtagtactagtcagacagggatatccccacccccaacagactagaaataccgacatgtgcaagattcttattgtgaatctgcctcatggtacattacatatacatataggagctagtataaaaaaattccctctatgtaattacttgcactaatctaatcttgtctatcatttttttatgtcaaatttccatctttcttttccacggtacagcactcatgcagagcttctgaaagcagtttggagaggaaaggcagcctgagaaataataatagatggagccaaaccaaaaccacaaaaccaattccaaacttttcgaattcaacccttttgaattcccttaaaagaacacatacgtacaccatctgatctgaaatccgcagtgtgctttgccttgccaaatgcgggttgagcttttcttccggaaaaacccaacaggaagcacaaaattcggaagagagacacccttcttctcttcttcttcttcttcttcttcttcttcttcgtaggctgggacttttgcaaaatagaccctgaccttttttgctcttttttgtttttctcttggagacggtttgcgatgcgagtataattatgcagaaagggaccctggggctaggagggaaggagtggaaggggcaggaaaacgggcggcgccgacgagggcagc

SEQ ID NO: 36086 - DNA, 2686 bp, Oryza sativa
  Clone ID: PAT_MRT4530_39946C.1
aacttagcttcgttttggatggatggatggatatatcaaaggaaaaagtacacccaaggtcccttaacttgtcatcgagatacaaaatcatcccccaatcgcaaaaccagataccgggcatcccttaactatcaaaaccattcgctttaggtcctttggtggttttgaacctagttttgtccgacgtggtggctgagtcagcatgggacccacgtgggccccacatgctagagtgccacatcatctatcccttcctcttctctcggttttctcctaggcaggctgaccggcgtgttggggaggaagtcgacggggcgagacgggagaggaggaggatcggcggcggtggccggcgaccggcgatgcggcggcggccacgcaggagcaggtgggtcggtggagcggacaggtgacgaccatcatctccgagcagttcccgccggacgtcgacgcaagcatcgccacgttccgggtcgactccgacgtcgtctcgctcaacgggagggaggcgctgcaggcggacgccgaggcggggcgcgacggtcgagtccacgccgtcatccgctgctccgcgtcaacctccaccacgggcggcggcgcggcgcgctccggcgtgtcccgagcgtacggcgcgtccaacgccatgacgccgcgcgcctccaacctcaccggcgtggagatctactcgccggtggagatgaagtggaaggagaggagcggcacggcgaagacggcgaagatggcgaagcggcgcggcggttgggaaaacgacgcgacgaggatggcggcgggcgagcaggagcggcaggcctcgcaggtgcttggtgagggtgctcgtcggcatcccggtcttgatccagatctccgtctgcgaggcagcgaggacgttgtccaggaggactgtcgtcggcggcggcggcaccgccgcgacgctaggtctagcgggctgcctcgcctcgccgccaccgccaagccgacgagctcgccgcctccccgcgcctccgccggctgcgcgtgtggctccagctccgccgccgcggtcgcccgccgctcctcctcatcggcgagcacggagaggaggctgacgccgccgccttgctcctcgttggcgagcacggagaggaggctgacgccgccaccttgctccccccgccgcccgccgccgccgccttgctcctcctcgtcggcgagcacgaagaggaggctgacgccgccgccgccttcctccccacccgtcagccggcgccgccgtcctgcccgttgccccagagagaagaagagagagagagagaagaggaaaggagagaagaggggaaagaaagaggaggctgacctggacaggctgacatggtcgatccaagcaagaatgagcagcgacggcgcctctggaagcattggaatgaagcacgacgacggcgatcaccggccgagcaccggagcgtcgtcgcggcggtgccccagctgcggccacgaccctgactgcaacaagccgttcgacatggttgggatgcctgccggcgtcaggttcgatccgacggaccaggagctgattgagcacctggaggccaaggtgaaggatggcggctcaacatcgcaccctctcatcgatgagttcatacacaccattcaaggagaagatggcatctgctacacacatcctgagaacctgcccggtgtgacaagggatggcctgagcaagcacttcttccaccggtcagccaaggcctaccccactggcacaaggaagcggaggaaggtcctggctgatcagcagcctgacgaccatccacaggccagcaagggcagaaatgtcgcggcggcggagacacggtggcacaagaccggcaagacgcgggagatcacggtgcgcggccagcccaagggctgcaagaagatcctggtgctctacaccagcttcggcaagaagcgcaaggcggagaagaccagctgggtgatgcaccagtaccacctcggcgagctggacgacgagaaggaaggggagctcatcctctccaaggtcttctaccagacgcagacgcggagcgccgccgcagcagaggcaccggtaagctcgggtgctgccatggaggtgcagggacagcagcagcaagtgctgaagctgcaggctgatgatggtcacttcagctcagctcctaccaagaagagactgcatcaggatgttgtagcacaagtaaaagttgatcggggtcaccactgcatgccagcacaacgccaagtcaacttcaatttgaaagtaactcctgtgcccaccaccagttcattccctgtcgttgtcgacaaacagttggaagaacttcaattcatcagccccaaaaagcagattggcctcaccagcgctggcctcctgacaaccaagatcaacatggataacttcctggattcacagtagatgaacttaactggtaaatggttctagtgttgattttgaaacgtacaacagaaactggctgtaatatcttcggctactgctagagtgctagtgctagtaacctatctacttctgttcttagcccgtagggcagtattgtttcttattgagaatgactgtctatatacatgtacaaaatctcttatattatgaaatagaggtaatatgtagtttttctgtttatgtttgtaggatactaacatcaataaaatcagaccatgatagatttcttcatcc

SEQ ID NO: 36087 - DNA, 588 bp, Oryza sativa
  Clone ID: PAT_MRT4530_39947C.1
atgtcagcctgtccaggacggcggcgccggctgacgggtggggaggaaggcggcggcggcgtcagcctcctcttcgtgctcgccgacgaggaggagcaaggcggcggcggcgggcggcggggggagcaaggtggcggcgtcagcctcctctccgtgctcgccaacgaggagcaaggcggcggcgtcagcctcctctccgtgctcgccgatgaggaggagcggcgggcgaccgcggcggcggagctggagccacacgcgcagccggcggaggcgcggggaggcggcgagctcgtcggcttggcggtggcggcgaggcgaggcagcccgctagacctagcgtcgcggcggtgccgccgccgccgacgacagtcctcctggacaacgtcctcgctgcctcgcagacggagatctggatcaagaccgggatgccgacgagcaccctcaccaagcacctgcgaggcctgccgctcctgctcgcccgccgccatcctcgtcgcgtcgttttcccaaccgccgcgccgcttcgccatcttcgccgtcttcgccgtgccgctcctctccttccacttcatctccaccggcgagtag

SEQ ID NO: 36088 - DNA, 630 bp, Oryza sativa
  Clone ID: PAT_MRT4530_39948C.1
atgcgagggttgggagattctgagcgaaagcctagtcctttcagggccgacagtgggatgctcttgagcatcgtaaccccgttggggggcactgtcatggtgtctcttctctccatagtggaatcctcaggtgaatgccttcccacttcctatatcaaaatcccccatcatttgcagcatttgcactccctctccctctctctctctcttcccactaaactctttcaacctggagactgggacaaggtggaggagatcaaggtggcaacccctgcaggtgctgagtgcaggaggtgcatcctccctcccattgtgtgctcctcctgctatgcacctccagcacccagcagctgcagcagccatggctgctcctgctcccccagcaacagctcacctccagcagcagaagcctgcaatggcagcaggcagcaggctcatgggacagcagcagctcctcctcatccagaagagaagaagcctgtgaagagcaacctcaagaaggcaccaccagctgcagttgcagctcaggaagagaagaacagggtgtcgttggtggtgagcaggaaggtgacctggccggatgctcagggcaaggatcttgcccatgtcctggagttccatcccaggtag

SEQ ID NO: 36089 - DNA, 1299 bp, Oryza sativa
  unsure (1)..(1299): unsure at all n locations
  Clone ID: PAT_MRT4530_3994C.1
atggcttctgcctcttctcttggcctattactgatgctcgcggcgctggtctccacggccaccgcgcatttgtcgccgacgttctacgacacgtcgtgcccccgagccatgtccatcatcaagagcaccgtgacggccgccgtgaacaacgagccacgcatgggcgcgtctctgctcaggctgcacttccacgactgcttcgtccaagcacgccgaaaagtagctaacaggtttgcctgtctgtcagactacggctgtgacgcctcaattttgctggccggaaacgagaggaatgcagccccaaacttttctgtcagaggctacgacgtcatcgacagcatcaagacgcagatcgaggccgtgtgcaagcagaccgtctcctgcgccgacatcctcaccgtcgccgcccgcgactctgtcgtcgcgcttggaggtccgtcatggagtgttccgctagggagaagggactccaccggagccgctaccgcggcccaggtgattagcagccttgctccttctacagatagcctcgcacagctcatcagcgcgtacgcgagcaagggacttagcgccactgacttggttgctctctcaggtgcgcacacgattggtatggcacggtgcaggggcttcaggacgaggctatacaacgagaccaacatcgacgccgcctttgcggcggcgctcaaggccaactgcccggcgacgccgggcagcggcgacggcaacctggcgccgctggacacgacgacgcccaccgcgttcgacaacgcctactaccgcaacctgctgtcgaacaaggggctcctgcacgcactccgaccaggtgctcttcaacaacggcagcacggacaacacggtcaggaacttctcctccaacacggcggcgttcaacagcgccttcacggcggccatggtgaagatggggaacatctcgcccttgactggaacccaggggcagatcaggctcaactgctccaaggttaactagccggtgatgacgagtacgtgatggtctcagggaataaagctaggccccgacattgctgccaatagcgtgcagctagctgtggccatctcatcactttcatggttcaatggtttcatcagcaagtgcacggaacagactagagagtgtaggtgtatgcatgtgtgatgtcatgtaacgagttgccatgcaaaggcatgaggattacggacctctctttcgtcgtaatcctagcagctacagatttcaactgtcgtgttaaccaagtgaagtgctagtttcgaatgtgttggcccnanaaaaaataaaaa

SEQ ID NO: 36090 - DNA, 320 bp, Oryza sativa
  Clone ID: PAT_MRT4530_39950C.1
gcgcccacgcgtacaacaacgcgtccgtccacgcgtccacttcattaaaacattacacatggctcatcctacagtggagctacaggttccaacagggtcagccgacgggggtgctgagggtgccatccatgaccgaccacacgattacgcagtaagccacagaagccgaggcagacatgtccagaataggacccatagctgcggattggacagacagtcagatgaccataatcggagaaatggacacaggggcgactgcgaagatgttgaacctgcttgggaagatagaaatggtgtctggagggccggcaaaagaggag

SEQ ID NO: 36091 - DNA, 2349 bp, Oryza sativa
  Clone ID: PAT_MRT4530_39951C.1
atggcggaagagagagaaagcttcgaaggtcaatgggcgccatccgacgtaacggaagagaacttgaaggagatggtggcgcacggcgttctccctgccaaggagatcatcgggtggcgaccagcgcacggtgaggctttcccgtctccggatactcatgagattgtggtcttctcgcatttcttctacggcggctttgctcttccgacctcaaaattcttccgcgggatcttgaatttctatggaatcagcttgcatcacctaaacccgaattccatagtgcatatcgccaatttcgtccatgcttgtgaagcctttttggggatcaaacctcactttgccctattccgccggatcttcttcctcaagccccaaccaaacaagaacaaaccgtgtgtagtcgggggggcaggattccaactaaggggaactctgagccaaaaatatttctcgatgcccttcaagacttcgaacaaaggatggcatgcaaactggttctatgttcagaatcccgagcctgctcttcccgggtactcttgtcttcctccagtgtaccaagatacttggaattctcttccgatcggagatgaagcagtacaagccttggagttgttggatcgtatgttaaatcttaaagaacaaggcttacagggagagcagatcactcggcacttcattaaatgccgactggcgccaatcaaggaaagatcccgcacagcattcgagttcgacggcaaacatgatcccaaccgtgaagaaccagactccctggatttcaaaatcatgaaggagaggatgtataaaatcttctcaaatgcaattgtagtcagctactctcatcaactgccagtcgtgccatataatgcattcaatctgcctccacaggaatatgcattgatgaagtcagatccaccagtctctcagcgccggtctcctcgccaacacaccgctcagggaggtggagggccaacgatcagaccagatccgcaacctcagacctccaaattggctggtcaaacaggtcctcgcaagagaaaactggtacttgatgatgatgaaggcgacgatgataaatctggggataatggctcgccaaataaacccccaaagcgtaccatgcccaggaaaaaactggctggccgcgcaataccaaagatcagaacatcttccaggaaaccatctgatatagatccatctggaaaagaccctgatccggctatgacagagcaaaatatatccaaggaccccgagccgactactgaaaaccagccgactgctgaaagccagccgactggcgcccatgcttcgggaggtaaggccaatccgagtgacctgccgccgactggaaaccagtcggcaacgactgaaacggcaacaactcaagagcccccgactggaaaccagtcggacgcaggccctgatccagagattcccgaagtagaagcgcagacgacgacttcgcaaggaccagaggttggtaacgactcgatagctgggtcttcaggaccatcagatgatgacggggaagaaattcctcgcataaaggcgaccgacgactctcgtcctcctatcttgatcaaatggtgggatgagaactcacaagccgccggtatagtcataaaccgtcaaaaagaagatgaagaagtgtgccagctaaagaaagcgcttggagaagccactcgtattgtaaatagaatccatcttcgcaatgaggccaagactacaactctggaaaagctggttcctcatttgggaactctagaagcagtcagggaccagctgcatgaggccaaggcgcaagccgccaggatggaacagatggcgaggcaaattgaagccctggagagagacaagacagaactggctgcgcaaagggactcagccttgaaggaagtcgaagatcgcaagatcaaatcccaagctcagtttgacgtcctggttggcaagatcaagaggcttgaaggagcaagggatggcgtcgccaacgccgctgcaccaattatccaagccatgttcctcaataatggtggtccgagtgcactcgacgcaaccgaaatatttgacaagctgagtgttgctccggaagtatatttcaagaatatcaagaaagctggaagtatgggagctggcatggccttggcgatgacaaaatccttgtacccgagaattgaagtcgacaccattgatggatttgcagacgggacaagtgaagaagctgcccttgatcttatcagcagtgcgcaaaatgcggctgacaaaattgcgagcgatgttgtagagcaatttcgcaacaacgacctccagccgagtaatgaagactctgatgatgaaagaactgattctgactga

SEQ ID NO: 36092 - DNA, 1102 bp, Oryza sativa
  Clone ID: PAT_MRT4530_39952C.1
ctagcccccagccttgtcgtcggaggaattttctcggaggataaggctcttggacctttgacctgccttggttgaataagctctgatcctagcccccagccgtgaagttggaaagttgatttccgatttcacggcttggttaatacgcacggcgagaactcttacacgaccagatcttacatggtctttcgtctctacaggatctgacaaggccttatcggctctgggcgtccccagccgaagatcccttaggttcctcggaggccttgtcgagacggcgtaaagggtcaataggtgttatcgtggtaatggatctataaatttgacgtagatgatcagacgaccaccacactgggcaaagaccaactgtatagttgtgcacaacaaatcgcataggtagtggcagaatcgctacatcgctggcagaagaccagttgtagtcataactcgaccacttgaagtggaggtatgagagatcactacgacctcgaccattagaagtcgtggtgcgaggattgctacgttgctggctgaaaaccagtcgtagtcgtacctcaaccagtggaagttgtggtacgaggatcgctacgttgtcgattgaagaccaatcgtagtggtacctcgaccatttgtaaggaatccagagtaatatatggacgacattctcgtgaactgcgagaatagcctcttgatgaagacgaagacaatgaggaattatcgtagtcggaggttcggctcctatacctactacctcatcctcgggccctctagaagtctggggatctcgagtttcgtcgtcgtcgtggtgagagatcgctacgatctactggccaaggaccaggcgaaggcgtatctcgatcacctaaagacgaattttcaggtggtgagaaatcgctacgatctactggtcgagaaccaggtggtgagagatcgctacgatctaccggtcgagaaccaggtggtgagaggtcgctacgatctactggtcaagaaccaggttgggtacgacgacttagcctttatcgagaaagttctcgacaatggggtgtactcgaccacaacctactcgagtgctcaattgtttctgaaaaatattttctag

SEQ ID NO: 36093 - DNA, 2436 bp, Oryza sativa
  Clone ID: PAT_MRT4530_39953C.1
atggcggaagagagagaaagcttcgaaggtcaatgggcgccatccgacgtaacggaagagaacttgaaggagatggtggcgcacggcgttctccctgccaaggagatcatcgggtggcgaccagcgcacggtgaggctttcccgtctccggatactcatgagattgtggtcttctcgcatttcttctacggcggctttgctcttccgacctcaaaattcttccgcgggatcttgaatttctatggaatcagcttgcatcacctaaacccgaattccatagtgcatatcgccaatttcgtccatgcttgtgaagcctttttggggatcaaacctcactttgccctattccgccggatcttcttcctcaagccccaaccaaacaagaacaaaccgtgtgtagtcgggggggcaggattccaactaaggggaactctgagccaaaaatatttctcgatgcccttcaagacttcgaacaaaggatggcatgcaaactggttctatgttcagaatcccgagcctgctcttcccgggtactcttgtcttcctccagtgtaccaagatacttggaattctcttccgatcggagatgaagcagtacaagccttggagttgttggatcgtatgttaaatcttaaagaacaaggcttacagggagagcagatcactcggcacttcattaaatgccgactggcgccaatcaaggaaagatcccgcacagcattcgagttcgacggcaaacatgatcccaaccgtgaagaaccagactccctggatttcaaaatcatgaaggagaggatgtataaaatcttctcaaatgcaattgtagtcagctactctcatcaactgccagtcgtgccatataatgcattcaatctgcctccacaggaatatgcattgatgaagtcagatccaccagtctctcagcgccggtctcctcgccaacacaccgctcagggaggtggagggccaacgatcagaccagatccgcaacctcagacctccaaattggctggtcaaacaggtcctcgcaagagaaaactggtacttgatgatgatgaaggcgacgatgataaatctggggataatggctcgccaaataaacccccaaagcgtaccatgcccaggaaaaaactggctggccgcgcaataccaaagatcagaacatcttccaggaaaccatctgatatagatccatctggaaaagaccctgatccggctatgacagagcaaaatatatccaaggaccccgagccgactactgaaaaccagccgactgctgaaagccagccgactggcgcccatgcttcgggaggtaaggccaatccgagtgacctgccgccgactggaaaccagtcggcaacgactgaaacggcaacaactcaagagcccccgactggaaaccagtcggacgcaggccctgatccagagattcccgaagtagaagcgcagacgacgacttcgcaaggaccagaggttggtaacgactcgatagctgggtcttcaggaccatcagatgatgacggggaagaaattcctcgcataaaggcgaccgacgactctcgtcctcctatcttgatcaaatggtgggatgagaactcacaagccgccggtatagtcataaaccgtcaaaaagaagatgaagaagtgtgccagctaaagaaagcgcttggagaagccactcgtattgtaaatagaatccatcttcgcaatgaggccaagactacaactctggaaaagctggttcctcatttgggaactctagaagcagtcagggaccagctgcatgaggccaaggagtgcgccaaaaagacagagaaagagttaagggaccgaatcgcccagctccaggatgcaaacttcgaactaagtggttcttcaaaagcgcaagccgccaggatggaacagatggcgaggcaaattgaagccctggagagagacaagacagaactggctgcgcaaagggactcagccttgaaggaagtcgaagatcgcaagatcaaatcccaagctcagtttgacgtcctggttggcaagatcaagaggcttgaaggagcaagggatggcgtcgccaacgccgctgcaccaattatccaagccatgttcctcaataatggtggtccgagtgcactcgacgcaaccgaaatatttgacaagctgagtgttgctccggaagtatatttcaagaatatcaagaaagctggaagtatgggagctggcatggccttggcgatgacaaaatccttgtacccgagaattgaagtcgacaccattgatggatttgcagacgggacaagtgaagaagctgcccttgatcttatcagcagtgcgcaaaatgcggctgacaaaattgcgagcgatgttgtagagcaatttcgcaacaacgacctccagccgagtaatgaagactctgatgatgaaagaactgattctgactga

SEQ ID NO: 36094 - DNA, 348 bp, Oryza sativa
  Clone ID: PAT_MRT4530_39954C.1
tttttttttttttttttttttttttttttttttttttttttttttttttttttttttttttttttttttttttttttttttttttttttggacagcaaaaaatgcgtcggtagataccatgaatgaataataaggaagaaaaaataacagcagaagttgaagttgcatatacataaaaaaataaaaagagatgatgaaaaggtgcataccagggtaaggaaaggaagaagaaagaggatggaatggaatgtacaggcacagctagggagaaggtgagctgcgcagcacaatggagatggcgtggaagctgagaaaagcgaaaagaaaaaggagaaaaaaaaaaaaaaa

SEQ ID NO: 36095 - DNA, 2095 bp, Oryza sativa
  Clone ID: PAT_MRT4530_39955C.1
atggcgtcgcccacccacgccgcctacctcgcccccaccgcccctccccgccatctccacctcctcctccgcctccgcctccgcggccgccccgccgtctcaacctgcgtccgcgccaccgcccgcgggggggatggcgggtcgtcgtacctggacatgtggaagaaggccgtggagagggagcgccgctcggcggagatcgcgcaccgcctccagcaatcctcctccgccgccgccgccgccgtgaaggaggaggagggagaggggaaggctgcggcggcggcgggggacgtggagaggaggacggcgcggttcgaggagatgctgcgggtgccgcgcgaggagcgggaccgcgtccagcggcggcaggtcatcgaccgcgccgccgcggcgctggcggcggcgcgcgccgtgctcaaggacccgccgcccccgcctcccccgtccccgccttccacgccgccgcaggagcgggaacagcagcagaagccggcggcgaccgcgatccaggccggatcagagagtggcctggtttcccgtacggctccgggggagtcggatcgggcatccccgccgccgccggtgacggagacggcgaccgaggcggcgaaagtttcagtgccggactctggtgattcatctcctttcaagaagtcaagttccaagctcggtactccaggcccggacttctggtcgtggttaccacctgtggaaaatagcactaaactaggagaaatcgacactgggttaaaaccatctgagaaattagactccttcgccggtcagcctgatctgctgatggaaaaggaacagtcagaagacattttatcgctcccgttcgaaacctctttcttcaagaaggaagaccgatctcttcctcccttccagtcgtttgctgagcctgaaaatgtggaatccgagcccagtattactgctgatgcagaggagacattcgaagatcagttttcgaaaaacgcagctgaggcagctagagctcttagtgcaagcgacgagaagtcatcacatggggtgcgtccagatggttcattgtggtggaaggagacaggtgtagaacaaaggcctgatggtgtaacttgcaagtggaccgtgattaggggagttagtgctgatggagctgttgaatgggaggacaagtattgggaggcttcagaccggtttgatcacaaagagctaggttctgagaagtctggtcgtgatgctacagggaatgtttggcgggaatactggaaagagtctatgtggcaggatttcacatgtggtgttatgcacatggagaagacggcagacaagtggggacagaatggtaaaggggagcagtggcaagagcagtggtgggagcattacgattcaagcggtaaagctgagaaatgggctgataaatggtgcagcttggatccaaatacaccactagatgttggtcacgctcatgtttggcatgaaaggtggggcgagaagtatgatggctgcggaggtagtgcaaaatacactgacaaatgggctgaacgatcagagggtgacgggtggtcaaagtggggcgataagtgggatgagcatttcgacccgaatggccatggagtgaagcaaggggagacctggtgggcaggcaagtacggggatcgctggaatcgcacctggggcgagcatcacaactgtactggttgggtgcacaagtatggcaggagcagcagcggtgagcactgggacacacacgttccccaggacacctggtatgagcgttttccgcactttggcttcgagcactgcttcaacaactcggtgcagctccggtctgtgaagaggcagactccaaaaaacactaagcctgaaaaagattagatatttagaatagaatctactcaattgctatcataaaaaatagttggctacatggccatctttcatttttgatcttgctgaagagcccatgcttgtaaaataagattgaatggctgatttcagttgtccggttttatgccaatacctgtaccgagctatgttatcaaaagttcatatgctactatgcaatagaaaggttccttcttttagtttccaaaaccaaaaaaccccacaaaaa

SEQ ID NO: 36096 - DNA, 2436 bp, Oryza sativa
  Clone ID: PAT_MRT4530_39956C.1
atggcggaagagagagaaagcttcgaaggccaatgggcgtcatccgacgtaacagaagagaatcttaaggagatggtggcgcacggcgttctccctgccaaggagatcatcgggtggcgaccagcgcacggtgaggctttcccgtctccggatactcatgagattgtggtcttctcgcatttcttctacggcggctttgctcttccgacctcaaaatttttccgcgggatcttgaatttctatggaatcagcttgcatcacctaaacccgaattccgtagtgcatatcgccaatttcgtccatgcttgtgaagcctttttggggatcaaacctcactttgccctattccgccggatcttcttcctcaagccccaaccaaacaagaacaaaccgtgtgtagtcgggggggcaggattccaactaaggggaactctgagccaaaaatatttctcgatgcccttcaagacttcgaacaaaggctggcatgcaaactggttctatgttcagaatcccgagcctgctcttcccgggtactcttgtcttcctccagtgtaccaagatacttggaactctcttccaatcggagatgaagcagtacaagccttggagttgttggaccgtatgttaaatcttaaagaacaaggtttacagggagagcagatcactcggcacttcatcaaatgccgactggcgccaatcaaggaaagatcccgcacagcattcgagttcgacggcaaacatgatcccaaccgtgaagaaccagactccctggatttcaaaatcatgaaggagaggatgtataaaatcttctcaaatgcaattgtagtcagctactctcatcagctgccagtagtgccatataatgcgttcaatccgcctccgcaggaatatgcattgatgaagtcagatccaccagtctctcagcgtcggtctcctcgccaacacaccgttcagggaggtggagggccaacgatcagaccagatccgcaacctcagacctccaaattggctggtcaaacaggtcctcgcaagagaaagctggttcttgatgatgatgaaggcgacgatgataaatctggggataagggctcgcctaataaacccccaaagcgtaccatgcccaggaaaaaactggctggccgtgcaatgccaaagatcagaacatcttccaggaaaccatctgatatagatccatctggaaaagaccccgatcctgccatgacagagcaaaatatatccaaggaccccgagccgactgctgaaaaccagccgactgctgaaagccagccgactggcgcccatgcttcgggcgatagggccaacccaagtgacctgccgccgactggaaaccagtcggcaacaaccgaagcggcaacaactcaagaacccccgactggaaaccagtcggacgcaggccctgatcaagagatccccgaagtagaagcgcagacgacgacttcgcaaggaccagaggctggtaacgactcgatagctgggtcttcaggaccatcaggtgatgacggagaagaaattcctcgcataaaggcgaccgacgactctcgtcctcctatcttgatcaaatggtgggacgagaactcacaagctgccggcatagtcataaaccgtcaaaaagaagatgaagaagtgtgccagctgaagaaagcgctcggagaagccactcgtattgtaaatagaatccatcttcgcaatgaggccaagactacaactttggaaaagctggttcctcatttgggaactctagaagcagttagggaccagctgcatgaggccaaggagtgcgccaaaaagacagagaaagagttaagggaccgaatcgcccagctccaggatgcaaacttcgagctaagtggttcatcaaaagcgcaagccaccagaatggctcagatggaaaaacagattgaagccttgaaaaaagacaaagcaggactggctgcagaaagggactcagccttgaaagaaattgaagaccgtaaaatcaagtctcaagctcagtttgacgtcctggttggtaagatcaagaggcttgaaggagcaagagatgaagtcgccaatgtcgctacaccactcatccaagccatgttcctcaataacagtggtccgagtgcactcgacgcaaccgaaatattcgacaagctgagtgttgctccggatgtatatttcaaaaatatcaagaaagctggaagtatgggagctagcatggccttggcgatgacaaaatccttgtacccgagaattgaagttgataccattgatggatttgcagacgggacaagtgaagaagctgctcttgatctcatcaataatgcgcagagtgcggctgacaaaattgcgagtgatgttgtagagcaattccgcaacaacgacctccagccgagcgataataactctgatgatgaaaggactgattctgactga

SEQ ID NO: 36097 - DNA, 773 bp, Oryza sativa
  Clone ID: PAT_MRT4530_39957C.1
ccgtcctgtagccactggccaagaccacgtcgcgtcactaccgccgtcccctctcctctcaccacccgccccccccatatccgcctcttctttacctgagccgctatttgctttgtgctttcccctcagccccactccaacccaccccacagctccatccccgtcgcctcctccgacccgaaggaagctgccttcacccaagccatggacctccatcgcaagcgcctgcgtgtgcctcctttctattgccagtttgccggccccgcaatgaccattcccccctgcccaccatcaccgcggcccacggtctcaaatccctccccccgacgtgcgggccccacctgtcaccctctcccatccgtgcccaccgattcgcccgttccaatccgtttgccctggtcgctctctcgcatctcgcgcgcctcgtgagcgaaacgaaatccctaattaaaaccgcttaatccaatttaatcccctcgtctcccctctcctcctcctccctcctcactctctcccctcctctcccctcctcctccccccacctgcactaattaatcacgccacgagacgagatcccccttctccttcctcctcccaccgcccgcctcctcctcctcctcctcctcctccgccgccgccgccgcgcccccccctctcgtctccgcgccacccaggtcagccgccgcctcgccctctcgttctcttcatctctctcttcgcgtcctgtcgaatgctggtctctgcttgcgctcgcagcgtgggggccccgatcc

SEQ ID NO: 36098 - DNA, 2469 bp, Oryza sativa
  Clone ID: PAT_MRT4530_39958C.1
atggcggaagagggagaaagcttcgaaagccaatgggcgacatccgacgtaacggaggagaatcttaaggagatggtggcgcacggcgttctccctgccaaggaaatcatcgggtggcgaccagcgcacggtgaggctttcccgtctccggatactcatgagattgtggtcttctcgcatttcttctacggcggctttgctcttccgacctcaaaatttttccgcgggatcttgaatttctatggaatcagcttgcatcacctaaacccgaattccatagtgcatatcgccaatttcgtccatgcttgtgaagcctttttggggatcaaacctcactttgccctattccgccggatcttcttcctcaaaccccaaccaaacaagaacaaaccgtgtgtagtcgggggggcaggattccaactaaggggaactctaagccaaaaatatttctcgatgcccttcaagacttcgaacaaaggatggcatgcgaactggttctatgttcagaatcccgagcctgctcttcccgggtactcttgtcttcctccaatgtaccaagacacttggaactctcttccgatcggagatgaagcagtacaagccttggagttgttggatcgtatgttaaatcttaaagaacaaggcttacagggagagcaaatcactcggcacttcatcaaatgccgactggcgccaattaaggaaagatcccgcacagcattcgagttcgacggcaaacatgatcccaaccgtgaagaaccagactccttggatttcaaaatcatgaaggagaggatgtataaaatcttctcaaatgcaattgtagtcagctactctcaccaactgccggtcgtgccattcaacgcattcaatccgcctccacaggaatatgcattgatgaagtcagatccaccagtctctcagcgccggtctcctcgccaacacaccgctcagggaggtggagggccaacgatcagaccagatccgcaacctcagacctccaaattggctggtcaaacaggtcctcgcaagagaaaactggtacttgatgatgatgaaggcgacgatgataaaactggggataagggctcgcctaacaaacccccaaagcgcaccatgcccaggaaaaaactggctggccgcgcaatgccaaagatcagaacatcttccaggaaaccatctgatatagatccatctggaaaagaccctgatccggctaagacagagcaaaatatatccaaggactccgagccgactactgaaaaccagccgactgctgaaagccagccgactggcgcccatgcttcgggagatagggccaatccgagtgacctgccgccgactggaaaccagtcggcaacaactgaaacggcaacaactcaagagcccccgactggaaaccagtcggacgcaggccctgatcaagaaattcccgaagtagaaacgcagacgacgacttcgcaaggaccagaggctggtaacgactcgacaatcgggtctccgggtaaagaacaaagatcacttcacgctcagccaggaccatcaggagatgacggagaagaaatccctcgcataaaggcgaccgacgactctcgtcctcctatcttgatcaaatggtgggacgagaactcacaagccgcaggcatagtcataaaccgtcaaaaagaagatgaagaagtgtgccagctgaagaaagcgctcggagaagccactcgtattgtaaatagaatccatcttcgcaatgaggccaagactacaactttggaaaagctggttcctcatttgggaactcttgaagcggttagggaccagctacatgaggccaaggagcacgccaagaagacggaaaaggagttaagggaccgaatcgctcagctccaggattcaaactatgagctgagtggttcatccaaagcgcaagccaccagaatagctcagatggaaaaacagattgaagccttgaaaaaagacaaaacagagctggctgcagaaagggactcagccgtgaaagaagttgaagaccgtaaaatcaagtctcaagctcagtttgacgtcctggttggtaagatcaagaggcttgaaggagcaagagatgacgtcgccaatgccgctgcaccaattatccaagccatgttcctcaataatggtggtccgagtgcactcgacgcaaccgaaatatttgacaagctgagtgttgctccggaagtatatttcaagaatatcaagaaagctggaagcatgggagctggcatggccttggcgatgacaaaatccttgtacccgagaattgaggttgacaccattgatgggtttgcagacgggacaagtgaagaagctgcccttgatcttatcagtagtgcgcaaaatgcggctgacaaaattgcgagcgatgttgtagagcaatttcgcaacaacgacctccagccgagtaatgaagactctgatgatgaaaggactgattctgactga

SEQ ID NO: 36099 - DNA, 2436 bp, Oryza sativa
  Clone ID: PAT_MRT4530_39959C.1
atggcggaagagagagaaagcttcgaaagccaatgggcgccgtccgacgtgacggaggagaacctgaaggagatggtggcgcacggcgttctcccagccaaggagatcatcgggtggcggccagcatgcggtgaggctttcccgacccctgatacacatgagatcgtagtcttctcgcatttcttctacggcggctttgctcttccgacctcaaaatttttccgtgggatcttgaatttctatggaatcagcttgcatcacctaaacccgaattccatagtgcatatcgccaatttcgtccatgtatgtgaagcctttttggggatcaaacctcactttgccctattccgccggatcttcttcctcaagccccaaccaaacaagaacaaaccgtgtgtagtcgggggggcaggattccaactaaggggtactctgagccaaaaatatttctcgatgcccttcaaaacttcgaacaaaggatggcatgcaaactggttctatgcccagaatcccgagcctgctcttcccgggtacacttgtctccctccagtgtaccaagatacttggaactctcttccaatcggagatgaagcagcacaagccttggagttgttggatcgtatgttaaatcttaaacaacaaggcttacagggagagcaaatcactcggcacttcatcaaatgccgactggcgccactcaaggaaagatcccgcacggcattcgagttcgacggcaaacatgatcccaaccgtgaagaaccagactccctggatttcaaaatcatgaaggagaggatgcacaaaatcttctcaaatgcaattgtagtcagctactctcaccaactgccagttgtgccatacaacgcattcaatccgcctccgcaggaatatgcattgatgaagtcagatccaccagtttctcagcgccggtctcctcgccaacacaccgctcagggaggcggagggccaacgatcagacaagatccgcaacctcagtcctccaaattgactggtcaaacaggtcctcgcaagagaaagctggtacttgatgatgatgaaggcgacgatgataaatctggggataagggctcgcctagtaaacccccaaagcgtaccatgcccaggaaaaaactggctggccgtgcaatgccaaagatcagaacatcttccaggaaaccatctgatatagatccatctggaaaagaccctgatccggctatgacagagcaaaatatatccaaggaccccgagccaactactgaaaaccagccgactgctgaaagccagccgactggcgcccatgcttcgggagatagggccaatccgagtgacctgccgccgactggaaaccagtcggcaacaactgaaacggcaacaactcaagagcccccgactggaaaccagtcggacgcaggccctgatcaagagatccccgaggtagaagcgcagacgacgacttcacaaggaccagaggctggtaacgactcgatagctgggtcttcaggaccatcaggtgatgacggagaagaaatccctcgtataaaggcgaccgacgactctcgtcctcctatcttgatcaaatggtgggacgagaactcacaagccgccggcatagtcataaaccgtcaaaaagaagatgaagaagtgtgccagctgaagaaagcgctcggagaagccactcgtattgtaaatagaatccatcttcgcaatgaggccaagactacaactctggaaaagctggttcctcatttgggaactctagaagcagttagggaccagctgcatgaggccaaggagtgcgccaaaaagacagagaaagagttaagggaccgaatcgcccagctccaggattcaaactatgagctgagtggttcgtcaaaagcgcaagccgccaggatggaacagatggcgaagcaaattgaagccctggagagagacaagacagaactggctgcgcaaagggactcagccttaaaggaagtcgaagatcgcaagatcaaatctcaagctcagtttgacgtcctggttggtaagatcaagaggcttgaaggagcgagggataacgtcgccaatgccgctgcaccaattatccaagccatgttcctcaataatggtggtccgagtgcactcgacgcaaccgaaatatttgataagctgagtgttgctccggaagtatatttcaagaacatcaagaaagctggaagtatgggagctggcatggccttggcgatgacaaaatccttgtacccgagaattgaaatcgacaccattgatggatttgcagacgggacaagtgaagaagccgcccttgatcttatcagcagtgcgcaaactgcggctgacaaaattgcgagtgatgttgtagagcaatttcgcaacaacgacctccagccgagtaatgatgactctgatgatgaaaggactgattctgactga

SEQ ID NO: 36100 - DNA, 1332 bp, Oryza sativa
  Clone ID: PAT_MRT4530_3995C.1
ccggccgggcaagccacggccagcgaaaaagcttaaaaaaaactgcagttatttaggtaggattaagcatacgcgcacggcgcatcatatcgctcactctgcatggcttcggcttcttctgtcagcttaatgctgctcgtggctgcagctatggcctcagccgcctcggcgcagctgtcggcgacgttctacgacacgtcgtgcccaaacgcattgtccaccatcaagagcgcagtgacggccgccgtgaacagcgagccccgaatgggagcctcgctggtcaggctgcacttccacgactgcttcgtccaaggctgtgacgcgtctgttctgctgtccggccaggagcagaatgcaggcccgaacgctgggtcacttcggggattcaacgtcgtcgacaacatcaagacgcaggtcgaggccatctgcagccagaccgtctcctgcgccgacatcctcgccgtcgccgcccgtgactccgtcgtcgcgctcggagggccgtcgtggacggttctattgggaagaagggactccaccactgcgaacgaaagccaagcaaataccgacctccctgccccttcctctagcctcgctgaacttatcggcaatttctccagaaagggactcgacgtaaccgacatggttgctctctcaggcgcacacacgatcgggcaggcgcagtgccagaacttcagggacaggctctacaacgagacaaacatcgactccagcttcgcgacggcgctcaaggccaactgcccacggccgacgggcagcggcgacagcaacctggcgccgctggacacgacgacgcccaacgccttcgacagcgcctactacaccaacctgctgtccaacaagggcctcctgcactccgaccaggtgctcttcaacggcggcagcacggacaacacggtcaggaacttctcctccaacacggcggcgttcaacagcgccttcacggcggccatggtgaagatggggaacatctcgcccttgactggaacccaggggcagatcaggctcaactgctccaaggttaactagccggtgatgacgagtacgtgatggtctcagggaataaagctaggccccgacattgctgccaatagcgtgcagctagctgtggccatctcatcactttcatggttcaatggtttcatcagcaagtgcacggaacagactagagagtgtaggtgtatgcatgtgtgatgtcatgtaacgagttgccatgcaaaggcatgaggattacggacctctctttcgtcgtaatcctagcagctacagatttcaactgtcgtgttaaccaagtgaagtgctagtttcgaatgt

SEQ ID NO: 36101 - DNA, 189 bp, Oryza sativa
  unsure (1)..(189): unsure at all n locations
  Clone ID: PAT_MRT4530_39960C.1
ggcacgaggtagcttgcaccagtatgatctattgtaatatattccatatatgcaagttgtccaagtgcaattggtgcagtcatcaaatatcagaccatttccagcaacatccagcctcgggcctcatgcanccgagtaggcagtacattcgggaaacgtgtcggcatccgtagctccccagtcagtgta

SEQ ID NO: 36102 - DNA, 2436 bp, Oryza sativa
  Clone ID: PAT_MRT4530_39961C.1
atggcggaagagagagaaagctttgaaggccaatgggcggcgtccgatgcgacagaggagaatctgaaggagatggtggcgcatggtgttctcccagccaaagagatcatcgggtggcggccagcgtacggtgaggcatttccatctccagatacgcatgaaattgtagtcttctcgcatttcttctacggtggttttgctcttccgacctcaagatttttccgtgggatcttgaacttctatggaatcagcttacatcacctaaacccgaattccatcgtacatattgccaatttcgtccatgcttgtgaagcctttttggggatcaagcctcactttgccctattccgccggatctttttcctcaagccccaaccaaacaagaacaaaccgtgtgtagtcgggggggcaggattccaactgaggggaactctgagccaaaaatatttctccatgcccttcaagacttcgaacaaaggctggcacgcaaactggttctatgtccaaaatcctgagcctgctcttcccgggtactcttgtcttcctccagtataccaagatacctggaactcccttccaatcggagacgaagcagtccaagccttggaattgttggatcgcatgttaaagctcaaagagcaaggcttgcaaggagagcagattactcggcacttcatcaaatgccgactagcgccaatcaaggagagatctcgcacggcattcgagttcgacggcaggtatgatcctaaccgtgaagaatcagactctctggatttcagaatcatgaaggagaggatgtataaaatcttctcaaatgcaatcgtcgtcagctactcacaccagctgccagtcgtgccatataatgcgttcaatccgcctccacaggaatatgcactgatgaagtcagatccaccagtcactcagcgccggtctcctcgccaacacactgctcagggaggtggagggccaacgatcagaccggatccgcaacctcagacctccaaatcaactggtcagacgggtcctcgcaagaggaaactggtgcttgatgatgatgaaggcgacgatgataaatctggggataagggctcgcctaacaaacccccaaagcgcaccatgcccaggaaaaaattggccggccgcgcaatgccaaaaattagaacatcttccaggaaaccatctgatatagatccatctggaaaagaccccgatcctgccatgacagagcagaatatatccaaggaccccgagctgactactgaaaaccagccgactgctgaaagccagccgactggcgcccatgcttcgggagatagggccaatccgagtgacctgccgccgactggaaaccagtcggcaacaactgaaacggcaacaactcaagagcccccgactggaaaccagtcggacgcaggccctgatcaggagatccccgaagtaggagcgcagacgacggcttcacaaggaccagaggctggtaacgactcgatagctgggtcttcaggaccgtcaggtgatgacggagaagaaatccctcgcataaaggcaaccgacgactctcgtcctcctattttgatcaaatggtgggacgagaactcacaagccgccggtatagtcataaaccgtcagaaagaagatgaagaagtgtgccagctgaagaaagcgcttggagaggccactcgtattgtaaatagaatccatcttcgcaatgaggccaagaccacaactttggaaaagctggttcctcatttgggaactctagaagcagttagggaccagctgcatgagaccaaggagcttgccaagaagacggagaaagaattaagggaccgaattgctcagctccaagagtcaaattatgagctgagtggttcatcaaaagcgcaagccgccaggatggaacagatggcaaagcaaattgaagccctggagagagataagacagaactggctgcgcaaagggactcagccttgaaggaagtcgaagatcgcaagatcaaatctcaagctcagtttgacgtcctggttggtaagatcaagaggcttgaaggagcaagggatgatgtcgccaatgccgctgcaccaattatccaagccatgttcctcaataacggtggtccgagtgcactcgacgcaaccgaaatatttgacaagctgagtgttgctccggaagtatatttcaaaaatatcaagaaagctggaagtatgggagctggcatggccttggcgatgacaaaatctttgtacccgagaattgaagtcgacaccattgatggatttgcagacgggacaagtgaagaagctgcccttgatcttatcagtagtgcgcaaactgcggctgacaaaatagcgagtgatgttgtggagcaatttcgcaacaacgacctccagccgagtaatgatgactctgatgatgaaaggactgactctgactga

SEQ ID NO: 36103 - DNA, 575 bp, Oryza sativa
  Clone ID: PAT_MRT4530_39962C.1
ccggccgggtttgattgcataacgattcagttcattaatcttccaagatcctgagctgcatgaatcggcgcctagacgtcctgagagcatagcttgtttgtaatgaaccttggatgtctagaccctgacctattcggccactgcagtaaccaacgccagagttatcatgtcgagggcacaagagcaatctatatgtctcacacggggacatgctagctgatgctactgagtgggtcggcgatcacgctgctcagcccgggttcctggagtagactaatgacgacgattgcccagccgtggtactaacaggttcttctaaagagtagatcctcagacgtgtagtcgctcttggatagatggcacttcgccaaaggataagatcttgtcgagagtaattttactgccactgctgactttcgatcctgcatgcacaaacaatctgatctgagcatcagttcttagccatccgtcgaagttccaaacatatgacttatacgttgtagtatctgcgttctttttaccctcgttttcagtatcaggacttgatctgcggtgacagaattgattatacgatc

SEQ ID NO: 36104 - DNA, 2436 bp, Oryza sativa
  Clone ID: PAT_MRT4530_39963C.1
atggcggaagagagagaaagcttcgaaggccaatgggcgtcatccgacgtaacagaagagaatcttaaggagatggtggcgcacggcgttctccctgccaaggagatcatcgggtggcgaccagcgcacggtgaggctttcccgtctccggatactcatgagattgtggtcttctcgcatttcttctacggcggttttgctcttccgacctcaaaatttttccgcgggatcttgaatttctatggaatcagcttgcatcacctaaacccgaattccatagtgcatatcgccaatttcgtccatgcttgtgaagcctttttggggatcaaacctcactttgccctattccgtcggatcttcttcctcaagccccaaccaaacaagaacaaaccatgtgtagtcgggggggcaggattccaactaaggggaactctgagccaaaaatacttctcaatgcccttcaagacttcgaacaaaggatggcatgcaaactggttctatgttcagaatcctgaacctgctcttcccgggtactcttgtcttcctccaatgtaccaagatacttggaactctcttccaatcggagatgaagcagtacaagccttggagttgttggatcgtatgttaaatcttaaagaacaaggcttacaaggagagcaaatcactcggcacttcatcaaatgccgactggcgccaatcaaggaaagatcccgcacagcattcgagttcgacggcaaacatgatcccaaccgtgaagaaccagactccctggatttcaaaatcatgaaggagaggatgtataaaatcttctcaaatgcaattgtagtcagctactctcatcagctgccagtagtgccatataatgcgttcaatccgcctccgcaggaatatgcattgatgaagtcagatccaccagtctctcagcgccggtctcctcgccaacacaccgctcagggaggtggaggaccaacgatcagaccagatccgcaacctcagacctccaaattggctggtcaaacaggtcctcgcaaaagaaagctgatacttgatgatgatgaaggcgatgatgataaatctggggataagggctcgcctaataaacccccaaagcgtaccatgcccaggaaaaaactggctggccgtgcaatgccaaagatcagaacatcttccaggaaaccatctgatatagatccatctggaaaagaccccgatcctgccatgacagaacaagatatatccaaggaccccgagccgactgctgaaaaccagccgactgctgaaagccagccgactggcgcccatgcttcgggcgatagggccaacccaagtgacctgccgccgactggaaaccagtcggcaacaactgaaacggcaacaactcaagagcccccgactggaaaccagtcggacgcaggccctgatcaagagatccccgaagcagaagcgcagacgacgacttcgcaaggaccagaggctggtaacgactcgatagctgggtcttcaggaccatcaggtgatgacgaagaagaaatccctcgcataaaggcgaccgacgactctcgtcctcctatcttgatcaaatggtgggacgagaactcacaagcagccggcatagtcataaaccgtcaaaaagaagatgaagaagtgtgccagctgaagaaagcgctcggagaagccactcgtattgtaaatagaatccatcttcgcaatgaggccaagaccacaactttggaaaagctggttcctcatttgggaactctagaagcagttagggaccagctgcatgaggccaaggagtgcgccaaaaagacagagaaagaattaagggaccgaatcgcccagctccaggattcaaactttgagctgagtggttcatcaaaagcgcaagccgccaggatggaacagatggcgaagcaaattgaagccctggagagagacaagacagaactggctgcgcaaagggactcagcgttgaaggaagtcgaagatcgcaagatcaaatctcaagctcagtttgacgtcctggttggtaagatcaagaggcttgaaggagcaagggataacgtcgccaacgccgctgcaccaattatccaagccatgttcctcaataatggtggtccgagtgcactcgacgcaaccgaaatatttgacaagctgagtgttgctccggaagtatatttcaaaaatatcaagaaagctggaagtatgggagctggcatggccttggcgatgacaaaatccttgtacccgagaattgaagtcgacaccattgatggatttgcagacgggacaagtgaagaagctgcccttgatcttatcagtaatgctcagagtgcggctgacaagatcgcaagtgatgttgtagaacaattccgtaacagcgaccttcagccgagcgataataactctgatgatgaaagaactgattctgactga

SEQ ID NO: 36105 - DNA, 2481 bp, Oryza sativa
  Clone ID: PAT_MRT4530_39964C.1
atggcggaagagagagaaagcttcgaaggccaatgggcgtcatccgacgtaacggaggagaatcttaaggagatggtggcgcacggcgttctccctgccaaggagatcatcgggtggcgaccagcgcacggtgaggctttcccgtctccggatactcatgagattgtggtcttctcgcatttcttctacggcggctttgctcttccgacctcaaaatttttccgcgggatcttgaatttctatggaatcagcttgcatcacctaaacccgaattccatagtgcatatcgccaattttgtccatgcttgtgaagcctttttggggatcaaacctcactttgccctattccgccggatcttcttcctcaagccccaaccaaacaagaacaaaccgtgtgtagtcgggggggcaggattccaactaaggggaactctgagtcaaaaatatttctcgatgcccttcaagacttcgaacaaaggatggcatgcaaactggttctatgtccagaatcccgagcctgctcttcccgggtactcttgtcttcctccagtgtaccaagatacttggaactctcttccaatcggagatgaagcagtacaagccttggagttgttggatcgtatgttaaatcttaaagaacaaggcttacagggagaacagatcactcggcatttcatcaaatgccgactagcgccaatcaaggaaagatctcgcacggcattcgagttcgacggcaagtatgatcctaaccgtgaagaatcagactctctggatttcagaatcatgaaggagaggatgtataaaatcttctcaaatgcaatcgtcgtcagctactcacaccagctgccagtcgtgccatataatgcattcaatccgcctccgcaggaatatgcactgatgaagtcagatccaccagtcactcagcgccggtctcctcgccaacacactgctcagggaggtggagggccaacgatcagaccagatccgcaacctcagacctccaaatcaactggtcagacgggtcctcgcaagaggaaactggtgcttgatgacgatgaaggcgacgatgataaatctggggataagggctcgcctaataaacccccaaagcgcaccatgcccaggaaaaaactggccggccgcgcaatgctaaaaattagaacatcttccaggaaaccatctgatatagatccatctggaaaagaccccgatccagccatggcagagcaaaatatatccaaagaccccgagccaactgccgaaagccagccgactgccaaaagccagccgaccggcgcccatgcttcgggtgaccaggccaatccgagtgaccagccgccgactggaaaccagtcggcaacaactgaagcagcaacaactcaagagcccccgactggaaaccagtcggacgcaggccctgatcaagaaatccctgaagtagaagcgcagacgacagcttcccaagggccagaagctggtaatgactcgatagctggatctccaggcaaagaacaaagatcacctcacgctcagctaggtacatcttcaggaccatcaggtgatgacggagaagaaatccctcgcataaaggcgaccgacgactctcgtcctcctatcttgatcaaatggtgggacgagaactcacaagccgccggcatagtcataaaccgtcaaaaagaagatgaagaagtgtgccagctgaagaaagcgctcggagaagccactcgtattgtaaatagaatccatcttcgcaatgaggccaagaccacaactttggaaaagctggttcctcatttgggaactcttgaagcggttagggaccagctacatgaggccaaggagtgcgccaaaaagacagagaaagagttaagggaccgaatcgcccagctccaggattcaaactatgagctgagtggttcatcaaaagcgcaagccgccaggatggagcagatggcgaagcaaattgaagccctggagagagacaagacagaactggctgcgcaaagggactcagccttgaaggaagttgaagatcgcaaaataaaatcgcaagcccaatttgacgtcctggttggtaagatcaagaggcttgaaggagcaagggatgacgtcgccaatgccgctgcaccaattatccaagccatgttcctcaataatggtggtccgagtacactcgacgcaaccgaaatatttgacaagctgagtgttgctccggaagtatatttcaagaatatcaagaaagctggaagtatgggagctggcatggccttggcgatgacaaaatccttgtacccgagaattgaagtcgacaccattgatggatttgcagacgggacaagtgaagaagctgcccttgatcttatcagcagtgcgcaaaatgcggctgacaaaattgcgagtgatgttgtggagcaatttcgcaacaacgacctccagccgagtaatgaagactctgatgatgaaaggactgattctgactga

SEQ ID NO: 36106 - DNA, 192 bp, Oryza sativa
  Clone ID: PAT_MRT4530_39965C.1
gcacgaggctagcacaggttgcaacgagcagagagctaggcgaaatctgatcggaattcggagatggctgcgccgtggccatgtgttcgccgtggtggctgttcgtcagctacgcgctgctcgccgccgcctcgacgagggtggaggcgttcgctggctgtcgggctggagcaagggcacctgccaccttct

SEQ ID NO: 36107 - DNA, 501 bp, Oryza sativa
  unsure (1)..(501): unsure at all n locations
  Clone ID: PAT_MRT4530_39966C.1
ggcaacaaaactccctttaactgatcacagccggcctggagttaattcctgcttgaacaacaaagggcccgaaatcattctcccccccccaaacactgaagcccttgccatgcaggcagttctttttttttttgaaaagatgatccccatcagttgcaacttttttaccccccccccatgttcaaagaccgggccccgaaaaattattctatggcaaagctgtgaggattgcannggcgccctcaaccctgaagggtgccccacaaatcttttttttatttgcaggaacagcagccaccttgttttttgggttcttaaagcacttcaagcccccaaaagcattggaataaaaacaccctttggggaaaggggcaagggacttgccccatgatcctttaaacaggtcaatgtcttttgaaaagggaacaaatccctccgccgttttcccccaaaaaaaagggcccttgccctttggatcaaaggccacaaggggagaaaagg

SEQ ID NO: 36108 - DNA, 2436 bp, Oryza sativa
  Clone ID: PAT_MRT4530_39967C.1
atggcggaagagagagaaagcttcgaaggccaatgggcgccatccgacgtgacggaggaaaatcttaaggagatggtggcgcacggcgttctccctgccaaggagatcatcgggtggcggccagcgcacggtgaggttttcccgtctccggatactcatgagattgtggtcttctcgcatttcttctacggcggctttgctcttccgacctcaaaatttttccgcgggatcttgaatttctatggaatcagcttgcatcacctaaacccgaattccatagtgcatatcgccaatttcatccatgcttgtgaagcctttttggggatcaaacctcactttgccctattccgccggatcttcttcctcaagccccaaccaaacaagaacaaaccgtgtgtagtcgggggggcaggattccaactaaggggaactctgagccaaaaatatttctcgatgcccttcaagacttcgaacaaaggctggcatgcaaactggttctatgttcagaatcccgagcctgctcttcccgggtactcttgtcttcctccagtgtaccaagatacttggaactctcttccaatcggagatgaagcagtacaagccttggagttgttggatcgtatgttaaatcttaaagaacaaggcttacagggagagcagatcactcggcacttcatcaaatgccgactagcgccaatcaaggaaagatcccgcacagcattcgagttcgacggcaaacatgatcccaaccgtgaagaaccagattccctggatttcaaaatcatgaaggagaggatgtataaaatcttctcaaatgcaattgtagtcagctactctcatcaactgccagttgtgccatataatgcattcaatccgcctccacaggaatatgcattgatgaagtcagatccaccagtcactcagcgccggtctcctcgccaacacaccgctcagggaggtggagggccaacgatcagaccagatccgcaacctcagacctccaaattgactggtcaaacaggtcctcgcaagagaaagctggtacttgatgatgatgaaggcgacgatgataaatctggggataagggctcgcctaataaacccccaaagcgcaccatgcccaggaaaaaactggctggccgtgcgatgccaaagatcagaacatcttccaggaaaccatctgatatagatccatctggaaaagaccccgatcctgccatgacagagcaaaatatacccaaggaccccgagccgactgctgaaaaccagccgaccgctgaaagccagccaactggcgcccatgcttcgggcgatagggccgatccgagtgacctgccgccgactggaaaccagtcggcaacaactgaaacggcaacaactcaagagcccccgactggaaaccagtcggacgcaggccctgatcaagagatccccgaagtagaagcgcagacgacgacttcgcaaggaccagaagctggtaacgactcgatagctgggtcttcaggaccatcaggtgatgacggagaagaaatccctcgcataaaggcgaccgacgactctcgtcctcctatcttgatcaaatggtgggacgagaactcacaagccgccggcatagtcataaaccgtcaaaaagaagatgaagaagtgtgccagctgaagaaagcgctcggagaagccactcgtattgtaaatagaatccatcttcgcaatgaggccaagactacaactttggaaaagctggttcctcatttgggaactctagaagcagttagggaccagctgcatgaggccaaggagtgcgccaaaaagacagagaaagagttaagggaccgaatcgcccagctccaggatgcaaacttcgaactaagtggttcatcaaaagcgcaagctgccaggatggaacagatggtgaagcaaattgaagccctggagagagacaagacagaactagctgcgcaaagggactcagccttgaaggaagtcgaagatcgcaagatcaaatctcaagctcagtttgacgtcctggttggtaagatcaagaggcttgaaggagcaagggataacgtcgccaatgccgctgcaccaattatccaagccatgttcctcaataatggtggtccgagtgcactcgacgcaaccgaaatatttgacaagctgagtgttgctccggaagtatatttcaagaatatcaagaaagctggaagtatgggagctggcatggccttggcgatgacaaaatccttgtacccgagaattgaagtcgacaccattgatggatttgcagacgggacaagtgaagaagctgcccttgatcttatcagcagtgcgcaaaatgcggctgacaaaattgcgagtgatgttgtagagcaatttcgcaacaacgacctccagccgagtaatgaagactctgatgatgaaaggactgattctgactga

SEQ ID NO: 36109 - DNA, 564 bp, Oryza sativa
  unsure (1)..(564): unsure at all n locations
  Clone ID: PAT_MRT4530_39968C.1
tatcaagcacaagcagcggangttaggcaggagcagaggacgtcggatcgcgcgaagacgatggagggcggcgacgggaggaaggagacgacggcggcggcgagggcgcagaaggaggcggcggcggcgggaatctccgtgcgcgagtcgctgcagcacgcctgggcctcgttccttggcctggtgaggaaggtgacggcgaggagcgaggaggaggcggcggaggcggacatgagggcggccaagatgcaggtggaggccaccgacgaggcggaggccaagaagaagcagctcgccgactgacagccgcagcatggccacagcgacgcagttctgttctgctcagccgctcttgcttcgtacaagtagcttgtaacatctgaaaactagttgtaacttgtaagaacatggtagtcacatggtgtgctagtatgccactcgcacgatttttctacctgttcgtctctgtatgtaagtaacggaatgtcagaatctagctacagctttatgaattaaaaaaaaaaaaaaaaaaaaaaaaaccaaaaaaaaaaaaaaaaaaaaaaa

SEQ ID NO: 36110 - DNA, 2115 bp, Oryza sativa
  Clone ID: PAT_MRT4530_39969C.1
atggcgccgacgcctcccgttccactccccaacccggcggggtcggcggcggcagcggttctgccccggccggcgtggaacaccaaccggaacctggtggtgacccacccgctgctctccctcctcgagtcgtgcgcctccttccgccgcctccttcagctccacgcgctcctcaccgtcacgggcctcgccgcgcaccgcttcccggcgtctcgcctcctcgccttctgcgcgctctccacgccgccgcgcctcgcccacgccgccgcgatcctcgcccgcgcatccccggggcccaacgcctacatgctcggcaccatgatgcggggcttcctccgcgcccgcctccccgcccgcgcgctgggcctcttccgccgcgtcgtccgggatcgcctccccgccgacgcgcgcacgttcgtcttcgcggtcaaggccgccgccgccgccgccgagtcggagcacggtggaaccccctcaggcggcgaggccatccactgcgcggccctcaagtgcgggttcgttggcgagagcgtgctcgtggggaacgcgctggtacacttctatgcgaaccacaagtcactggatgatgcaggcaaggtgttcgatgaaatgcctgagagggatgttgtctcttggacgacgctggtggatgggtatgcacgggcagggttggctgacgaggcatggaggctgttctgcaggatggttgttgttggaggcatgcggcctaacgcggtgacgctggtggctgctgtctccgcgattggtcagatggggttgctagcttttgggatcatgctgcacaagtatgtcacagagggtggtgttgctcggagtgtcaatttggataatgcgctggtggatatgtttgggaagtgtgggtgcgtgagatatgcaagggaggtttttgatggcatggaggttaaggatgtctactcctggacgagcatggttaatgcatacgctaagtgtggtgatttggaaagtgcagaacagctattcaaggatatgcccaggagaaatgtggtttcttggagttgcatgatcgcagcttactcacagttgaatcaacctgaagaagcagtatggttattcagggagatgattgcagcaagtgtggatccaattgatgctacccttgtgagtgttctgtcagcgtgtgctcagttaggttgcttggatcttggcaggtggatatatgagaactacattgtgagtaataagattgggcttactgttaatttaggtaatgcgctcattgatatgtttgcaaaatgtggggatgtaggtgaagcatcaaaattatttgatgagatggcagagaggaacgtagtgagttggaacactatgatcatggcccatgccgtgcatggtcagtctgaagaagctattcgtctctttgagcagttgaaaggagagaatattgtgcctgatcagatcactttcctgggattgcttgcttcatgcagtcacagtgggttagtttcggaaggacgacgatattttaaagaaatggaaatgttttataggattgaacccagggtagaacattatgcatgcatgattgatcttttgggtaaagttgggcttctggaagaggcatttgaagttgcaaggggtatgccgatggaagctgatgaggctggttggggtgctcttctaaatgcatgcagaatgcatgggaatgtagagattggtgcatgtgttgcagataagcttgtagaactggatccttcagacagtggaatctatgtacttatgagccaaatatatgcaagtaaaaataaatgggatcaggtgaagatgctgagaatgacgatgagagatagaggggtaaagaagaatcctggctgtagctctatcgaggtcgaaggaaaattccacgactttttggtggcagatgtttcacatgcatgttcagaagaaatctattcagcattgaagaatatttacttccatttaaaacaggaagatatgtcatggcaaggaactatagggaacttgattgaacccaggtttctttcttttcctttttcttataaacaaactacagttttagatggcattgctacggagcttttactgggtgaaccagatcctctgcaatccccttaa

SEQ ID NO: 36111 - DNA, 2535 bp, Oryza sativa
  unsure (1)..(2535): unsure at all n locations
  Clone ID: PAT_MRT4530_3996C.1
tccccgggctgcaggaattcggcacgagggcaccatccagtgcagtagtacactagctcttcttcacaacagctaatcgagtagctagaaccattatatactcttctctcgacgctttctgtgctaggttaaccgatccatcttctggtactgaaatggagtgcgagaacggccgcgtttctgccaatggcatgagtggtctctgcgtcgcggcgccccgcgccgacccgctgaactgggggaaggccacggaggagatgacggggagccacctcgacgaggtgaagaggatggtggcggagtaccgccagcctctggtcaagatcgagggcgctagcctgaggatcgcgcaggtcgccgcggtggccgcggccggcgaggccagggtggagctcgacgagtcggcccgcgagcgcgtcaaggccagcagcgactgggtgatgaacagcatgatgaacggcacggacagctacggtgtcaccaccggtttcggcgccacgtcccacaggaggaccaaggagggtggtgctctgcaaagagagctcatcagattcctcaatgccggcgcgttcggcactggcaccgacggtcatgttttgccggcggaggcaacccgcgcggcaatgctcgtccgcatcaacacactcctccagggatactccggcatccggttcgagatcctcgaggcgatcgccaagctgctcaacgcgaacgtcacaccgtgcctgccgctccggggcacgatcaccgcctccggtgacctcgtcccgctgtcctacattgccggccttgtcactgggcgcgagaacgccgtggcggttgcaccagatggcagcaaggtgaacgccgctgaggcgttcaagattgctggcatccagggcggcttcttcgagctgcagcccaaggaaggccttgccatggtcaatggcactgccgtgggctctggccttgcatcgaccgtgctctttgaggctaacattcttgccatcctcgccgaggtcctctcggccgtgttctgcgaggtgatgaacggcaagccggagtacaccgaccacctgactcacaagctcaagcaccatccaggacagatcgaggccgccgccatcatggagcacatcttggagggaagctcctacatgaagcatgccaagaagcttggtgagctcgacccactgatgaagccgaagcaagaccggtacgcgctccggacatccccacagtggctcggccctcaaattgaggttatccgcgccgccaccaagtccatcgagcgtgagatcaactccgtgaacgacaacccgctcatcgacgtctcccgcggcaaggcgctgcacggtggcaacttccagggcacgcccatcggcgtgtccatggacaacacccgcctcgccatcgctgccatcggcaagctcatgttcgcgcagttctcggagctcgtgaacgacttctacaacaacggcctgccatccaacctgtctggcggtcgcaacccgagcttggactacgggttcaagggcgccgagatcgccatggcctcctactgctccgagctgcagttcttgggcaacccagtgaccaaccacgtccagagcgccgagcagcacaaccaggacgtcaactctcttggactcatctcctccaggaagaccgacgaggcaatcgacatcctgaagctcatgtcctccacgttcttgatcgccctctgccaggccgtcgacctgcggcacatcgaggagaacgtcaagagcgccgtcaagagctgcgtcatgacggtggccaagaagacactcagcaccaactccaccggcgatctccacgtcgcacgcttctgcgagaaggacctgctcaaggagatcgaccgcgaggcggtgttcgcgtacgcggacgacccgtgcagccacaactacccgctgatgaagaagctgcgcaacgtgctcgtggagcgcgccctcgccaacggcgcggccgagttcaacgccgacacctcggtgttcgccaaggtcgcgcagttcgaggaggagctgcgcgcgactctgccaggtgcgatcgaggccgcacgtgcggctgtggagaacggcacggcggcgattcccagcagaatcaccgagtgcaggtcgtatccgctctaccggttcgtgcgcgaggagctcggaacaaagtacctgaccggcgagaagacacgatcgcctggcgaggagctgaacaaggttcttgtggctatcaacgaaggcaagcacatcgacccgttgctcgagtgcctcaaggagtggaacggcgagcccctgccaatctgctgaactagtgaaccgattagctgaataacagtggagtgtggaggcgtgcggtgttgtttttatctggtgaatattttatttttacacttatctttgtgttactcaaaagaattcttcgttgcatagcggcaagcatgcacagcaaaccttggtaccgagtgcaggtttcaaaagcaactagtgttgtaacatataagttttggatatcagagtgttgcaaatcattaaaaaaaanaaaaaa

SEQ ID NO: 36112 - DNA, 538 bp, Oryza sativa
  unsure (1)..(538): unsure at all n locations
  Clone ID: PAT_MRT4530_39970C.1
ctttaaaagaaacttcacagaaaaaaaatgatcatataaactaaatactgctctatgaaagggccaagttatttttgggaaaaagtcttcggattaacaaagtataactgaaagaccaaaagccaaagtttttgttacagtagacaagcagctttacagtaaaatccaatttcctttctcatgtttgattgagaaactatcatgctgttgacaattgagaatgtatcctataatgtgtaacttttcaaattggacattctaagttcaccagggtctctaaagaactacatataacctgtgcttccatatgcatttcctctgttgaattttgactagaatgaattttaacaaatacataaatgccgcactctatgttctatacgtgaagtctcaagtcaaagtcttcgcaacattgatgccnacgttcactaaaacatatgtctacattcttaatgaaggtacagaaacttttattgtacagtctcaaattcgaaaaaaaaaaaaaggtgcacatgtgctctgatgccaccttcttttg

SEQ ID NO: 36113 - DNA, 365 bp, Oryza sativa
  Clone ID: PAT_MRT4530_39971C.1
gtattccactactcctacacctgctcctcggggcttcatatcgagcggagctcgtagtgtgctagatctaggaggaggcgggcatgagggcgcggtgggttgccgcggcggaggcagtgctgctgttgaccgccgcagtggcggcggcccgggtcgacctggacgacgacgggcaccactcggaggtgctggacgagctgctcgccgaggacgaggaggaggagagaggggagctcggtggaggaggggaggccgcccgaaaacctttcgtccgtggagaccgacatggtgtacgtagggctcttggtcgccacgggcgctatcaacacgcgggactaccgtccttggcaggagcttctctccac

SEQ ID NO: 36114 - DNA, 4347 bp, Oryza sativa
  Clone ID: PAT_MRT4530_39972C.1
atggctgaaggttttattagcttgacacaaggaacagaaatcgatcgagttgctgaaaactatttttatgagcttgtcaacagaggaatgatacaacctgtagatgttgactataatgatgaggtgatatcttgtacggttcaccacatggtacttgacgttattacgaacaaatccatggaagagaattttgtgacagtaattgattgttctgaaactagtataggatttcctcataaggttcgacgactgtccctgcggtttagcagtacaaaatatgcaacaaatttagcaaatatcacactggcacaagttcgatcttggtactttgttggacttactaattttgtgccttctattatggagtttaagcttcttagagtagtgatccttcaactctggggttgccatgatggtcagtcaagtttcaatctgactaatattggcagactatttcaactgagatatatgaaaatttcatgcaacataagtgtagacctgccattgaagatgcaagggctacaatatttggaaacattggagataaatgcaagaataagtgctattccatctgacattgttcatttgccacgtttgtttcatctacatcttccatgtattactgatttgtctaatgggattggcagcatgagatctctgcgttctctgggatactttgacctttgtaataactctgaagacaacataagaaaccttggtgagctgactaatctgcaagatcttcgacttacttgttcgactgtaccatttgaccgcttggagaggaacatggaagttgtcagctctttcctatggagacttggcaatctgaaatctttatctctggttcctagtcacagtgcttcaagcaagtgcatttcctgcgatggtttgagaattgtgtccactcctcccagacttctccagaaacttgagttattgatgcctattggtgtgttctctaggcttcccaagtggattggacaacttgacaaattgtgtgttttaaaaattgttgtcagagaagtactgagatatgatatcgacaatctcataggattgccttccctctcaattctgtcactgaatgttcggacagtcccttcaagcaagattatctttcataaaacggcatttccagctctcaagtacctcaagttcaagtgtagactactttgcttaagctttgaggaaggagcaatgcccaatctgaaaaggctcaagctaggtttcaatgcacatggagcagaggaatactgcagtacgagtgtcggtattgagttccttttgagcctaacagaaatcaatggagtaattggcgtctttggtgctagtaaatctgacagaatagctgcagagcgcgtgttgatcaatgtttcaaaagtacatccaggttgtcctagcatcaatatccatcaggtagattgcatttttgacggtaatgaagcaatgagtagcaaggctgaagaaaaggcatacatgtctctacaggaaacacaatgtcagatcttggagaaagttttaactgatcaacatggcattctggaacttaacacacagaaaaataaggaaggaagagttgtcagacgggcttctcccttgtgcattctggcaggaacttctttttcacgtttcccagatacgtctggtccgctagctgcttcccctccacagttgccatatatagagcatgaaagagataagggaaggaagagggaaagagagatggctagtgtaagtgtttcaactggggtgatgaactctcttctggagaagctcaactccctcccatgtgaggaaaattataatctcaaaggtgtgcggaatgagttggtgttgcttaagagtcagctcagtgagctgaatattctccttgaggtattagcagaaatggatgaacctgctccactagcagagaagtggatgagccaagtgaaggagctgacgtatgatgttgaggattacattgatgacttgagttgccaaggtcattattatgctggccttgtgggtattgagggaccaaagaacaagctcatcaaactgttaatgaatgttcatgcagagcaagggttgaaagtgctatctattgtgggatttgggggtttaggcaagacagctcttgccaatgaggtgtaccatgaacttggagaacagtttgagtatcgagtttttgtatcagtgacccaaagacctcagattgcagtactactacgcaacatgctctcacagcttggagaacagaagtctgctgaatccaacgatgtgcaatacctcattagcaaactcagggaacatctaaataacaaaaggtacttcatcatacttgatgatttatgggatgagtcagtgtggaatattcttagttgtgcttttccaacaaattctcatggtagtagagtaataacaacgacacgaattgagaccgtgggcagagcatgttgtgcttatcaggctgatttcatatataagatgcaatgtctgaatgctaaagattcagaaacattattttttagtagaatatttggatccaaagatcaatgtcctgaaaatttggaagaaggcttagttgagattgtaaggaagtgtgatggggtgccacttgcaattgtcactgtagctcaacatttagcttctcggcaaactacatttaaggaacaattggagtctctgcgaagttctctgtgcaccatactcggaacatgttccacatttcaaggaatacggcatacattaaaccttagctacataaatcttccgaattatctgaagacatgcttactatatctgggtatatatccaacgggttacactatcagaaaagatgatttggttaagcaatgggtagctgaaggttttgcgagcagcatgcatgggcaagatgctgagcatgttgcaaagggttatttcaacgagcttgtcaataggagtgtggttcaacctgtagatacagattacaatgatgaggtgttgtctttcagagttcatagttcgatgcttgaatttatcaggtataaatctgcagaagagaattttcttacagtagtcgatcagttaggagcaacaagaggacgcccagacaaaatccgacggctctgccttcatgttaatgaatcaagtgctttcagaataccagcaagctttgatttgtcacaagttcgatctcttctgttttttggagcttcggttatggatgtttccgagtacaggtttcttcgagtattaattttacaatcttttgacagtggccttctgcaggaaattgacctcacaggaattcaagcattgttccaactaagatacttgaaggtttcagcatacattacactcttacctagacgaattgggatgttgcagtatttgcagacactgtgcatagaagggtctagactactttatatgccacctgatattgtctgtttgccaaatttgtcgcatctgattgttccatcgcagacaagcttgcctgatgggatttgcaacctgaaatccttacgtactctgaagtgtttcgatttggatatgaactcatcaaagaatataaagggcattggagagctgactagtcttatagaacttgattatttctttgatggaaggaaactcaaaacagaaaaacaggatgctctttgttgttcccttggaaagcttgcttatggtaagctaaaatatctatacatttctgctcctggttctggttacaatgcttctaggttgagtaatgtatctccatcgccccaacatcttgagaaactagttctttctggctgctggtttttacatgttcccaagtggattaaagaactccgtgaactttacagcttggtactctcagttgaggacttggacatgagtgatgtccgtgcactaggaggaatgcccaccctagtccacctttttctggaaacccgaaggggtcctatggaaaactccatcaccattactgacaagtcattccccgctctgaagcattttgaattcagttgtagagcaccatgtctgatcttccaggctggtgcaatgccccaggttgaaaggcttagtttaaattttgctgctgacggatggaataaatgcaattctgaagccattggcattgagcgcttgactgaattgaaagaaatctgtgtacaagttttgggaagtggtgccaacagattaaatacagagtctcgtatcctcgcagaagtttattactacttcgaacaattccatgctcatggtaaaaatgtgcgttactcttacaataatgatgtggaccactcttactttaatgatgacggcgatgatgattacaatggagactctgatacatggagagtcaggaggctgaaaattcttccataa

SEQ ID NO: 36115 - DNA, 333 bp, Oryza sativa
  Clone ID: PAT_MRT4530_39973C.1
gcgcagcggaagaaagcgctaagaaggcaaaggaaccctcgcgatgtagcgcgcgtcgatgtagaggaagttgtcgatcgcaccaggtcgaccttctccttcccgtgcattctcctcgccgtagtaccacgccgatcagcaccgcaatgcagcggcgcctctactggatccatgactcgggccttcaaggcccgtaggactcctattcagacccctatccgaagttcatgcatactcggctgtaacccgaaaattctttttcggtccacgtgtcaacagcggcccctagcagaatgtactgactgactgggcatacacaaagatcatatcggt

SEQ ID NO: 36116 - DNA, 1572 bp, Oryza sativa
  Clone ID: PAT_MRT4530_39974C.1
ctaccgctgtatcatggcaagggatttgggatcatcctcagcatcaacagctttcttaattatgaaatcacgagcatcttctgacagtgtagctggaatttctggtggtattcctctaccaattttaagcaaagcatgcgtccattccatatcagggtatggaactttgccagtcagcatttctaaaactgtgcagccaagactccatatatctgctggaggtccatgaggcttagccttagcaacctcaggggccatccagtaaacagttcccttgctagatcttgcctgactcaaaattgacatctcttttgcaagcccaaaatctgccagtttaactaatccatttgaatccactaggatatttgcacatttaatatctctgtgtaacacgttccgctggtgtagatagttcaaacctatcaaaatctgccttgtgtacgctgagacttgtgagtcctgtaaacggtatttttgatatagagctgccaaagagccttgagttactagttcaaggaaaatatacagttttccatcttccttgtctgttccaaaatactgaacaatgttttcatgctccaaacgactcaacagagagatctcatgctcaagttggacaatgcgttgttttgcattgatcccttgatcaatcaatgacacctccttgacagcgaagaaaaaaccatcatcactgatagcctcatacactgacccgaacgatccactcccgagatgctctcccttaagccaggacgtgatggttctcctaaaccgcctgtgaggagagggtgaaatcaaatgctcgatgtcacgtgaagtggactcccttgtcgcctccacgaccagagccgaggcaccggtggtctcccttgtcgcctccacaaccacctctcctctaatttcctctcgtgatttatccaatctgaccaatttacctttctccttgtcctcgtctgcactatcctgcttcagcagagctcgtttagaagctactgatctgacgctcgctgcaggccttgcatatgatcgtgtggaaacttctatagcttctgcttgaacaaatttggtggccgatggagctactactctgatgctcgattctgctgcaggcgttgcatttgcataagctcgtgtggaaacttctgtaacctctgattgaaccaatttgggggccggaccagcttcctcccccttctcgactgcttcccgattcatcggaaccgcggcttcggctggagaagcttctagaagctccggcggggaagccacctcgagcgacgcgcggcggcgggcggagctggagaggtgggacatggcggcggcgtagaccgcgggcgggatggtgaagtcctcgggcccggagagccccagcttgcggaagatggcggtgacctccgcggccccgcgccccccgcggatgcggaagctggtctgcgacgcgtactcgcccccgccgtcgtcgagctccccacacacgtcgtccccggagccatcgtcccccgcggcggtgtaggagtgcctcatggcgttgatccgcgcgagctgcgcctgcggccgctggcgcgccgccat

SEQ ID NO: 36117 - DNA, 1570 bp, Oryza sativa
  Clone ID: PAT_MRT4530_39975C.1
ccctccccttttttttttttttttttttttttttttttttttttttttttttggaagtcaaaagatagccgacgttagattagagaactgtggtatatcagtagttcagtacatttagctgtccggccactatgattccccctcatctgtatagtcacaggagtgaagtccaacatgaattgaattatcgcaaaacacactgatttttctggacaatttcacggtatggctataaaacaaatgggattttctcgtcaacagtcaatgacatacacaaggaagccactttacaggtacaaaaacgctgtacagaaacgcggtcagaaaagttaactgtgccgtgagcactgagctttctacgtcccctgcttggctgcttccataggccactaggcgagataccactaatcctccttttgaacctttcccagtttttatccaagtcatgaaacgtagttcgatggttcgcactggaactcataatccctgacaatcagcactaaaaactttggacaaccaactgttcaccctgatggttgtgaaggcacggagtaaacacctgacaaggtatcttctgttcacatgatccagcagcctgaaaggtatcttcagttgaatatagcttgcacatgctgtaagctcgacttcctacaaactaccgctgtatcatggcaagggatttgggatcatcctcagcatcaacagctttcctgtttccacaggtaaaattaaaatctatgaaatgcaacagagagaaatccattaatgtttgcaatacaggatcatagtcatagcgccctatttcttgaaatttttgttagagaaagaatggaatactttttcgctatggaacaagcgtgtgagttagcaacacaagattgattacatacgtactgatgtaagcaacaagttcatcaacatgaagaagttgtcatcaatgtttttgctcctttaattaaatagcgtgcagcccgcgtatatcagtgcatttggtatttaaaaatgggatgctgttactggaaagtaagacaagagatatactcacccattccatatcagggtatggaactttgccagtcagcatttctaaaactgtgcagccaagactccatatatctgctggaggtccatgaggcttagccttagcaacctgaatgagaacatgctatcagaaaatttacacgctcggtacaatatggagacacataccactttatgcaaaatattgcttgaacttgcaagaccgtgactttttgaccacagagatacaattatgtgtccatgcaacatcttacaagtataaagaggtgaacaatatgaacataatagatcaggcatagaaatatgcttaaaacataaaatggtaaagcacctacactcttctgaataggagcgtaaggtaaatgggttgtacaaaaaggaccaaagcataactgtgagactaacctcaggggccatccagtaaacagttcccttgctagatcttgcctgactcaaaattgacatctcttttgcaagcccaaaatctgccagtttaactaatccatttgaatccactaggatatttgca

SEQ ID NO: 36118 - DNA, 297 bp, Oryza sativa
  Clone ID: PAT_MRT4530_39976C.1
atatatggagtcttggctgcacagttttagaaatgctgactggcaaagttccataccctgatatggaatgggtgacgcatgctttgcttaaaattggtagaggaataccaccagaaattccagctacactgtcagaagatgctcgtgatttcataattaagtgtgtaaaagtaaatccaaatgatcggccatctgctgctcagctgttgaccatccatttgtccagagatcactgcaacataaaggcgcctaatcactcttgtgttgctaacaaacttgcttgtacataagctggtc

SEQ ID NO: 36119 - DNA, 510 bp, Oryza sativa
  Clone ID: PAT_MRT4530_39977C.1
gcacgaggctcatcgcgctcgtgccggcgtacgaggcgtgcttcgtgccggccatgcgccgcgccacgggcgtggacaccggcatcaccccgctccagcggatcggggtcggcctcttcgccgtcaccttctccatggtcgccgccgcgctcgtcgaggcgcaccgccgccgccacgccgggctcctctccatcttctggatcgcgccggagttcctggtgttcggcgtgtccgagatgttcaccgccgtggggctcatcgaattcttctacaagcagtcgctctccggcatgcaggccttcctcacctccatgacctactgctcctactccttcggcttctacctcagctccctcctcgtctcgctcgtcaacaaggtcacctccggcgatgtcgccggcggcggcggctggctcagcgacaacgacctcaacaaggacaggctcgacctcttctactggctcctcgccgggctcagcctcctcaacttcttcaactacctcttctggt

SEQ ID NO: 36120 - DNA, 303 bp, Oryza sativa
  Clone ID: PAT_MRT4530_39978C.1
ggccaacaaagggccttttcaggcgaccccagggaccgggttttttttttaaaacacggggggggggggaagggccgggaccaaaaaaaagggagggggtttggcctaaattttttaaaacaaaaggggaaaaagaaacccctcatcccaaaaaaagggcctttcgaataaaaaatatccttagacaaagaaacctagggggcggttttcccaacaaaaacgggaaaattgtggttgggtggatacattaggcgaaaatggggggagccaccccctcagaaggtccaaaaaaccggagagttt

SEQ ID NO: 36121 - DNA, 526 bp, Oryza sativa
  Clone ID: PAT_MRT4530_39979C.1
aatacttatccaatttgtgattcaattgcaccgttgaatttgttgcaattaaatctttacaaagagatctccaacttcgatttcaaatgtcatgggtcacgtgttccaacagcgttgctaggcggcagatcatctgcataagcacggcattgacagacgctcgacctgcccattttgcgctcagaagcatgaaatagcgagccacatcatgctcgactgtgtgttcgctcgttaagtttggcactacatccggtctccctttggcttgcctaggcttgctcggcccctccgtagcgattctcttcaggtctggtggccggtagatagggcttgcctgccttagcatcttcgtaaggccttcgactctctggtcctcttggtttcctacagctttggaaagagcggaacgctagggttttcgattctttctctttcgccggtctcgatggttttccaatacattcactaggaggttcgtctctggtctctcgctggtcctgtctcgtttgggagccttttgggagat

SEQ ID NO: 36122 - DNA, 406 bp, Oryza sativa
  Clone ID: PAT_MRT4530_3997C.1
tcaaattctaaaaatatcataaatatcttggactgccaacactggttggtagatcaaaagaaggtgcttttaagaacatcaagtaaaagatgtgggagaaaatttcgactcttaagtggcagggtttgtcgaagtcagggaaggagaatttgataaaatttgtactattgacgataccgacgtctactctgagtgtgtttcagatctccaaaggcctatgttctcagatacggacttacattcaatgatctcagatttttggtggggtgcaaagaaaggacaaaggaagacgcactggatagaatggcaacgtacgtgtcgaacgaagagaaatggtggatcgggatttcgggatttacatgatttcaatcaagctctgctggctcgtcaggggtggagactgcta

SEQ ID NO: 36123 - DNA, 1689 bp, Oryza sativa
  Clone ID: PAT_MRT4530_39980C.1
atgtcggcgcgcgacagggagaggagaggacacagcgacgaaagcagcgaagtcggcggcgcgtcgctgcccgcaccgcatcgatcgcctcgccccggtgagccatgtcggcgcgcgacagggagacggccgtggcgctggcccgcctcgccgccgcgctggacggggcggtgctcggcctcggcacggcggcgctcgccgtcgcctcgtgggtcaagtggctcgccgcgtccgggcagctgcggcgcatcgcctccgcgccggcggccgccatacccgacctccgctcgctcctcgcggagtacggcggccggcggcggcagacggcgaccagccgatcctcgcggaggtgcggggccacgtccgcgccgccccccgaggcaagtacctcgtccccccaggctccggcgagcactgcgtcgtcgcaaagcatacccagctgtgcttgttcaatgaatggagaggcatctttgggtggacctttgatctgcatgctctctttttcaaatcaattaaggagcagattataacatcatttagatgggttccctttgtatatgttgatcctgaaaacttgactggaatggtccatgtgaagttagacttgtagatcctgaaaacatgactggaatggtccatgtgaagttagacagggcaatgcaaccattacctcttacaactgtgtatcataaacttaccccagtcgactcaactccttacacattgtttcagactattattggcaatggttacccaattgcgttgttggatgaggaaaagatacttcctgttggaaaggagattacagcaataggctatattcgacctcataaagcaagtgttgagatcagctcatgctcagaaataccttttttcttgtctgaccttaccaaggatgagatggaagccgagttgtcttctcgtgctaaaacactcttttgggctagtgttgttcttggaacaatgtcagtttgcttgctgggctttgcgacttacaggagctggaagaagatcaaagagcggagggaggcaaggcaagcccaagaggtatttcgacaaactactgatgaagttacagacgatcagtctagcgatgaagaggctggtgaaatgggagacgggcaactatgtgttatatgcttaaggaaaagaaggaaggcagcttttattccttgtggtcaccttgtctgctgctgcaaatgtgcactgattgtggaacgtcagttcgacccattgtgccctatgtgtcggcaagacatccgatacatgataaggatctacgacaattgaggcttcttgatgttttgctgataacccttcgacactgtatggtcacccagattgtctgcgagcctgaagacctcaactgatcatcctgcgtgcactagtctaagctacttggctaacaaaactatgttaccctgaattttgtgtatatatatgacgtgttagtcactcccaggagaactcatatgggcagagatcaccggatacttttcatagtcgcatagaatcctgtagctagccaaactgccagagtcatgagtgacgcctatagttgcaattacagtactaccaagtttttgttggctctcccttctcatgtctgtgcattctgtaaagatggttttgccgctagcaaaagtatgatggttcggatttttaaaaaaaaaaaaaaaaaaaaaaaaa

SEQ ID NO: 36124 - DNA, 1041 bp, Oryza sativa
  Clone ID: PAT_MRT4530_39981C.1
atgcagcagcagcagcaggagatgccgcagtcgaggatcttcggacagccgcctccaccgacgcagcagcagcagcagcagcagcggggattcgggttcggcggcgcggtgccttcgccccgcgggatgccgatggctgcgggggccgcggggccgcatctcgccgtgcagcagaagcagcatacgaccaccctcgcgccgccgccgccgccgcagcagcagaatcagggatcttcttcgtcggcgcgagggatggcggcggcggcggagcagatcgcgtacgaggacgcgtggaaggcgtgcaacccggacatcacgacgccgttcgcctccgtcgaggacgccatcagcaggctgcttccgtaccacgtgttcgcggagtacgaggaggacgagatctacgcggaggaccagccgccggcgaaggacacgtcgagcgtgcaggagtgggacgacgaccgcgaagccgaggcgatccgcattgcggaggagttcgagaagcaggtgctgaccttcaacgtggccgtccggaagtccgccgccggcgccgcccgcgccgaggagcggctcatggtggagaacctcctgctcgccgacgagcagcggcagtcggagcacgtccgcgccctcgtccggcagcagcagctagtggcgctgcagaagcagcagcagcagcaggagaaggaggcggcggcgctgcagcggcaactcatgctggagcagcaacagcagcagcaggcggcgctgcagcagatgatggcgatggagcagaggcagcagcagcaacagatgatgtcagcgctgcagcatcagcgacagccggcgatcgtcatgccgcagcaggggcattcgtccgccgccgcattggatgcgttcctggatgcgtacgctgaggtggggccgccgcgacagcagcatcggcatggcgtgcaggcgccgcagcagccggagtcgtcgtcgacgtcggggccggcgtactgggctccggcgcatgccgtgccgccgccgccggagaatggcgccggagcattgagggagtaa

SEQ ID NO: 36125 - DNA, 1599 bp, Oryza sativa
  Clone ID: PAT_MRT4530_39982C.1
ccggcggcgcctgtgggggtgtgcaagaatctacctcccctccccaaatctcgctcccacgcctcttccttccgacttgtgacagaatggcgctcaatgaggagtacacatacgtggagctggagaaggagccttactggccatttgagaagctgcggatctcgattacgggagctggcgggttcatcgcatcccacatcgcgaggcgcctcaagagcgagggccactacatcattgcttctgactggaagaaaaatgagcacatgactgaggatatgttctgccatgagttccatcttgttgatttgagggtgatggacaactgcctcaaggtgaccaccggggttgaccatgttttcaaccttgccgctgatatgggagggatgggattcattcaatccaatcactctgttatcatgtacaacaacaccatgatcagctttaacatgcttgaggccgctaggattaatggtgtcaaaaggttcttttatgcttcaagtgcttgtatctaccctgaatttaagcagctggacactgtagttagcttgaaggagtcagatgcttggcctgcagagcctcaagatgcctatggcttggaaaaacttgctactgaggaactgtgcaagcattacacaaaggattttggcattgaatgtcgggttggccgctttcataatatctatggtccctttggaacatggaagggtggaagggagaaggcgcctgctgctttctgcagaaaagctctaacctccactgaccgttttgagatgtggggagatggtcttcagactagatccttcacgtttattgatgaatgtgtggagggtgtcctcaggttgacaaagtccgatttccgtgagcctgtaaacattggaagtgatgaaatggtcagcatgaatgagatggctgagatagtcctcagctttgagaacaagcagctgcccatccaccacatccccgggcccagagggtgtccgtggtcgcaactccgacaacacgctcatcaaagagaagcttggctgggctccaaccatgaggctgaaggatggtctgaggatcacatacttctggatcaaggagcagctcgagaaggagaaggccgagggcgtcgacttgtcggcctacgggtcatccaaggtagtgcagactcaggcgccggtgcagcttggctccctccgtgctgctgatggaaaggagtgagctctcaccctgggcaggaaacaggcatcatcatgatatagtgctactggtttcagaatttttcagatgccatatgatggttgccagccaccaccatctatacaatttcttgattctgttttggacttcacttcctgaaagatcaaagtttactagtctgcaattttcacttctttgtgttgtaaacgagggtaaaccgcttttatatatatacaagagggtgataatggtatagcattacaggggggaaaaacttcacaagaacaatggaattaagaatgaattcaagatatatgtggcctgagctgtgttaagcattcttaggctgtgtttagttggtggaaaaagtgggaagtttgaaacaagttggtagtttgaaaaaaaagttagaagttt

SEQ ID NO: 36126 - DNA, 434 bp, Oryza sativa
  Clone ID: PAT_MRT4530_39983C.1
agtataaaatacaatttactcttagaaagaaaagtggaggcagaataattcaaaaacaagaagtaaagaggtagtaacattataaaacagagcatcaaattcttatattacaataggctatatcttatattgtgatatgattataatcattgtcattgtcgatcctaactatcacatggaattttcatgattttactttttaagcgtatttccattattatgctgatctctttcacataatctttgtaggatgaaatatgatccctgtatctgttgggttagaaatgctgcatttccacgacatatccgttgaggagtgtagataccaggaaattggcacggtggggaatatcaccaagagtacaggtcgttatagggatagctttcacacaaatccaaggttaatcatgccatggtatgattaaatgaatgca

SEQ ID NO: 36127 - DNA, 2025 bp, Oryza sativa
  Clone ID: PAT_MRT4530_39984C.1
tcatctttttgcatagttggtagtcactgtaggatcctttgaattaacgaggcttgtctcctcaacccttagcacttcacttagagcttgtgcagctttggtatttatagtagaactcgtactttctgtgttaatctcctgagctggatgttctagtaattcactgaaattttgttttggtggcatttccagttcatccaaacttctctcgaacatatctaaaacctgggttattgtcggccgatgcataggcaatacttgtacacaccacaaaccaattaaagtcatctttttggctatttgctcaacctcacttgtgacttcacaagcttgtaatccatcatccagagcaaagtggtcataaatccaatctggaaaatacttttcacttgaattttcaaccattgacttagcattcttccggcctccgaccatctctagcaacatcattccgtaactataaacatctgactttgttgaaacaattccaaaggatcgatagatcacttcaggagcgataaatccaattgttcctctagcacctgtcattgaaagcttgctctccttggtgcggcacagtttggctaaaccaaaatcagcaatctttgggcaaaaatcctggtctagaaggatattctgaggctttatatcgaaatggatgattcgtgtgttacaactatggtgcaagtattctagcccacgagcaatcccgattgcgattccgtaaagtttttcccaccctagaatttctttgggattttctgaatagatataatcgtctagtgaaccattgggcatgtactcgtaaagaagagctcgttttgacccctccaaacaaaacccaaataagctaacaatattaatatgagaggtcctgccaatgctcataacctcattcacaaattcctctccatttccttttgagtcatgtaagaatttcaccgcaaccagacgaccatcttgtaaccttcctttgaatacaacaccataacctccttctccaagcttataattaagaaatgatgttatctttgttacttctgaatacttgtatcttgttggagctattgatccataagatattatgagggcctcaatgttcctttcactggtgctgctagtctttgtgtaaaggaaataccgtagttgtttccccttcccatgccatattagcacatatatacatggcaagagcaagcctgcagctgctgctgtcaaaactattaatatggttctcctgccagttttcttgctgccggcgcatatcgtccctcgcagctctccgtcggagcagaggcacgcgaacgccgccgcggaatcgttgttgtaccggcactgcccgccgctcgcgttacaggcgtcgcagtcgccgaacccattcttctgccactccaacacgaaccccttcttgaagagcgggctgtagttggtccccgccgtcaagttcaccggcgactccggccacagcaccggcaggtacgagtacgtgcagttcccggctttgatcgccggtggcttgtcacggtcgtagctcccgccgaggtacgcgtagataggcttactgcagttggagatggtggcgttcacaaggccgtcgatctccggtggctccgtgccgttgcagctgtagaggaagcagatggcccggttgctgctgctaatcgtgaacgggctgagagctagactggacgatatgttgaagtcggtgcggcacacgccgtcgccgccgtcggcgacccttttgtgtccagcaacgaatgaactgttggtgtagtcgatgccgaggacgaggatttgcgagcccctcaacgacgccacgccatcgcggctacaccacaactcgaaggacgggtggccacaggcggcaatggccaacgacgaccggttgaggtcgggaccgcttagccagaatgggtacttgatggtgaggtcgccgcatgttgccggctcgcagacggcgtgtgcgtggtggcacaggaggagcaacgtagccaagagcgggaagaacagcaacttcgggttcat

SEQ ID NO: 36128 - DNA, 1173 bp, Oryza sativa
  Clone ID: PAT_MRT4530_39985C.1
ctaagcttgtgcagctttggtatttccagtagaactcttactttctgtattcagctcatgaactgaatggtctagtaattcactgaaattttgttttggtggcatttccagttcatccaaacctctctcgaacatatctaaaacctgggttattgttggtcgatgcataggtaatacttgtacacaccacaaaccaattaaagtcatctttttggcaatttgctcaacctcacttgtgacttgacaagcttgtaatccgtcatccagagcaaagtgatcataaatccaatctggaaaatacttttcacttgaattttcaaccatttgtttcgcatttttccggcctccgaccatctctagcagcatcattccataactgtaaacatctgactttgttgaaacaactccaaaggttcgatagataccttcaggagcgatgaatccaattgttcctctagcacctgtcattgaaagcttgctctccttggtacggcacagtttggctaaaccaaaatcagcaatctttgggcaaaaatcctggtctagaaggatgttttgaggctttatatcgaaatggatgattcgtgtgttacaactatggtgcaagtattctagcccacggccaaccctgattgcaattccgtaaagtttttcccaccctagaatttctttgggattttctgaataaatatagttgtccaaagaaccattgggcatgtactcataaacaagagctcgttttgagccctccaaacaaaacccaaataagctaacgatattaatatgagaggtcctgccaatgctcataacctcattcacaaactcctctccatttccttttgagtcatgcaagaatttcacagcaaccatacgaccatcttgtaaccttcctttgaatacgacaccataacctccttctccaagcttataattaagaaatgatgttatctttgttacctctgaatacttgtatcttgttggagctatggatccataagattctatgagggcctcaatgttcctttcactggtgctgctagtctttgtgcaaaggagatgccgtagttttttccccttcctattagtatgatcttcctgccagttttcttggttctttctagtagtcccggcaatcgcattgctcgtttgcttcacggcctgcctgtcgtccat

SEQ ID NO: 36129 - DNA, 440 bp, Oryza sativa
  Clone ID: PAT_MRT4530_39986C.1
ctctctcgtcgtcgagttttcgattccgccgcgggagatgatgaagcacttggtggagactgagaaggcggcggagaatgccgggccgacgtaccggaacgagctggccaaggacgccgggcgtctgcggccgtcgacgggggtctacagctgctggtacctctagcgtagatcggtggacaagtacccagacagtccggtgctggagcgacagagagtacgctacgacggcaaggcaggtgaatataagaggatgacttacacggaggaatatcacattgagaagaaacttgctgcctacattagcaagctcggaataatcaagggtgacagatgttacaaatacggtgcaaactgccctgaatggatcatcagcatggaggcttgggatgcacttagcgctataggcaagccgctctatgatagtcatggtgctggtg

SEQ ID NO: 36130 - DNA, 210 bp, Oryza sativa
  Clone ID: PAT_MRT4530_39987C.1
atggccttctcgcttcctagaccatcgctgtggcgtggggtgacaagaggaggcagcggcgagccatcctccgccaagacgagggctgccaagacgtggaaggaaggtctagaggccggaggtcgagaggaaggtgtcctctcccagcgcgatttggccatcctagaggcgaaggccgagcgcttcaatcgctatgtttgctccaactag

SEQ ID NO: 36131 - DNA, 354 bp, Oryza sativa
  unsure (1)..(354): unsure at all n locations
  Clone ID: PAT_MRT4530_39988C.1
ccagcgtccggctcactggcattcctggaagcggaggttgggttggagccttagtacattgtgctcctttttttttgctcggctcccccccccagaaacggctgntgccgcgttctcatgtcatgaaggttctgaatgaaagggcctgctgnagaagncactgntttttactgtgggggggggatagttgaagagagcttttttaagaagttccttctgccataccgcaggtctgttccnggncttggtnnngcttttctggctgcccgtgnngggatantgtttcctgaattcttttctgtgatgctggaggttttttctgcctgggttcttgnttttgttctgcttttttct

SEQ ID NO: 36132 - DNA, 593 bp, Oryza sativa
  Clone ID: PAT_MRT4530_39989C.1
tccaagttgtggatggaactaaacgcagcctaatttaacatttttttctttattaggttataaattttctaaaaaacattttgtgccacttggcattaatctaatttaacattctttatcaggttataaattgaaaccatcgaacgtactttgtcttcccgtttctaaaacattgcgatatatctataatattttaattgcgtaagattttagactaacagtatagatatttaaattaggtaattaataaattcaaataccctatagtttagaataaaaaacaaaataatatatgccaagtacaatctaataacaatagaatgttagagacaatgtgaattcaatatttttataaagtttattttgggacggaggtagtagtaaattagccgggaaggcacactctggttgatctaaccccgagtcaaaaccatttctctacctggcaaactcagatggcggagctgaccacagccgctgatgtcaccggcgacccgccggctgcacctgggccaactgcaccaccggagcccgtgtcacggtcacggtcgttgccgagcagaaggactctgctactgctactacgctcgatg

SEQ ID NO: 36133 - DNA, 366 bp, Oryza sativa
  Clone ID: PAT_MRT4530_3998C.1
atggacaatatgccactccacaagattgcaaaggataaaataccactcaatatattatcgtcattatactttgccactttgagcagatttaagactaaaataccccctaatgtgaagagaggaagggagagaggagcgacggcggccgtgctcgtcgcctgcgggcaacgagcgtgcggggacgggtggcgagaagggaaggaggacggcgccgcccaaggggggaggactgcgccgccgggggggcggggagagggacaacgccgccgaccgagggaggagggcgccaacaggggggaggaggacggcaccgccgaccgggtgagggcgctaacagggggaaggagcgccgcgccgcgccgctga

SEQ ID NO: 36134 - DNA, 256 bp, Oryza sativa
  Clone ID: PAT_MRT4530_39990C.1
tggttgaacctgtcaaacctgtgccatgcccatatggtgggtatctaccctgatactactatgagtggctgcccacggacgccgttggcccctggttggtgggtgtctggtactggaattggtgaaccaatgataatgagttgcgtgatggttgaaaaatagaagtcatacatcatcatgtgtgacttttgaaacttagggtcatataaatctataataaatcatcttacctatttaaaaaaaaaaaaaaaaaaaa

SEQ ID NO: 36135 - DNA, 431 bp, Oryza sativa
  Clone ID: PAT_MRT4530_39991C.1
ccccccccctcccccccgcggcggccactccggcgaaaaagttaccggtggcggcggcgtcacaccatgcaatggagcaccagaccatgacagggctctccgctcccagccacacaccagtcagtacactagacaagtcccttcacttcatctccctcactcttaaatctcaatctcccccacccccgcgacgtaagtgaggtccaaaaccctggtctccggagcggagttgctagatctggggggtttgattttatttgttttactcgtgtgagagctcgtgtacttggcgattcctccgcgtgggaagcttagattagtgtgtggtctagtcgcgtctcgcagatacgatcgaacactacgatgaattcgtgtttctggtgttcctttacggatgaaattgatcgaagtgtttctggccaaaaaaaaaa

SEQ ID NO: 36136 - DNA, 711 bp, Oryza sativa
  unsure (1)..(711): unsure at all n locations
  Clone ID: PAT_MRT4530_39992C.1
ccccggtggctgcttgcgtgcttggctggtgtttgatggggccttgcaaactgctgtgcttggaggactcacaacatgattgcctgtctggttggcgtgcagttgggacatgtctggacccggaatatgcatgtgccactgatgattgtggttgggatggaccactgtttacactgtggagaagattgcggtgggaggtgcaatgtgccatgtctgcgatgatggatgtctcgttgggcaacactgtgacgaacacacacggtgtggatgtgacctgaaactggggatgtctgaatatgatgtgggcacacctggatgcaagtggatggatgaacctgtgtctggctgtggacacggatngccgctgtgttgagataggaatacccctatgcatggtgtgcagtgggggctgtgcncacaggacccctgatagcccctctgtgtcagatcgtgtggctgctgtgatanggcccaggctgatgccaatgctggatagtgagagactgtgccagcctgcgacaaaccaatgtgtagcttcaaaattgcgatgctgttgtgtgtgcaggcaatgtgtgtggtgtggcctggaattgctggaagttgaactgggcaatggtgagtgacaatgggatgtgccctgcaatgtgtggctgcgatgagttgatcagataatttgctcgatagttgatccaaaaaaaaaaaaaaaaaaaa

SEQ ID NO: 36137 - DNA, 880 bp, Oryza sativa
  Clone ID: PAT_MRT4530_39993C.1
tttagctagagactcgtgagattgtcagatagtagatgcaaacactgttctgtctcgtcaattgctgagtacatttggacatcatgaacaagattattgcagactggaaaagagtggtgtgaataataaaacctttctaccaggatatgatttcatcactgctttgaaagagccatgacattgaaattgagtgacccggggtactgcgcaatcctagctttgatgacttttgcagcgtcctgcaacaagctatcaggagaggaagggccatgggagattggctgcgaattccctccatcaagttcaaaaatttcatcatcaacacaggagaaacagacataatgttcgattactccatccttggcctctgtatcgccagcagaaacagcaacagaatgagccttttccatttcttcatcctcctcaagaaacgaagcacgctgggcaggatccatatcagctgtttgtttgtaaaatctgtcaaaatatgacccctcaacaagcttgattctggataaagcattccctattgcatggataattccaactgttccacaggcattaccaatagtctgttttgtaaagtatacattcttgctgagcttcttgctctcgaccgtggaggagggtgaagcaacggattccttcttccgatcctgaggataaagcaagatgacggcgagcacgggctgtggcaccatggcgagcatctcgtcgtcgagaccgtagacgtcgcagaaccccgcctccgcgggaacccctaatccccgcataaactggttcatgacctccgggttggcctcgagggggagccagcgcttgcccatggcggcggacgtgccggaggaggggaaaaatcgcgcaaaaaaagagaaaagcg

SEQ ID NO: 36138 - DNA, 1070 bp, Oryza sativa
  Clone ID: PAT_MRT4530_39994C.1
ggattcggccgagtttttttttttgagattttcctctctgaaagaaaattttactagtaactttgacaggattacataaaagacatcagtattctgctacagtagatgcgtgtgtgcagaatcctcaattgcctctttgctactacattgaattaccagatcaacacataaatatatatacaagttgttctgcactcggccttatggacgaaagaaaagtggacactgatcagccagaagagatcagaaaccttagctagccaggtattcagggggctgttgggtttgctgccctcgccgtggagaccatgggtcaggcaggccgaatccgaccggcagggggaccgaaatcggacgcccgggaacgacgcccgagccaggcgcggaacggagggcagaaagcaaacacgcccttcagcttccagagtggtccagcgatgccagccgtgcgaaccatatcccttggaaagctcccacccgtcataaagagaacttgtcgggactcgggactctatatgtgttccggtgactgtctccatcgccccctgctgtgccaaacgggccctgggaggcgacatcactgtgtgctagcgttgggcttcgatttaactcctggatctggcgtagcttgcggattgatcaagggggcgatggaagaagcaagccggcaggcaagcgcgtccagcaggcaaaggatcgatcgatcaaggaagatgaggaggcggaagcaagaggaaaattccaaagggattgcactgatcgatcacgcacgtcgtcgtcgatcgatgaggcgatcgatcgagatagctagccagatcaatgcgatccctttggagtcctccactagtttcctcaggccgatatatatgtcggccggttgaattggcaactacgcgtagctaagctatcaggttgcacgcatgcattgtggtagctaagctatctaattaactctcctatctctagaattcaaagtgcatgcagaatgtttgttgcagccagctgctagctagctaggtaaacactaagctaagtgctagctggtattatagttaggtgctagcctgggc

SEQ ID NO: 36139 - DNA, 541 bp, Oryza sativa
  Clone ID: PAT_MRT4530_39995C.1
ccggccgggaaaccctatactttccttacatcccacactatctccgctatctcatcaatcatcttcctcatgcgacggcttggaggagaacttctgcacatcaacgacatagtaggcattgacaatactaataatactcgtgcctactacccacgtgttcgaaacgatgttcaagagacgacagccagaaaatcactcgtctcactagcctcatcattatgatcgctaccagaataaaaccatacccaactgatcttctctccgctttgtggagagacttagctcctaagatagtcactatatcgaattgggtatgctcaccattgtcaagtgatatacgtagatgtgtgaatgactgctcccatagtggctgtcctccgtatcgtgcactgctattgatctctccacatatgtatgatgtcactgaacatagcttactgctgagtctgccagtattctgccctccgagacaaaggactaacgacttcgacagccatgttgaaggcaatgaactaggaataccatgccttaccagctgatg

SEQ ID NO: 36140 - DNA, 439 bp, Oryza sativa
  Clone ID: PAT_MRT4530_39996C.1
tatgggggatccccagccagtctagagttgaaagggcgtggacaaaacatctgcgctgagtcacttaggaccggtgacgccttggacacgcgtcgcacatgccctgcaccacctgctttagccaaacgggcaaagaagcaaccgtggcgctatttcgggcaggtcgggtctcgtcaggcccaccatgcaccatgtacgagcacactggcgagagcccaactgtctcagacagatcccgaggtaatacgaattgcacgactcgaagggtttcttaaatattgtgataggaaccagccagcaacgacaagattgctgataagacaagacaaagagtagatttataataatgtgagcctctccttggactataaaagtaaggggaccagatacggatgaagggttggactctttagatcagtactctcgctttgtagcctga

SEQ ID NO: 36141 - DNA, 489 bp, Oryza sativa
  Clone ID: PAT_MRT4530_39997C.1
tttttacgcgtgggttgcactccatgaagctagggaactgttgcttcgagacatgatcaacatgctgttgcgccatggtgcttcagctaatgaacgcacagtaggacaaggtggcactgaggacctgcttccacgccgctattgcagcggacaatactagcgtgcttaagtatctggaggataatatatgtgctacccagattgatgaggattatgtgtacaagctcattcatctgatgagcttacctgagatgaagattttgttggatacaactagactgtttgccgaaaaaacagataattgttgggaggagttatggaattacatgaaggatggcatgcttgaacagtgagcaggaatactcctgacaggtcaaaaacagattgagaaggtcaagcctgaaggatctgatgatatcgtacagcgattatgctgggctgccatacactctagaaaggtgatactggaaaggcacagaagcaactgga

SEQ ID NO: 36142 - DNA, 2364 bp, Oryza sativa
  Clone ID: PAT_MRT4530_39998C.1
atgggcaaatccggcgcaaaaaagaagaaacccgccgccgccgcctccgcctccgccgccgccaccaaatcatctcccgccgcaacagagccgaaggcaccgacgcagtcccagccccccgcggccaacggggcggcgccgcatctggtggaccccgccgtgctcctgcgccgcgcgcacgagctcaaggaggaaggcaaccgcctgttccagtcccgcgactacggcggcgcgctgcggcagtacgagctcgctctccgcctcgccccgcgcggccaccccgaccgcgccgtcttccacagcaaccgcgccgcctgcctcctccagctccgccccgtcgaccacaaggccgtcgccgaggagtgctccctcgctctccaggcggagccgctcttcccgcgcgcgctccttcgccgcgcccgcgcgctcgaggcgctcggtcgccacgagctcgcgcttaccgacgcccttgccctcctcgctctcgaccccgaccaccaggacgccgtcgacctcgtccaccgcctccgctcccgcattctatccccgtcctcctcagcctcaggctctgccacctccacccccgaaccaactagccgcccctcccctgctgctcttggtgcctccgctgttgttgccggcctaggcccgtccctccccgctcgccctttccccaagaaaccatcacctcctcctccgcctgctcaacaacagcaatcggttcctccaatgtcaaaatttaatccgtcgccaccatcgcccaagttggtgcctttctccaactctccgccatcttctgccaacgcatcagctgctgagagctcccagaaggtcacgccgacacctctggttccctcttcactttcgttgaaagacaaagcgctgatggacaagaaggttgtcacaagatcaaggccgctcaagctggtgtacgatcatgatataaggcttgcgcagatgccagaaaaatgcagcttccgaacactccgtgaagttgtggcatcacgattcccatcgtccaaggctgtgctgattaagtataaggatgctgatggtgatctggttaccattacttgttccgcagaacttcgattggccgagtcctgtgttgatatagctggcagtgaggtgatagaagatggtgcacggcatggtcagaaacttccaatgttgagacttcacattgttgaagtaagcccagatcaggagcctccaatgccaacagaagaggagaagctggagcaggataatgagttgctggtgaaaggtgaagataactctccacatgcttcagcagctgtggtgactgatgcagaggtgacgaaacaagatgtggagaatgtagttgctgaagctgaacagaacaccctgacagggaagaaagattgtggccatgctgagtgcaaggaagctgaaattgatgattggcttcttcagttcgcagatttattccggaaccaggttggtgttgatgcagatgcacatctggacctgcatgaactgggaatggagctgtgctctgaggcgcttgaggaaacggttacaagtgaggaggcacaagccctctttgagatggctgcagctaaattccaagaggttgctgctttggccctattcaactggggaaatgtgcacatgtgtgccgcaaggaaacgcattcccctagatgaatcggctccaaagaaagtcatgtcagctcagctctgcacagcttatgattgggtgcgagataggtatgctcttgcagggagcaagtacgaggaggctcttaaaatcaagccggacttttatgaagggctacttgctttaggccagcaacattttgagactgcaaagcttcattggtcatttgcactagcagacaaggttgacctgtctgcttgggattcttcacagacattcaagctttttgacagtgctgagcacaagatgagggctgcaacagaaatgtgggagaaagtagaagagcaaagaatggcagaattaaaagaaccatctagcgaggcactgaagaaaaggaagaagcaacataatgcagatggtcaaggggagttgactccagaggaggcagctgagcaggcagcagtaatgaggcagcaaattcacctgttctggggtaatatgctttttgagcgttctcaagtggaattcaaacttgatatcgctgattggaagaagaatcttgatgcgtccattgaaaggtttaagttggctggagcgtcagaatcagatatctctgcagtcttgaagaaccatttttccaacacagtttctgagtgtgaagataagaaaatcatgactttagatacaggaatctcccaaataagtaacaatattgaggacaagtgtatccttgaaagctag

SEQ ID NO: 36143 - DNA, 377 bp, Oryza sativa
  Clone ID: PAT_MRT4530_39999C.1
ctatagaaataccaatccaatgatattgtttgcagcaaataaaactcgatctacatttcactacttgttagtcagatgttactaaagttaaatctataaatgcatgcgtgtcttacactatggagtgtttctcaaactatgttaagctgggattgatgctatggtacaacaccgctgtggaggtgtctgccggagacataagatgatgacatgttgcagagatggtgatcatcatttccaaccacagatgacgatgaaaccatcattctggatccctgacgatggagtggctgtgttgctaggttccaaggatagtgaggacatgctcccggtgtatggaccacgcgttcgtccacgcgtccgcccacgcgtacgca

SEQ ID NO: 36144 - DNA, 132 bp, Oryza sativa
  Clone ID: PAT_MRT4530_3999C.1
tgaacacagtgtcgtcgctgccctgtaacaaagctggcgccgccgtaatcggtggagctcggaggtcgtcgacctgctccgtattctaccctcctcgatgctggtccaagcgaatcagcggtaatggcgtgc

SEQ ID NO: 36145 - DNA, 312 bp, Oryza sativa
  Clone ID: PAT_MRT4530_399C.1
atgagggtgatgcatgaatggtacctcaaggtatctagaaaggccctaagcttcattagtgtcaaggtcccacgagacgatttcatgagtaaaaccaatgagatctttatcatcaatttccgggacctacacgccctcttcaagctcgataagatggacatcaatctcgttgttgcattttgcgtgaccactatattttattcccgagcacgtaaattttatgtcaaacatcacaggccagtaaaggatgtgcagaggaaaaagcttcatgtgaagacggactggccgatccctcaaataatccttatgtag

SEQ ID NO: 36146 - DNA, 242 bp, Oryza sativa
  unsure (1)..(242): unsure at all n locations
  Clone ID: PAT_MRT4530_39C.1
gcgtcgtctcgcatcgntcggtgtcgcgaccacccggtcgcgccggtggaggtttcgggtcggccacctgactaagccgcggccacgcaggtngccggcgccggtgcgcgcggaaggaatggngccgacggtggggatcaagcggtcggcggcggcggtggcnacgcaaaccatcagcttgccgccgcncgangcgcggttngggtgcggaaggccgtgcgggcnaccatcgcttcgccgcc

SEQ ID NO: 36147 - DNA, 564 bp, Oryza sativa
  Clone ID: PAT_MRT4530_3C.1
gatgatcttggatagagtaccaaatgaaggggtgcaccagcagtttcagtaggtatatgagagatgcagtgggagtagtaagtgtaagaactacagaatcagagtatttctgggcaatattgatgcattagaggaagatgataaaaggctaagggttattaaacatcagttgaaggcacagtgtgaatgtgagggcctttttggcatcacataaaaagtctaatttcctgtcatgggaatgcagaaaaaatgctgtggatgaggcctagaacttaattataagggcagcagagttcaaaagaagtttgcattgtcaagttcagctagtctgttatgccaaggtcaggttcctaattagagagatgtagggcactgatttggattgaactccctgcattgatgcagtgaatacactgaatctccagattcccctgaaacatcctgcagaagtaactcattcctcccaattaaaggctagtatcttccatattaagaacatacagaaaatgttgtctcttaaaacaacacacaaccttcacaagcatccaatcccaagctctattc

SEQ ID NO: 36148 - DNA, 458 bp, Oryza sativa
  Clone ID: PAT_MRT4530_40000C.1
agaagttgaatgtagaataagcatatcatctttgttccagataaaatggttaaactctacaggcactctcagtagcttataaataaacaagctactgaaaatagagaatgaccttcagaaacagaaacaaaactccctctcccattgtcacatccattggcatgttcaccccttgcattcttgaacctcttgatcgtccctctcccatggttcgtgagcgagcttgatgataccagctagtgatgttcccttcgatttgcagattgtttgctccgcaaaaggagatggaaccctaaagtactgaattgcttgatcgattgatccagaacgggacaatatatatgcctttccgcgtgatgcttcttccacctgccaggtcgccaatgaaacggaagaatgatgatgatgcaggtatatgcccatggaagatgtaatcacatatgtaggagaggatttga

SEQ ID NO: 36149 - DNA, 584 bp, Oryza sativa
  Clone ID: PAT_MRT4530_40001C.1
catgggctcgctccaatggcgtgatatgcgtcgcgcgcacagctccatccatttacggggctattgtgattcggggacgagaattgtacagcagcaccatagtgggagttcggttccactgatcatcgtcctgctgtcttacctcgagcatgatcctctgtgggttctatgttagggcgcacgcgcgggcctcggaaatagcaggcttccggttcatcccgcattgtcagtgctgattaccaataaatggcccattaggatgatcccgattcagtggcgcggctcaccggatcaggcagcgccggtcttacctattcacacgtttgagaatagtgtgcgacggcagtggcgcccccgatgactctaatcattgtcttaacccgatacaagtcgtaattgggctccagttatcctgagggaaacttcggagggacaccagctactaaatggttcgattagtcttgcgtccctatagccgagtcagacgaacgatctgcacgtcattatcggctcggggcgcaatttgtcggcctcgcaggtgccagataccctatagggcagtcggatttaatgcgtcgtcctgt

SEQ ID NO: 36150 - DNA, 108 bp, Oryza sativa
  Clone ID: PAT_MRT4530_40002C.1
ccgggctgcaggtgtgactctgcctcactgagagatcaacacccaaagagaagcctcaaaagagagaacgaagtgaagggaagaagcaaaaaggtggttcttctgggt

SEQ ID NO: 36151 - DNA, 435 bp, Oryza sativa
  Clone ID: PAT_MRT4530_40003C.1
atggtggtccttaggatcctatgcctgtttttctgtgcggcggcatttaggatggccttcctagcgaccaacaaagctccgatatggttgacgcctatcgcgaccatgattgttgcggtggcgtttcagatgtgctggagcacgttgcggctttgctttcaggtggcatctctctggctcgggctcgccgcgccgcacccaggtagaaacaccctcgccgttctgaccgtcgaatggattctgatgttggtaacctttggaacgggttggtccaccgtcgccatggttgtgttcctcaagagagacaccaacctctgcagcgaactccctatgttttctgctgagcaacaacaacggaatatatacaagtcattgtcaataaaatcattgttatgttccaacatccaaatcaacagatcgaccaatctcaagtga

SEQ ID NO: 36152 - DNA, 396 bp, Oryza sativa
  Clone ID: PAT_MRT4530_40004C.1
gcacgaggatgctgacgtcatctcgccatgacaccgagagtgtgaagtggattcattttaccaaagaaaatgagaattttaactgagctcactggtggtggtttggacacaattgttgtctgtaaaaataactgccattccaacttgatggaaaaaaggatgagatatgcgtgggattagacaatccgtgcttcttccgtttaaaataagtgtagctatgtagtttaaattttcgtcccaaaataaatatatgtagctgtgtaaaaagaggggagtagtgtgtttttagtgggttaaagaggtgatgatttgattatgtaaaaacagaggccggattgattgggcgtgagatgtaatttgtagtagtaagcaaataacacttgggtaattaccaat

SEQ ID NO: 36153 - DNA, 362 bp, Oryza sativa
  Clone ID: PAT_MRT4530_40005C.1
aagctgacagaaaccaagacgccgtaaactgggcgaacaaaactgatgcacaatggattaattgcagtgacaaaagaagggctacattacatcacacaagttaattcttcgatacgcgcattgtgggccagacggccagtttttgaattaatagattacacacggtgttaattatgtaataatcaggcatcaaacatacgacactgatatggggggttactagcggggactaattaaggccggggactacgacgcggctggagctgggttggttatagacttcacaagaactacttgaagcgggtgcacgggcagatggaggctgacttgcagactctgatataatagggggcagataacta

SEQ ID NO: 36154 - DNA, 123 bp, Oryza sativa
  Clone ID: PAT_MRT4530_40006C.1
atggtggaacaagactggaagaaagtgaccaaaagacctgttggctggttcgagcaggacgtgaggcatattgaggccgaccggatgacttgcccttgtgctccggtctcggcggcgccctag

SEQ ID NO: 36155 - DNA, 1221 bp, Oryza sativa
  Clone ID: PAT_MRT4530_40007C.1
atgtcgaggccactgctcgtcggggacaccgccactgccgctgggcctgaggccgagtctatcgccgctcccgctcctccttgctcgtcgaggacgaagacgatactgttcccgctgctccgacgccactggacagcgtcactcctgttgctagctaaggacttgaggccgaggccaccgccgctcccgctgctcatccatggtaagatcgtcgcacctgctgctcgccgaggagtcggagagtggagaaggcgcgccaccgtcgctagagccgatgctgccctcccccttcggccagatctgggagggaggggagggagcgccgcctttgccactatcgctccctcctccagccggatctgggagctagggagggaggagcgccacctccgtcgcatgcggtggctgcccccaccatcgctcccctcctacagcctgatccaggagcggggagaaatcggatctgggaggaagggagtggatggcgcgctgccgtcgctgggagagggagaaggcgcgccgccgctggggagtggcgaaggagagacggaggccccgcagcctgagacggcctcgctccagaaccgcgtccgcccgcgcagctgcgcttcgcctcgccggtcgccctcgtccggctgggaggcgcgccgccgcgaatggggaggaaccagcgttgccgccgcgacccgcccgcgcagccgcgcttcgcctcgccggtcggcctcgtccggctgggaggcgcgccaccgcgagtggggaggcacccggcgcgtggaggaggccgcggtgctcttgccggccgtcgggaatacactccgcccacgccgcacctccaatttcggtggcctcgactcgttgatggagttcagcgtcagagcccgcaccggttggccgcccacttcgtcgccagcgaggggggacaccgccgcatggcttcgtacaatggagaacgctgcactgtttcctgtgcccgcgaggtgtttgtggaaatgcccccgaggttgtgtggttctgtattgtgaaatgccctgcccctgctctgtggttctgtattgtggaaaatgccctagtcctgccctgctgcctgggatgatgcagactcctaattggaacatggatggagcagcaagcatggagcagcacggcctcctccatgacgtcctctcctccacgcgacgggctcgggttgggcgaccgtccgcctgcaccaccgcgccgtga

SEQ ID NO: 36156 - DNA, 1875 bp, Oryza sativa
  Clone ID: PAT_MRT4530_40008C.1
atgtcgcccgccgcctgccgccgtccgtccgccaaccgcgcgccgtccccgatgccgcccgccgtcaacctcgccgccaaccgcgcgccgaccgcgcaccaacccgccgcacgccgcccaccacgtgctgctcgccgtgcgccggccgccgtcgaccccgccgcccgccgtgcgccggccgccgtcgacctcgccaccaaccgcgcgccggccgccgtcgagctcgtcggagtggagagtgagggtgacggcctgatgggagggagagagggctctgccaactccgctcccaaaaatagaggatctggactgtttgacatagctcctgctccagccgtcccgcgtctggccgtcgccgggagcgcgagccaactgagaggctcgccgccgccgcgcctgcgccaggccgctgtggtcgccgcgagcggacggtcgcccaacccgagcccgtcgcgtggaggagaggacgtcatggaggaggccgtgctgctccatgcttgctgctccatccatgctgctccatctagctatattgttccacgcttgctgatgctagatgagcaattggcaggactagggcattttccacaatacagaaccacagagcaggggcagggcatttcacaatacagaaccacacaacctcgggggcatttccacaaacacctcgcgggcacaggaaacagtgcagcgttctccattgtacgaagccatgcggcggtgtcccccctcgctggcgacgaagtgggcggccaaccggtgcgggctctgacgctgaactccatcaacgagtcgaggccaccgaaattggaggtgcggcgtgggcggagtgtattcccgacggccggcaagagcaccgcggcctcctccacgcgccgggtgcctccccactcgcggtggcgcgcctcccagccggacgaggccgaccggcgaggcgaagcgcggctgcgcgggcgggtcgcggcggcaacgctgatctggccgaagggggagggcagcatcggctctagcgacggtggcgcgccttctccactctccgactcctcggcgagcagcaggtgcgacgatcttaccatggatgagcagcgggagcggcggagtgacgctgtccagtggcgtcggagcagcgggaacagtatcgtcttcgtcctcgacgagcaaggaggagcgggagcggcgatagactcggcctcaggcccagcggcagtggcggtgtccccgacgagcagtggcctcgacatctggcgagctcagcattctgttattgagctcaccgcgcaactagcgagcgagttcgtcccgtccgtccgtgttcaagctcaacagcaatcccccggccccgcgtgttcgacgagaaacaaaccaacatcaatggcggcagcaaacgacggagccgacgccggcgacagcaagatccttctgatcagctcggacgggcagcacttccaggtgacggaggcggaggcgagcatgtcgaagctagtgagcaacatgatcgaggacgactgcacggagaacggcgtccctctccccaacgtcgcctccaacgtcctcgccaaggtgctcgactactgcaagaaacacgccgccgccgccgccgccgctgccgaggacgtcgccgtgaaggatcaggagctgaagagcttcgatgccagcttcatcgatgtcgacaacacgatgctgttcggcctgatcttggccgccaactacttgaacgtaccgtctctacttgatcttgcgtgtcaacacacggctgacttgatcaagggcaagacggtacaggagatcagggacacgttcgggatcgtcaacgacttcacaccagaggaggaggaggagatccgcaaggagaacgaatgggccttcgagaactga

SEQ ID NO: 36157 - DNA, 504 bp, Oryza sativa
  Clone ID: PAT_MRT4530_40009C.1
atggcggcagcaaacgacggagccgacgccggcgacagcaagatccttctgatcagctcggacgggcagcacttccaggtgacggaggcggaggcgagcatgtcgaagctagtgagcaacatgatcgaggacgactgcacggagaacggcgtccctctccccaacgtcgcctccaacgtcctcgccaaggtgctcgactactgcaagaaacacgccgccgccgccgccgccgctgccgaggacgtcgccgtgaaggatcaggagctgaagagcttcgatgccagcttcatcgatgtcgacaacacgatgctgttcggcctgatcttggccgccaactacttgaacgtaccgtctctacttgatcttgcgtgtcaacacacggctgacttgatcaagggcaagacggtacaggagatcagggacacgttcgggatcgtcaacgacttcacaccagaggaggaggaggagatccgcaaggagaacgaatgggccttcgagaactga

SEQ ID NO: 36158 - DNA, 1161 bp, Oryza sativa
  Clone ID: PAT_MRT4530_4000C.1
ccggccggggagaaacccctcaaaaccctcctcacccgcttgacctcgccaatcgccggcgagcgacaggcgagacgagagcccgcggcggcggcagcggcggcggcgatcaggacccgatcctcaccggcgcacttctcctgttcattgcaggagcaaagcagcaaaaatgaacgagcacctccgctttgaggatggctggaagatcctggaacaggggattgtgaaatgctcaaagcttttggaggattgccctggtggaaggccaactgtgaatgagtacatgaattactatgattgcgcttaccggatggctgtgcagaaagaccagtattgtcaagagatgtacaattcttacaaagcaacacatgaaagttgcgtctgtgcaatggttttaccccatctgatgcataagcaaggtgacttattttggagagagcttgtgaaaatgtggtcaaactattgtgccatgattagattcacaactggctttttggcctatttggaccgctgctttgttacacataagaaactaccttcgcttgaagacgctgctgctacttctttcttttctccagtcttttcctacttcaataatgaaatatcagatgttctactgactctgattcgccaagagcgtgatggatgcaatgttgatatggatcttttgatgggtattatgcgtggcatatgtcgttctgaagtcaaaaccaagctgaaaagtgctgttattcaagatacatacttgtactactccaggaaaagttatgaatggattgtgcaataccctttgcaagattaccttgctaaggtccaggaaactgtgcagaaggaaatgaagagactgattcactatctgtgtatttctgaggaagagggttcaggcctctgtttgaaggctgttagtgctccattgatgcaagcttatgaaaactatacgaaagagaaacatattggtggtcaagttttgcttcaaacatacaagactgtagaggatgatcttctggacagatgcagtcgcttgacaattgacaatggcttggacaacaattctttcagtcacatggagtagtaaggtagcattagctaacatctgcctataagccaggttacatatagaagggttttagaacatggtctacatgaacgagaaccttttgt

SEQ ID NO: 36159 - DNA, 897 bp, Oryza sativa
  Clone ID: PAT_MRT4530_40010C.1
aatcaaaaatcaaaaatcgccctaggtatgcttccaaacaaatttttgttagtccatatagttcattgggtccaactcggttccagaaaaaaaagttgacgagcaaaaaagactaatcaaagaacaatgtctacatcaatgaaatcacaacaaattaaatactaacagaatgctgagctcgccagatgtcgaggccactgctcgtcggggacaccgccactgccgctgggcctgaggccgagtctatcgccgctcccgctcctccttgctcgtcgaggacgaagacgatactgttcccgctgctccgacgccactggacagcgtcactcctgttgctagctaaggacgtggatgctgccgctcccgctgcttgtcaaggtagaggacgtcgctcccgctgccccaatgccactggacggtgtcactcctgttgctagttgaggccgaggccaccgccgctcccgctgctcatccatggtaagatcgtcgcacctgctgctcgccgaggagtcggagagtggagaaggcgcgctaccgtcgctagagccgatgctgccctcccccttcggccagatctgggagggaggggagggagcgccgcctttgccactatcgctccctcctccagccggatctgggagctagggagggaggagcgccacctccgtcgcatgcggtggctgcccccaccatcgctcccctccgtacagcctgattccaggagctggggagaaagtaaggggaggggagcgccgcctccacgccgctgccctcccctcatccagtcggatctgggaggaagggagtggatggcgcgctgccgtcgctgggagagggagaaggcgcgccgccgctggggagtggcgaaggagagacggtaaagacggagcctcgtgc

SEQ ID NO: 36160 - DNA, 774 bp, Oryza sativa
  Clone ID: PAT_MRT4530_40011C.1
tcatcggcaactagccgatcggctatcgtttatggatttaaccgtgtttctcttgtctttctttcttgttgattgcaggatcaaatcaactggcacgctcacgaacctaaaagcgaaattttggaccttcatgcctctagaagcttctacaaagctttgcttccggtagaagctagtcgcttcggtagcttgcctgccaagccacagaaatagcttggatagtatcacaatctcttctatactgtagtactggtaattcacgttaaccgcacgcgtctcctccgactccgatccgagctccagatctgcggcgccggcgaccaacctctccggcggcgggggcggcggcggagatccacgatgccttcgtcggagcagggggcctcgcccctgcgccgcctcctccgcgtcgacgccctcgtcctcccctccgcttgctcccaccgccttaagccttggtctctccatccccacctcctctcatgctcctaacgccatccaatctctcttccccttttcttctcgtagctatagggtgatacacttctctgattattgatgttggtcttcccgtgctgatttggatttaattacaagtatttgtgttggatcggttggacgcgctcactcggtttggtttggtttggattgtattgggttggatcggatcggatcatccgcgctatagcgtcaggggatcagctcggctcactgtggtttttgaggtgttagggtttgagtgctaggatgattgcttgagggatggtcaatcct

SEQ ID NO: 36161 - DNA, 405 bp, Oryza sativa
  Clone ID: PAT_MRT4530_40012C.1
atgaggagccctcaacctttgaatcggagcatataccctccacatcgcaagattcaacctttgagccctcacccgaacctcgggaattggaggaagaagaaattcagccttcggaaatccctttctagttcgaggatgatctttttgaagattatggaaacacctcggactatttgtgtcaaaagagaccacctatcccgagtagtccctctaatccgctcgaggaaagtttcctcaaagagacggatcaaatcagctggcacgccgttagcactcgagtctccaatgacggttgtagaggtcggtgcacccataaccgctatcagggaccaaccaggagctgccacgtggaaggtggaggtgagaggggctgagcctggttcggctgacccttggttcagctga

SEQ ID NO: 36162 - DNA, 615 bp, Oryza sativa
  unsure (1)..(615): unsure at all n locations
  Clone ID: PAT_MRT4530_40013C.1
acgtcctctcctccacgcgacgggctcgggttgggcgaccgtccgcctgcaccaccgcgccgtgaggcncggcggccggccgcctccacgtgtccccggtcgcgccggcctggcctggcgcctctccacaggtcacggcagggcagggcagggagttggcctcgcgcggcggcagncggtcccctcctaactcgcggcgaccacagcggcctggcgcaggcgcggcggcggcgagcctctcagttggctcgcgctcccggcgacggccagacgcgggacggctggagcaggagctatgtcaaacagtccagatcctctatttttgggagcggagttggcagagccctctctccctcccatcaggccgtcaccctcactctccactccgacgagctcgacggcggccggcgcgcggttggtggcgaggtcgacggcggccggcgcacgtcgggcggtggggtcgacggcggccggcgcacggcgagcagcacgtggtgggcggcgtgcggcgggttggtgcgcggtcggcgcgcggttggcggcgaggttgacggcgggcggcatcggggacggcgcgcggttggcggacggacggcggcaggcggcgggcgacat

SEQ ID NO: 36163 - DNA, 1913 bp, Oryza sativa
  Clone ID: PAT_MRT4530_40014C.1
ccccgggctgcacgcggggaagcattcggaaagaagagaaggaaaaaaagaattagagagaggaggaaaaaaatatccccaatcccttcacccacccgcacgcgtctcctcctcctccgatccgagctccagatctgcggcggcggcgaccaacctctccggcggcggcggcggcggagatccaggatggatgagaaggaaaaaaagaatttttagagagaggaggaaaaaaaatatccccaatcccatcatcccttcacccacccgcacgcgtctcctccgactccgatccgagctccagatctgcggcgccggcgaccaacctctccggcggcgggggcggcggcggagatccacgatgccttcgtcggagcagggggcctcgcccctgcgccgcctcctccgcgtcgacgccctcgtcctcccctccgcttgctcccaccgccttaagccttggtctctccatccccacctcctctcatcctcctaacgccatccaatctctcttctccccgtctctttctcctgctccccgttgccctcccatttcttccccttttcttctcgtagctatagggtgatacacttctctgattattgttgttgttcttcccgtgctgatttggatttaattacaagtatttgtgttggatcggttggacgcgctcactcggtttggtttggtttggattgtattgggttggatcggatcggattagccgcgctatagcgtcaggggatcagctcggctcactgtggtttttgaggtgttagggtttgagtgctaggttgtttgcttgatggatggtcattcctgtggtgatctcgggagagtgtcggaagtgatatccgacggcacctcatcgggtagcgcagacggcggcaagagcctgcctgagaagcattctgcgctggctgatgctacttctggagtggcggcggagaatgccgataatttgtcacaagctgggaagtacatggatttctccagtaccaccagcttgggggtgaagaaaggcttccagaagtgcatgacgtttccgccctctagcggcgaggcacaacagcagcagggttcatgctgtgatgcagataagaatcccaaggatgtgccaacctatgagcgctccgtgtcactgcccccaactttgaagatcatatctgctatgaaaggaagccgccaaaagaatgggatggcttcatcaactgaaagtcgccacgtcaaatgggcccctgacgtgtatgaccccccagtgacatctgtatgtcattcagtgaataacagctaccagcgtcggtccaaatcccggaagaaggacaagaataagcagaagcagaaacaaaagcaaaagggtaggtccaagaaaaaccaccagaatgctatccagagttcagcagtgctccaagctcctggcgaatttgataggctcaaggatgctgaaaccacaagtagtaattcagcaccagacgatctcaacaaacatgagaccgatatattggattatggcatcagcagtcaagacgccaaatgtggaagcagctttttgcgtgaatcggctgctaaaatgcatttctccactgctgaggcttcctgaaagaaaggaaaatgagtcctgcggattctcccttggtatgtaaatatgatggatgtgtagataaataaaatccagtttgttgttgtgtttcctgctgtgtgaggcgttaagagaacttctggcgtgctttgatttggagcagttaccatgactgttggactggtttttgtatgtattgatggacaaagctagtaagcattaatctatgagctgcagttgttttccttgatcaaaaaaaaaaaaaaaaaaaaaaaaaaaaaaaattaactcgagactagttctctctctccctcgtgccgaattcctgcagcccgggga

SEQ ID NO: 36164 - DNA, 483 bp, Oryza sativa
  Clone ID: PAT_MRT4530_40015C.1
actagggagttctgggcatgtcggatgtaaacaaaaagaacaaatacaacagtgtacattacactccgagccaaatatatcggaggcaaataagacagcagatgcgcagggaaaagagaacaaaattacacctcgggatacacttcttttttgttctattttacactccaatagcacaggcatacaacaacatgcaatccggctttgccaatgaaaggaataattgagtggtaatacactactgaccttggggtttacaagccagccgggtgatgctgcgaaaactgtgctgacgctggaaaatttgtatgaccatacgaaccatggtcgtagtcccgctctgatgatcacgacatgtttgccaggcagatccaaaatggcaccatgaaatgcacatttgaacagagcgtcttatcttttcttggggttccttttgaccttgatcacccttctgtagatttgtcgccgctccgccaccacttc

SEQ ID NO: 36165 - DNA, 668 bp, Oryza sativa
  Clone ID: PAT_MRT4530_40016C.1
gcacgaggcctgaagacaggactacgcttaaagatagcaggtttcgctttgtttactcaaggaagcgatcttgcaggagaaagaatggatttctcaacacttcagaacaagattctgatcttaaatacagaaaagttacaggtgcgttgtttgcttcagttgctggctgggggtctgttactgaaaatgttacatcgagaagacatggcatattagtactgagccagccattaaaatctatttataagatcatgtctgaagcatgccatgtctggcttctcaatgctctcgttctccttcaccgtggtgcaatggtttccttgtggcctgccgtacatctggagatacttcttgttgatgatactttaggattgaaacacttgcttcttgagacttccttaagatcagctgtatccttattctgtttacttgttggatgtttcaattcgtattccaaggcgagtacacgcaatgagtcaaaaatgctatgcacctcagtcagagttcggatatctggtttgcacggtagaagccaagttgtgtttttgatgttcagcttcgtgggggtaaagtaccccaaatggaagcacctgcaaggacagctgcagcatcttgccccccttttttctctctttttcttcatcatttgtccatatgttgatttctcc

SEQ ID NO: 36166 - DNA, 547 bp, Oryza sativa
  unsure (1)..(547): unsure at all n locations
  Clone ID: PAT_MRT4530_40017C.1
gaattgtaatacgactcactatagggcgaattgggtaccgggccccccctcgagtttttttttttttttttttntctaaaactttacctccnntgttcagatntctgatggtncnacantcctctctancacntnacancnntnctatccaccgaanatcngagaanngaaatgggannggctcnnntncaaaaatgaattgcnattcaatntactcntgggccngcacncaggggaaaanaatcccccaggggtnaaagtcnccngattcactctgtgnnccnnttctcaaaangtganggccgncgcncagaatanaagatgcgcccanantccaatnccantnctgganatacctactgngctnccntatnttggngcgacangcnntncnggcaagtacattncngganctcgtnntganggagatngaccctatgatnatcatgggcatgcgntgccatgtnntcttccaatcacatntaaancnacgccatnccntgtctaanacgantctgttcgtaccngnnaataaccccngatnacc

SEQ ID NO: 36167 - DNA, 487 bp, Oryza sativa
  Clone ID: PAT_MRT4530_40018C.1
atgctcttcggcaatggctcgctgcctgaaggcctgcactgattctcgcagatgctgctgccggcgagttccgctcgctggacgccgccggcggcggcgccggtgcctgcctcttgcacctcgctggtcggagccctcgtctccgtctcttgcacctcgctcgtcggagccctcgtctccgtctcgcttacgaccatttctctcggccgtaactgaagaattgacaaattctccttgtgatcaagcgtgacgattgcaccgccggcgaacaccagcacgaagaagatgagcgccgccggcggcgcgacgccggagaaccgcttgcgcggcgagtcattcggtgcagctggaccctgtgccatggtgggagagcaatcacgaattcctccacgagccgcaaccgcggcagatgatcatttgattggaaatcgagttcgcaatccaaaaggcgaggcggcgcaaaacggaatcacgcgatgaggaggag

SEQ ID NO: 36168 - DNA, 642 bp, Oryza sativa
  Clone ID: PAT_MRT4530_40019C.1
atggcgtgcggcagcgggcgcggcacagcgttcaccaagatgaagaacacggtgggggctcaccgacgagaggggagcggcgttggtggtgtggagggagtcacggcgaggcgcggcggtttcgtgggcggtgcgaaagcggcgacggtgtggatgtgctgggcggggaaggcggtggatcgggcggccgaaattgaaccgtggaagcgggaggatcagcgcgggctggcgcgaggcgagctggcgctcggtgtccatggcgctagttgccacgcggtggagacagggcgccaatccgggaaggggaaaaagaaaaaaggggaggaaggaaagggggctctgcccatgccatcttgggagaaaggaggagggaaagagaggctctgcctccgggatttggacgcacgcggcttggagcgaccgagcatgggcggctgcggggcgcaggcacggcggggccaacgcggcgacgactgggtggccaccggcacacctgtcggcgatgccaatggccgccaccacctcaggacaccgcttcatgtcatagtcaccacgcccatcgagccatcgcgtcgtcgttgttgtcccaacaagctgtcgcacgtgggcgtcatcaccgcccccaacgagttgtcgctgtag

SEQ ID NO: 36169 - DNA, 977 bp, Oryza sativa
  Clone ID: PAT_MRT4530_4001C.1
gcacgaggaaccagaaggcggcgtcaccatgctctcggggcgcacctaccgggcgtgagaacgaggggctggggacgcgcacctgtgctcggcaacacgacttccgccgcggctcatactgctcagcgtctgcggctgcccccagctcgggttcggtacgctctggctcgacgtcaccaagaccgtcgacatgccgcactgggcagagtgcatagcctgacatgtggacacagacagcagtgcatggttgggcaccgttgcacttgtcaccaatatgaggaactttcctattagtcggcgaactgtcgctggtctgatcaaggtgatatagtagctgtgagtgctgatgtttacacatcatctcccattgtcaagctttatatcgttcccacacctccctttatttcacctcctgttcccctcctcacctttatgatctctcatcctccttatatcttctcctttctttcttctcgttaatcttggtttgagactatataattttcatttctctctttctccacttccactttctctcctatttttttttaatttcccttttcccccccctcctttctttttttcgttacatcccgtccagcgattattgtttcttaaacgactcttcgctccctttcttttttttcatataatttgcaggtctatttgtttatcaccatcccaatgacatatttttttctattttattcccgtatctttcaacctgtatctcagtaactttatatttatcccctaatatttcttcggcaatcgcctcttctttttttcttctttcctttcttttttccttcccccccaccaccttaccctattttccacaactctcagagttacttccttttactcacccctttctttcccactcctctatcatctttcttgctctcttattagtgtctactttccactcctttccttatccccttccttccattcctattatccttgttattctt

SEQ ID NO: 36170 - DNA, 1886 bp, Oryza sativa
  Clone ID: PAT_MRT4530_40020C.1
cttattgcatggcatcatctggcgccgagccgcgacacgtcacacaatagtttttatcttttgttacatgccaaaatttgattgatcgatatatttcttttttaaaaaactattgtaattacatcgtctttgattctgacatttgcttattctgacgatgagagaaacaaatctgtacatcaagaagagaagctctgtatctatcatatctcagctactcaagtaactagccgtacgcccggtcccaccgccatcgccggcgacgagctcggtcgccgtcgccggcgggctacgggtaggggtcggtccagcacacgtccccctccgccgcggccttccaccgccggttgaatatctgcagctcggtgtacgaccgctgcctcacggcgagccggtcggtcgccgccttcgtcgccgtcgacgaaccgcttcgccgccggcttgccgccgccgtcgccgagcgtggggatgccgcggtggaggacgtactcgctgtcgacgatgccgacggcgagcctccggtcgccgccggcgcagtacccgagcttgaagtcgaggccccacgcgtagatgaggtcgttctggatcatgtgccacgcgcaccgccatgccgcccgcgagaacaccggcaccatcatctccacccaccccgtgcatggcggccccgtgctgttgtcgtcgcatctcccccctcccctcgtcttgtagaatctcctgtgaacttggcctttgcgggcgcggagtgtgaggcggtggtggatctgggagcggtggtcgagcgcgggctgggagatctcgaggcgttcgcggcggacgacgcggaggtagcggatggggtcgaagccgtccacctcgatgtcctcgtcccagaggaagatgtactcatactcggccaccatgtccgggtgtaagaacctcttcccgaaccaccatttcgtctggtccttcgccgccacgtgaatcgcccggtccgaccacccgagttccctccacccgtccatctcgccgtcgtagtggaacaacatcaccgtgaacctgtcaccggggaacttggagacgagcttgtcgacgacggccttctgctttatgccgacggggatggcgaggaggctcttcgccggccgggcgacggcggcgcgccgttcggggttgccgccgagcggctccatctcgaagttggacttgtcctgcacgatgcccttcggcaatggctcgctgcctgaaggcctgcactgattctcgcagatgctgctgccggcgagttccgctcgctggacgccgccggcggcggcgccggtgcctgcctcttgcacctcgctggtcggagccctcgtctccgtctcttgcacctcgctcgtcggagccctcgtctccgtctcgcttacgaccatttctctcggccgtaactccttgtgatcaagcgtgacgattgcaccgccggcgaacaccagcacgaagaagatgagcgccgccggcggcgcgacgccggagaaccgcttgcgcggcgtggcactcggtgcagccggtccctctgcgtcaacgtccgtgtgcccaccacggcaccaccacgtcttcttcttcttcctggcttcctgctcgcctgcctgccctctagttatcgtggtcggcgtcaacggaatggagacgtgtgtgttgaacggcgccgttgggtggatgatgcactgcgttgttgctgctgctgcgcgtgtggtagacgccccttgcttcgggtccgcagaagggagatacacgcggtggaagttgttcatggtcagcttcctccggcaggtagggcacttcttctgagcctggattgaggccttgatacactgcttgcaaaaaatgtgaccgcagatggtcgatgacggttcgaccagctcgttcat

SEQ ID NO: 36171 - DNA, 249 bp, Oryza sativa
  Clone ID: PAT_MRT4530_40021C.1
atggggaatgacgaccacgacgtcagcggtgacgtcaccatcggcggcggctcgggcgtgcatgctcgccggcgaacgacggcacgacagctgaacggagggaaccaacacgtagagggcgacgcggcgaactcaccgggatctagcgctgtctctgatctcaccgggcacgagctcgaggaggaaggctaccctgttgtcgactacgagtcagatcttcagaccgccatgtcgataacagttagatag

SEQ ID NO: 36172 - DNA, 1678 bp, Oryza sativa
  Clone ID: PAT_MRT4530_40022C.1
atgagcgacctagcggcggagaggcggtacaaggaggagcaccggaagctgatggcgtacgggatggcggacgggtgggcgtacgggatggcggacgggtgggcgcgcgacctgatggacaaggcgaccgaggctcggtggagggtggacctggggtcgtcggtgtgggtgatcctgctctgcgtcgccgcctgcctggcgctcggcgtcggcttcccgctcgtcgacttcctcgtgctgcccagctccgagaacgccggcaggatcatgctgctcgtgtgggcgctcatcggcgccctgatcatggcgtactacgcctggagccattaccggaagcgcgcggcggcgcaggacgtcctcgccaaggcgcaggacgtcttcaaccaggctgggacgccggcggctactgcgtttgcgatgcccgccgccgccgccgccgccgcgccgcccaatcccaacgttctgcagctagccccacgcctccgaggcctcgtctccttcccctcctcatactcctcctcatcgccgttctccaaccgcctccgcctccgcctcccccgcgccgcctccatgtccgccgaggcgcgggtgcccgtggcgccgccggcccaccccacctacgacctcaaggccgtcatcaacctcgccctatccgaggacgccggcgaccgagttctcatctttcagtatgagtctgacactcttggcatcatatttacaccttcaggggatgtatcttgcttggcaaccataccttctgacgtgaaagctgaagccacctttattgcaaaggaggatggtgttgtcgctggaataagcctagcagatatgatatttaagcaagttgatccatcattgaaggttgaatggtttgaaagtgatggaaattatgtccataagggattgcaatttgggagagtatatggttgtgctcgcaacattattgttgctgaaagagttgtgctcaatttcatgcaaagaatgagtggaattgctacaatgacaaaggccatggccgacgctgctcatccagcatgcatactggaaacctggaacacagctcaaggtttacgcctccatgacaagtgggctgttgagacaagaacacttcaggaagtaaaagatttattggagtatgctgctgagaacaatacctctttaactcgtataatgttggataatattgttgcccctcttggtaacggtgacattgatgtatcaatgctcaaggatgccgtggagttgataaaatgtagatggtattcttagggcgtggcttgccagtctatcaatccatgcccttctcatcaacttgtaagcgttgagtgtacaacaaagaatgtgttttcccatatttatgggatataaaccaacaccacataatccagcaaaataataacattaccttgtaggcttgcctaccgtcctagcatttgtatttggtagaaaaaaaactgcagattgcggcaagttatcgaattttactcaggtattaataagactttttgcaccatgaaaaattagcaagctggacactgtaaatgggatgtgcgcggcattgaacttgcagttctgcacttgtgtttgaccaaacaaacactataaaatggtgatgtttgtgatctacaaaagaaaaggaagtctaacacagcagtgcattctttttcaaaaaaaaaac

SEQ ID NO: 36173 - DNA, 626 bp, Oryza sativa
  unsure (1)..(626): unsure at all n locations
  Clone ID: PAT_MRT4530_40023C.1
ttgggtaccccctcgaggggccggccgggnaaaaaaaaaaaaaaaaaaaaaaaagtcgcgctgatccccagacgccggcggctactgcgtttgcgatgcccgccgccgccgccgccgccgcgccgcccaatcccaacgttctgcagctagccccacgcctccgaggcctcgtctccttcccctcctcatactcctcctcatcgccgttctccaaccgcctccgcctccgcctcccccgcgccgcctccatgtccgccgaggcgcgggtgcccgtggcgccgccggcccaccccacctacgacctcaaggccgtcatcaacctcgccctatccgaggacgccggcgaccgaggggatgtatcttgcttggcaaccataccttctgacgtgaaagctgaagccacctttattgcaaaggaggatggtgttgtcgctggaataagcctagcagatatgatatttaagcaagttgatccatcattgaaggttgaatggtttgaaagtgatggaaattatgtccataagggattgcaatttgggagagtatatggttgtgctcgcaacattattgttgctgaaagagttgtgctcaatttcatgcaaagaatgagtggaattgctacaatg

SEQ ID NO: 36174 - DNA, 757 bp, Oryza sativa
  Clone ID: PAT_MRT4530_40024C.1
gatttattggagtatgctgctgagaacaatacctctttaactcgcgtaatgtcacgcgtccgggttgtccctcttggtaacggtgatattgatgtatcaatgctcaaggatgccgtggagttgataaatggtagatttgagactgaggcatctggaaatgtgactattgacacagtgaagaaaattggagaaacgggggttacctatatttcaagtggagcattaacacattctgtaaaggcacttgatatatctcttaagatagacactgaactcgctctccaagttggaaggcgcacaaatcgcgcctgactctacagaactaatgtaaccttgcaagatctgcagggtgtttctgtggcgtggcttgccagtctatcaatccatgcccttctcatcaacttgtaagcgttgagtgtacaacaaagaatgtgttttcccatatttatgggatataaaccaacaccacataatacagcaaaataataacattaccttgtaggcttgcctaccgtcctagcatttgtatttggtagaaaaaaaactgcagattgcggcaagttatcgaattttactcaggtattaataagactttttgcaccatgaaaaattagcaagctggacactgtaaatgggatgtgcgcggcattgaacttgcagttctgcacttgtgtttgaccaaacaaacactataaaatggtgatgtttgtgatctacaaaagaaaagcaagtctaacacagcagtgcattctttttc

SEQ ID NO: 36175 - DNA, 318 bp, Oryza sativa
  unsure (1)..(318): unsure at all n locations
  Clone ID: PAT_MRT4530_40025C.1
tagtagcatgaagtagtgctctgctctctctgtctcgatcgatcggatcatgatcctttttttcctttctgtccgtgtccctttctttttctttctttcggtctcgaaatggggtgcgatcgatgatgagctaggtgaatatctttgtgtacgtatataattcaatgtcatgcttgttgatgcctacaggtcgatcgaggctagctaagctgcgtccaatggcgttctcacgggctacggcggcggccgtcgtcgctctcgtcgtcctgctgccgcatttggnngacgacgtcgtcctcgacgtcggcggcggcgtcg

SEQ ID NO: 36176 - DNA, 194 bp, Oryza sativa
  Clone ID: PAT_MRT4530_40026C.1
tgccaattcaagctgccaactgcggaaggccaagaaaatgggtgtggcatgaggtggagtcgctcaacgaggccaagcttggctcgaactcgcctccatcgatcgatggtgggttgaaggagcttggcattcaaaccatcaaactctacttcttgttgggtgagctcgctaggcttaggcgcagccatccctga

SEQ ID NO: 36177 - DNA, 423 bp, Oryza sativa
  Clone ID: PAT_MRT4530_40027C.1
atgcgcgagagcgacgaccatgcatggaggattggcggtgggctcctggaggcatcggtgcgcagcggcaagacgaaacagcacaagcctcctcctcttcctcgtcctcgtccttttatgggaaggagaggtctcctcctctcgtcagtcgaggcgtcgtcgagagagacgggagacgaggcagcgaaggaggtggcggtgatggaggaggagctgcaggggtgggagacgccgaggagggaggagtgccgcatcccggtcatgccgcaatgcccggcgccgccgaggaagaggccggtggtgctgccggagctggggaaggagcggcgggagccgcccaagggcaggtacttccagccgccggacctcgagttgttgttcgtgctcgtgccgccgcggaggcaggcgtccagctgcgtgtag

SEQ ID NO: 36178 - DNA, 963 bp, Oryza sativa
  Clone ID: PAT_MRT4530_40028C.1
atgccgtgcccttggggaggggtcgccgaccgcggccacgtgtgcggtggaggtatcggtgagctcagcgcgagcggggcgggcacgagcttgacagctgcagcggggccacttcggaccgggggccttccccttcccatcctccttctccttcccgtcgacgacgccattgccgccgccggtctccccgccccctcaccagcctcgccgggcactgacaggtgggccccacctgtcagcggtagaagggagaggaaggatgcaaagtggagagaaaaagggataagaagggagaaaaaaaggaagaagggagtaaagaaattatatgtcatcgtccacgtagcatgccacgtaggcaaggccacgtggctcctacgggacggctgcgacgacggcgactcccacgtgtggatccggcggtggcttctcctgcgggtggatccggcggtagcagtgtctctccttctctcccaccccaccaccgcagaggcgcagaccctcctcctcccatctctaccgctgcggcgtcgtggcgtccatgcccttgatggcagcgactcctgcggattcgacgaatccatcaacggcaacctcgatgtcccaggcaggcggcagcggctcagtggctgcagccagacagtaggaggggaggtggtggcggcgccctcccctacattccatccgaccgcaacggcggtggtggagaaggcccagcgtggcggcagcggtagcctggcggcccagcggttgcggtggtggcctggtggtccggcggctgcggcggggctctcagcggctcaggagggtagatggtgccacaacggcccggaggggcggcccagcaacggctgtggctggaggcggcatgcggcggcggaagggagggggatgcggcggtggaagggaggcgacatgcggcagcagaagggacgggggatgcggcggcgggagggaggcggctag

SEQ ID NO: 36179 - DNA, 375 bp, Oryza sativa
  Clone ID: PAT_MRT4530_40029C.1
atgcacgaggctaaaaaagctgggattccatatagccaagtcaaacactttgttcattgcagatcgaattgtagggccaaatactatgcgacaaaagtacatttactatcacttctaaaactcattgtcgccacccttcaatttcatttcatcagaatcagattctctgcagtccttgcatcagtttactgcagtgagacatcaggtgaaagctccaaccacgctccaaccacttcggctcaaactggtgaaggattgattgatgacaagctgacaacgagaaagagcataaggaaacaattctcagagaggaagcctccaagaactggctcgcagaagccatcagttgtgatgtccttgcttgatcaaacttga

SEQ ID NO: 36180 - DNA, 395 bp, Oryza sativa
  Clone ID: PAT_MRT4530_4002C.1
atctggttgaccgcccataaccgcgggcacggctattcgaatagttttattctaatcaaaggagtacaactgtacccacaagacacagccccacgacacgttaccgtgtgctggcatgccaccacgacataccagaaagaggccgtgacaggacccttcgcataaccccctctaaccaaacacaccacacctcaggtttcacccccactcctcgcaaggcagcgggcagtcacctaggtgaatccagaagcgacaaaggctatcgcagggcccatcccgctccatcacgcccacccttgcctggatgtgtcagctagaggaaagctacactacaagcccagccgtggcccacgctggcttgtggcaagtatgataagttcttccagggcatctcg

SEQ ID NO: 36181 - DNA, 423 bp, Oryza sativa
  unsure (1)..(423): unsure at all n locations
  Clone ID: PAT_MRT4530_40030C.1
tgtggatgtgcggcgattcccncgagtgtgtngtatagggtcgtggtggtaggatctttcnggatgtctgtgcgaggcgaggggaggctcgtgcttcgggcgttcttnctggggcactcgcacgtgcagatcccagccgggtctcttcgtctgtctgatatgaagctcgccgtnggcgtcgggtacaacttcctccggcgaaacgttccgcgtgcccggaacgctggtgctgcgcgttcctcccggcgtcgnctgtctcgaggtcggcactggtttacgtcctattgacgtcacccacacgagatttcattcgagtccatacccctgttataaaaaaattccaaatccaatctctttgcttgtataagaattaagaanccgattggaagaaaattgggcgaataaaaaaaaaaaaaaaaaaaa

SEQ ID NO: 36182 - DNA, 290 bp, Oryza sativa
  unsure (1)..(290): unsure at all n locations
  Clone ID: PAT_MRT4530_40031C.1
ctcgntcggcccccgcaaagctcaaaatgaggacaagtttcactcatttcacccagttgctaccatcctcagttacctcaccaaggctcctcttgttccaccgggtacaccggtgtgaatccattgtcaaagcagagagctatgctggaaaacatcatgagggcttgtgttggattggctcctgagaacaacatgatcctcgagtacaagtgaatgaagaactagtgggcgggaatattactgctctttctttcttatgcatttatttatttcttatgcncaanngaatc

SEQ ID NO: 36183 - DNA, 417 bp, Oryza sativa
  Clone ID: PAT_MRT4530_40032C.1
atggcggctggctattcgttctccagtctgtgcccctccgagaagaaggaggcgttatacccggcacgacgggaaagtcatcggcccgaggggaattggcaccaccaccaccaggcgacggtgatcccggaggagagcacctaccacacaccgccgcacatccctcctccatcggcagcagctggggatactgtcagccaccggcggcgcacgcggcgagtgcaggggcacggtggcgtcccgtgctctcgtcgtgacgccagctactacaactgccgccccggcgcctccgccaacccctaccactgcggctgctcccgcatctcccactgcccgcggctgatctcctcctccgccgccgccgaatccaccggggaagatggcattgtcatcgtcgtcgccggtgtagtaaactag

SEQ ID NO: 36184 - DNA, 270 bp, Oryza sativa
  Clone ID: PAT_MRT4530_40033C.1
atggacgaggcgagcatagaggctgtgcgggagggcagggaaagggagggaagggcagagacacctccgtcagggaagccatatccacacaggggggctagcagggtgatgagctctccgaccgctgatgccaccgcctatgccttcttcgctagattcggtatcgagctcaccttccctccctacctcatgcagatcgacatagaggacgagcttgacagtgctggagaggggacgatgaagggagaatttgttggcggtgacacatga

SEQ ID NO: 36185 - DNA, 552 bp, Oryza sativa
  Clone ID: PAT_MRT4530_40034C.1
gttcttgaggaagtgaggaggctgatggagttgtacaaggacgaggtgacgagcatcaccgtcgtcgggcacagcctgggcgcgtcgctggcgaccctgaacgccccgccgtgcccggtgacggcgatcgtgttcgcgagcccgcgcgtgggcgacggcttcttcaaggcagcgttcgcgtcgttccccgacctgagggcgctccacgtcaagaacgccggcgacgtggtgcccatgtacccgccgctgggctacgtggacgtggccgtgaagctgcgcatcagcaccagccggtcgccgtacctgcggtcgccggggaccatcgagacgctgcacaacctcgagtgctacctccacggcgtcgccggcgagcagggcagcgccggcgggttcaagctggaggtcgaccgcgacgtcgcgctggcgaacaagggcgtcgacgcgctcaaggacaagtaccccgtgccgccccggtggtgggtctccaagaacaggtgcatggtcaaggacgccgatgggcactgggcgctccacgatttcgagcaaatttaa

SEQ ID NO: 36186 - DNA, 433 bp, Oryza sativa
  Clone ID: PAT_MRT4530_40035C.1
atccgcaatccaactcatagtgcgatatgtaccaagcttgagggggagccacatgcaatgcacagcaagttgggaaaatctcaacaatagtggcctgcgagggccttccatcagtttactacagaacacattgtgaacacgcatatcaggattatacactgcgacctaaccacttgatactgtcaaaccactcattaacctcagaactacttattataccagctactaataatgttattcatacgctctttctgcgcctgatcactcagggccaacttgctcatatcatttatcaacgtcagccaaaccctaaccatcattaaataattgaccttcttacattccctgaccaacgaaccacttgacatacgcacgcttagcatacaccatgaccaacttgtggtcgatgcgcactaaaacctcagcatcatcc

SEQ ID NO: 36187 - DNA, 2812 bp, Oryza sativa
  Clone ID: PAT_MRT4530_40036C.1
atccattgccgctgctgtataaatggttgctaggttgcagtgtgccagtgtccacgcgtccgctgtgacctagctagtcgatcggtcatgtcgtcgcagcaatggcttggtgacggcacggcgcggaggtggagggagctccatggtgagagcgactgggacggcctcctggacccgttcgacctcgacctccgccgcaccgtcatccgctacggcgagatggcgcaggcgacgtacgacgccttcaaccacgagaagctctcgccgcacgcgggcctctcgaggttcgccgcgcgccgcttcttcgagcgggcgcagctgccgggccactccgcggcgtaccgcgtcgccaggttcgtgtacgcgacgtcgtgcgtcgccgtgccggagccgctcatcctccggtccgcgtcgcgcgcgcgcaggtgcagggagagcaactggatcgggtacgtcgcggtggccaccgacgaagggaaggctgcgctcgggcgccgcgacatcgtcgtcgcgtggcgcggcacggtgcagtcgctggagtggatcaaggacatggacttcgtcatggtgccacccaagggcctcctccgggacaaagcttccgacgccatggtgcatcgagggtggctgtccatgtacacctccagggactctgagtccagccacaacaaggacagtgctcgagatcaggtgttgagcgaggtggcgaagctggtgagcatgtaccaggacgaggaactgagcatcacggtgacgggacacagcctcggcgccgcactcgcgacgctgaacgcgttcgacatcgtcgagaacgggtacaacagggcaccccgcgccgcggcagcggcggcgggctgcccggtcaccgcgttcgtgttcgccagcccgcgcgtcggcgggcacggcttcaagcgccgcttcgacggcgcgcgtggcctcggcctccgcctcctccgcgtccgcaacgcgcgcgacgtcgtccccaggtacccgccggcgccgccgtaccacggcgtgggcacagagctggcgatcgacacgggcgagtcgccgtacctgaggaggcccgggaacgagctggtgtggcacaacctcgagtgctacctgcacggcgtggccggcgcgcgcggcggcgaggccgggcggttcaagctcgccgtggagcgcgacgtggcgctggcgaacaagtcctacggcgcgctgcgcgacgagcacgccgtgccggccgggtggtggatcccgtcgaacaggggcatggtgagaggcgccgatggccgctggactctgatggaccgcgaggaagatgaggatagtgcagagtaaatgattggatggagtgtatcaatgtgcatgagcatgaactcgcatatgcatcaagaaataattactggacatctcaacgtgtccaaatcaatacctttgtatctgtaacaatgtccaaatcaacacatgcatttgactggacagagttttatttacaaatgaattatgtgatatgagggggaaatcccatttattcgacgtgtcaagcccattaacgagcacttctatacgtaatccattttgcaaatttttcgaaatcgagagcttaaatttgctcgaaatcgtggagcgcccagtgcccatcggcgtccttgaccatgcacctgttcttggagacccaccaccggggcggcacggggtacttgtccttgagcgcgtcgacgcccttgttcgccagcgcgacgtcgcggtcgacctccagcttgaacccgccggcgctgccctgctcgccggcgacgccgtggaggtagcactcgaggttgtgcagcgtctcgatggtccccggcgaccgcaggtacggcgaccggctggtgctgatgcgcagcttcacggccacgtccacgtagcccagcggcgggtacatgggcaccacgtcgccggcgttcttgacgtggagcgccctcaggtcggggaacgacgcgaacgctgccttgaagaagccgtcgcccacgcgcgggctcgcgaacacgatcgccgtcaccgggcacggcggctgcgacgacgacgagctcgccggcgggcagttggcgccgttggccacgatgtcgacggcgttcagggtcgccagcgacgcgcccaggctgtgcccgacgacggtgatgctcgtcacctcgtccttgtacaactccatcagcctcctcacttcctcaagaacctggtctctggcgctggccttgttgtacttggagtccttgttgctggacgtgtacacggacaggaagccccggtgcacgatggcgcgcgggttcgcggcggcggcggcgcccagcaccggcgcggcgggcaccggcgtgaagtcgaagtcgttgacccactccaggctctccaccgtgccgcgccacgccacgacgatgtcgcgccgcccgagcgccgcgacgccctcgtccgtcgccacggcgacgtaccccatccagttggactccctcgaccacgccggcggcagcagcgacggcagcggcagcagcaggaatgcctccgggacggggagccccgacgtggcgtagacgaacttggtcaccgcgtagctgccggcggcggacgcgcccgccgcggcgaggaggtcgccgtggccatacacgcacgcgccggcgtgcggcgagcgcctctcccggttgaaggaatcgtaggtggcctgcacgagctcgccataggagaggatggaggagcggaggtcgaggtcgagcgggtcgaggaggccattccacgagtcctgcccatggagctcgcgccacctgtcggcgatgcctccaagcatcggcgacgacgacat

SEQ ID NO: 36188 - DNA, 587 bp, Oryza sativa
  Clone ID: PAT_MRT4530_40037C.1
agtggatccccgggctgcaggatctctccctctctctcccttatctctctccactatctcatcacgagcagtgacggggctctcgtcctcgacgacggtggcctctcactctcgtcctcgatggtggcctctcatgctcatctcaacgacagcctcctcagcttactcaaaggtggcacggtcggcctcggcttcctcaacggcgatgcggcacaacatcagcagccacccgtcctcaacggcgacgggatgagcttggccttggcttctcaatttaatggcccacgcagagcacaacatgactgcagcgaactagtgccgagtctagcgatggccggtcaccgcagaggaggaagtagttcagactattttttttcccatttttcaatgtttaagccaatatgttttaagtgttcctttgtattggatcaaaatgttgcagtgagtttttgtgttgtatcatattctcttcctttcatgggtgagatctgtggatgtctcaataattgaaacttgatgtttcaaatgctacactaaaatgttccacgatgtgatccgattgtgtttcaccattttaatttattgaa

SEQ ID NO: 36189 - DNA, 304 bp, Oryza sativa
  Clone ID: PAT_MRT4530_40038C.1
cgacaaaacattggtggcccttgattaacatgttcacgagaactgagacatggttgggcttccatgatctttgaggacctggtggattcaataatgcatgcaaagtgttgcttgaatgtgtttgcttatgtttgagaacacatgttggtggtatggtcttttcttccatgaagatcaaacactgcatgcacattgtgttgtaatatctggtctgtaattcactgaccaattacatttgaaacataaacaaatctatgggtacagcaaattttgtaggagtttgcaaaaaaaaaaaaaaaaaaaa

SEQ ID NO: 36190 - DNA, 432 bp, Oryza sativa
  Clone ID: PAT_MRT4530_40039C.1
atggcgcagtcggactcttcggttgacggcggctggatacgcggtggcaacgaggaggcggcggcggccaggagatgctccaccggccccacgcgcacgcgcgccggcgggatccgcgcgtcgtcgccggagtccttccgcgacgacctcagctgcacaggcgttggcggggatggcagggagggcagcgccccgatcgccgtcggcaaggcggcatcggcgcggcgatatgcaattttctcacttttacggggtgggtgggctaaaaagtggagccacgctgacacgcacgcgccgttcgccgccggcatcttcccggcgatctgctccggctccggtgggcacctcctcgacgttttccggcgagcgcactcgcgcgcgccggataccttgtggacgatctggaaactctgcacgctgccaggaggctag

SEQ ID NO: 36191 - DNA, 3240 bp, Oryza sativa
  Clone ID: PAT_MRT4530_4003C.1
tcatatcccggcgagtagtccttcgtattctgcagtgttattggtcgccctgaagttgaggtggattacgtgattgaattgatctccggagggagacgtcaagataaatcctgccccggctccttggctgttgagtgtgccatcgaacgccattgtccatgttgcattgtcgccttggttgtctgatttgttatctggcatagtccaatcggcaacgaagtcggcgagtacctgggacttgatggctgttcgtggcacaaagtgggcatcaaactggctcagctcgactacccatttcgcaatgcggccaacaacgtctttgtttctcacaacttcaccaagaggaaaagaggagacaactgtgactctgtgggcttgaaaatagtggcgtagcttccttgatgtcatgatgactgcgtaaagcagcttttggatctccttgagtcctgtaggcgacttcatgttctcgattgccttgatcttctcggggtttgcttctatccctctgccagagacaaggaatccgagcaacttgcccgacggtactccgaacgtgcacttctcaggattgagcatgaggcgatattgtcggaggttgtcgaatgtttcctgcagatcgtcaatcaatgagtcgtctgtcttggttttgacaacgatgttgttgacgtaagcctcgacattgttgccaagctggttgctaagtgcgccctggaccgtgcgctggaaagtattcccagctgtaatcagtccgaacggcatcttaacatagcaaaataccccgaacggcgtgatgaatgctgtcttctctttgtcctcttttgccatgctgatttggtggtagccagagtaagcgtcgaggaagctcaataactcgcaaccggctgttgaatccaccagttggtctattcgaggaagtggaaagtgatccttggggcacgccttgttgaggtcggtgaagtcgacacacattctccattttccgttggccttccacaccatgactggattggctagccactctagataaagtacttctctgatgaagccagctttgagaagtttgtcgagctcttctcgtatggcttgttttcggtctggtgcaaatctccacagtctttgctttactggcttggcatcgggtcgcaccatgagtttgtgctcaatcacctccctagggacccccggcatgtcggacggggtcttgtcggggttggcactggagagtggaacaatcttgatggcaccgtctggtttcggcgtcttgtttgtcttggtcactttcttgggtggctcagtcgtggcgggtgggctgggcgtttgctcgaccatgtcgaggctccgcttgtcgcattgcaccgccagctttgcgttcccctgaatagtgattgttcccttcggtcccggcatcttaagcacttgatatgcgtagtgagatgcggccatgaacttcgcaagtgcagttctcccgatgatggcgttgtaagctgtatcgaattcagcaacatcaaaggtgatctgttctgttaggaagttgttggcttggccgaaagtcacgggcaacgtaatcttgcccaaaggtctggacgatgattggggagtaattccatggaagggttgatcagttggtgtcaactcgttttgcgaaattcccatcgcgtccaaagtgcttgatgttccgaatggtgggttcgaccacgatcggatatcgtctgggataacggcgatcttagggtggtcttcttctgagaactctatcttctgctcagaccacttcatcttgggtgcagccccctgccatgtcgagcagacttcacgttccactttcttgtattctcgcttggacgagtacgttgtggaaccaccgaagatgtgtgagacgtggaggtcggagtctggatacgctgagtccggttcgtgaggaaccgtctcttcgttcgtctcgacaacgcgtactcgcttgcctttttcaaatgccatgtgcttctcgagcgactttttgaaaacaaggcaatcttccagagaatgtctgtccgtcttgtgtatggggcaccatgatttctttgtgtcgctactttgtgggtatgggcgtttgggagggttcgcgtattctgctgcgaggacttctgcttgagctttccttttcccgtttttgtgatttttcttcttgcttgactcagatgtgtccgtggctggtttcttctctcccccggtcttcggcctattgttcttgcgtcttagcacatcatcagcgtgggcgcatcgctcaacgatctcgaataatctccgagtggttctgatgcatcttgtcgccaactcctgggtagtgtagcgatctctgacaccagatttgaaggcgtgaattacagaagcgtcggtgatttcaggaattgtgtttctgcactcgttgaaacgtcgaacatattccctcaatgattcacccgagttctgtgtcaacgcgtgtaggtcgtcttcgatcgcgtggcacttgtatgttccttggaaattggcgatgaattgttgccacaggtcaacgtcatcgatagccaatacctcccgcggcgcgctcgttgtcgataacccatagtcctcgaggagatgtaagaccgatggttcgtgaggatcgatatcgattaccccaacgaatcgatctgaagttggagtcgctccttgttccttgccgttatcccttatggggatatatgacttaggagactgagctttcatggcgccgagaaagactttgtagctcgagaggtcgtgattctttgtcttgtgaataggacaatagacatcccgagttggagaagtacgctgaattccacgttctttgcaggcgcgaatttcagcacgaacgttgaggaaaacccagcaatcttgcagggtgtgtttcttggttttgtggataggacaccaagaccttgtggcttcggaagtcatctttgtcggctcgtggttcatgtcggaaggacaaggtttggccgtatcagaatccttcttgagcttggatgtcgtcgatattccgttctccgtctcgatgggaggatttttcgacatggaatcgccttggttcgtaaccactgcgttctcgtctccggtcattggagaaccggttgagatcggcgtcgtggtgtaaaccgggaagacgatttcaccgacttgagtccatatcagcattgttgaagcagggagtacttggttgaggctggtgctgacgttgttgtcgacgaagctggatgacat

SEQ ID NO: 36192 - DNA, 945 bp, Oryza sativa
  Clone ID: PAT_MRT4530_40040C.1
atgccgccggcggcggcgagccccggcggcgggctgaggagggggacggcgggagaggcgccgcggtcggagaagaggccgcgcgaatcccaaggcctcgagagcgagtccggctccgacggcggctccgggtcggactccgacggcgacttcgtcaggaatactttcttgggttacgaattattgggagaattttgctttcttatcgaggttttacctggtggattggattgcagcgatttgagggagatcgtgtgcctgctgcggctgatcaagggcggggcggacagggagggccagaagatgtgcgagcagatcatcgccagtgttgcagcagatattcagactatgttagaagataccaagttaaagtttgagaaacaaaggcagaatttgctgaaagtattgtcaaacacttccaaagagcagtgtgacagttcattgagcaaagagttcatcaaatttcaagaatcatatgaaatattctgtaaagaaaaagatgtgcacgtacaggcattcagagacctgttctcaaaagttgaagttgagaagaaggccttgcttgaacagtttgaaaatcataggaaggaggagacagccacgttgtcagagcttgacaataccttctcagagaagataacacgcgcagaacaatctcttcggaagactgaagttgacaacacgttctcagcgaagataacacatgcggaacaatatcttcggaggacacaatttaacaacatgttctctgggaagaaaacacatgaagaacaatctctgcggaggaaagaatttgacaagacgttctcagagaaggtaacacatgcagaacaacctctgaggaggatgaagcaggatgataagtccttcatcatccttcgcaagtcagttggctcgttccttgagtttggctccgatgatgattttgaccttgacgatgactaa

SEQ ID NO: 36193 - DNA, 149 bp, Oryza sativa
  Clone ID: PAT_MRT4530_40041C.1
ccatctaggatcttgtttaacactagtactgtagatacgacataggcagctaactccaccaagtattatgctcgtttgccttatatgtctcttctgcaagtgccactactgcaatcaccactatgcagttatccagcacatgagcatgg

SEQ ID NO: 36194 - DNA, 523 bp, Oryza sativa
  Clone ID: PAT_MRT4530_40042C.1
gttactctgtgagcacctcatgccatgcatagaacatgggcgcttaccccagaaattagacagtctgaagactatatttagagcatctgtgctaatggcgcacaaatccatatttgcacacgttatcatgtgttatgcctgctcactggatcctgaaacctagggcctagaatgccctctgttcctctctgatgtcatcactaagacggaagaggactcaattggtacaatgtcggccatgtgatatgttggaagctatgtgactcggtcatgggtcattcactgctgatacggaggttggtatactcaaaaagctaacggactgtggtgaaggctattgagacctccgaaacaacatagggatatcagccgatcgtatagatcatcaaacattacactcatgctgtgaagcagatatgtacatcctgtgctttccgttcggagatattaggggctacccacatcttaaaggacagctttgtaacatgccataaggatataactgggcacaccgactgcaacc

SEQ ID NO: 36195 - DNA, 394 bp, Oryza sativa
  Clone ID: PAT_MRT4530_40044C.1
gactgtcaaatgccaataacttataactgccatgggccatgcattttagcctgtagcctgttggctgaaagcacaacgaaaacgggccatatgcattctcataacgcacgatgatgagggttaaccataacatcccaagtgcaaaatggcagcataccttcttgcaacctattgagactttccacatacaaaatctgggatagctgatgcctactaccttagaacctaaactaacagcttatggagtttgggaattatgctgtttgatacttaagactcaagggggtggttggagataccatatgccctgaatgtggatggatgctcacttggagatcttagctgcgagctcccggaccatgttggcttaaaccatatcccgtataccgtgcaa

SEQ ID NO: 36196 - DNA, 178 bp, Oryza sativa
  Clone ID: PAT_MRT4530_40045C.1
atggataatactggtaacaaagtgtcacgaccggaaatcacccaacaggcgttcctgacgtgcgtgcattattccttgtcccaggaggcaaggcacgagctagacaccgaagccttcatcttccaggaactcctcatctgggcttgggaaaaattgagcaagactgagtacaaccacc

SEQ ID NO: 36197 - DNA, 236 bp, Oryza sativa
  Clone ID: PAT_MRT4530_40046C.1
aggatatagagagcctttatcatcattacgacgaagactgtacagtacatagcagcaaaactagtgctggcaatatatttattgagttacactttatccgcaagccgtcctactaggattctgccgcattataaacgtcttggtagctcttggatagcattggagagaggcaccgaactcatgctctctattatgcttgagcctctgagcctcttctcttgagatgcgatatgcat

SEQ ID NO: 36198 - DNA, 458 bp, Oryza sativa
  unsure (1)..(458): unsure at all n locations
  Clone ID: PAT_MRT4530_40047C.1
ctccccccccgcccccccccttttttttaaacccccccccccctgggggggagctttttttttgttcccactttccccaggagtccaaacggggaaatcccccggggtttgagggggccccctggccccacaccacaaaaaaacccaaggtttcggcggggtctcatttttttaattatcaccccgccttcacccttgggttggcaaaccccccgtttattggggtngttagtacccctcaaaagccccccggggggagggccccctggttttattcgctccctcgcgggggggggcccctgccccccccccggcggggcggggggggaattgtgggagcttggcgcccgcggggccgcccgcccttgttttcccttggggggcataacttttttcgcccggttggggggggggtggcgcccgaggttttcggggccccttcgtttttagcgaaaatg

SEQ ID NO: 36199 - DNA, 875 bp, Oryza sativa
  Clone ID: PAT_MRT4530_40048C.1
ccggccgggagcctctgcgtccccattcacctctcctcctcctcttcttctacctcgcgctcgctcgcttccctcgtaaaccatccgcgcgcgtggtccttccatggcggccggggctctcctcctcgccaaccccgccgcgcccacggcgaggcaccagcaccggttgctgcagcagcggaggcagccgcggctcctcgcctcctctcggcctccccggtggcggctctccgccgtgcaggagaccaaggagggggaggcccagacggccgaggagatcaccgagaagtacggcctcgagttcggcctctggaaagtgttcagctccaaggaaggggaggaggaggaggggaagacgaggaagtcgaggacggagcaggcgaaggagctcctggccaagtacggcggcgcgtacctggcgacctcgatcacgctctcgctcatctccttcacgctctgctacctcctcgtcagcgccggcgtcgacgtgcaggacctcctcggcaaggttgggatcgcgacgggggagacgggagggaaggtggggacgttcgcgctggcctacgcggcgcacaaggcggcgtcgccgatcaggttcccgccgacggtggcgctgacgccggtggtggccagctggattgggaggatcaagaaggggggcgactgatccatcaagtatactttgatctttgaatgcgtgaattcgttttgatcttggctcgttcgtactgaatcatgacaagtatatatactagtggtatgtgaatcatgtatgtaagcttagatgttcaagtagagggctacccagtaaatctgctgctacttttgtacaaacacatgctaaaacagtataatgatctagtgtatcccgaatt

SEQ ID NO: 36200 - DNA, 2794 bp, Oryza sativa
  unsure (1)..(2794): unsure at all n locations
  Clone ID: PAT_MRT4530_40049C.1
nnnnnnnnnnnnnnnnnnnnnnnnnnnnnnnnnnnnnnnnnnnnnnnnnnnnnnnnnccgtaaacctttgatgagaagtgttacggttctagtgggcaagaaggaggaggagaggtggtgtcccatataatatgaattcttgcatgacttttattacatttgtggtataatttggcatacagagaaattttgtgatgttgtgttggggaaggatgagaagcaaccatacgggaaagatcttagaatcatccctcagaagagaagaaatgatgctttatcgggtggcaagttctctgagtcacggggtagtggccaatggaggagtaacttttcggctgggcgaggaccggatggcccatcatggcggaagctctcgataggaagtgcaggcgagaaggagaaggagaagatggctggtgaggaggcggaggtccagagcccgttaaaactcaaggcgtccgaggctcttacacacaattccaagaaggctctctttagagaggcggtgattgaggaggtgaggaaaattgcgagggaagaggaagatgctagtataggagcagtggggtaaaacagtaccatgtaagctatgcagagtgatcacgtggacgctaatgctagtgggaagggagttgttttgtcgggcaaggggggtcatgtccctaacccaaacacaggagaagaagaggaagattgatgatgttcaatgcatggaggtggatcagtcgaagaaggtgaaggaagtgacggtggaatctgagaagaacaggatgcctacaaatttagcgggactggcagaccagtcctgcatttatggtgaaccgaggtcagacaaaaaggatctcacgtggaaagctctccggacgctaaatgcaacgaaaggggagctgtggttgtgtgtgggtgatttcaatgaagtccttttcagttgggagaaggaaagaggtcacgctaaggcccagagttgcatggatcgtttccgtcagacgctggattgctgtagcttgtcgaacctgggattcacgggtgatcctttcacctggaggaataattggtgtgttcgggatggttacattcgggaacggctggatagggcggtggccgattctgattggtgttgtcgttttcctagtttccgagttaggaagggtgatccaaggcactctgaccatcacccagtcattgtgacaacatctaatgaagttatatggaatggcggcagatcaaaacctgggttccggtttgaggcaggatgggcgagggaggaacactgcgctcccatagttgagaatgcatggaagttgtcagtgggccctagagggggcaaggttatggacgctatcagggaagtggctgctaatttgtgggattggagcaaaaatttcctgggggacctagagaaacgcatcaagaaggctaaacaggctctagaagcccacagacgttctccaatcagtagcagtacggcttcgcgggaagcggtgttgaaatacaggctggataaattggaggaacagaggcttctccagaatgtgccaaagagagtaacgtctactatgaatgatgaactgatgaaaggggtgacgacggaggaaataaagaaagctctggacagtattggggacctgaaagctcctcctggttcagacggtatgcctgccctcttctataaacaattttgggaatgtgtgggggatgatattgtgcatgaagttaaagatttcttaggtggtggggaaatgccggatagctggaatgatactgtggttgtgctgataccaaaggttctagctaatcgtctgaaacccctgctctcagaaattatctccccaatccaaattgcttttgtaccacagcggatgataacggacaatattttgctggcctatgagttaacacacttcctgaaaacaaaaagaaggggatctgttggttttgccgcagtaaagcagggtatgagtaaagcctatgatagggtggagtggggatttttggaaagatgatgttgaagctgggttttgacaggaattgggtatttattgtgatgaagtgtgtcacatcggtgaactaccgtataaaggtgaatggggagttcactgaacagatcaatccgacaggaggtttacgtcagggagatcccatttcaccgtatctcttcttcatatgtgctgagggtttttcaactcttctgaacgcagcagaagaaagaggagatctttcggtaattaaagtttgccagaatgcaccgagtatcaatcacctgttgtttgcggacgattctttgctgctcctaaaaactgatgaagggagtgcggcttgtctgcagaatgttttatcattgtacgaaagatgctcgggggaaacaataaacaaggagaaatcgtcgattatgttcagcagaaatataaaggaggttaataaacagattttcatgggtgcgttggatataggagtgggggcttggaatgaaaaatatctcggcttaccggtgtatatgggcagatcaaaagcaaagacttccagctacctgaaggagagggtttggaagaaaattcagggttggaaggagaaacttctgtcacgggcgggaaaggatgttcttattaaagctgtagcgcaggcaatcccggcttttgctatgtcatgttttaacctaaccaaagggctatgcgacgaaattacttcactcatctgtcgtttcttttgggcccaacaggaacgggagaataaaatgcattggattgcttgggagcatctatgcagcagaaaggagaaaggagggtttttttttagg

SEQ ID NO: 36201 - DNA, 410 bp, Oryza sativa
  Clone ID: PAT_MRT4530_4004C.1
acccagcatttattgccaattttttttcgttccggtacgaattggacttttttttgtttttttatggtgcgttttcttttccgcgtgattcttttcgtccttttctaaattgcggattttgaggagtaagattaaaaccgactaaaacacggatgacttaccaaagtagcggcaaaaacatttttaatttttataatagtagagatagtgatataaaagtagaagagaacaggaaaatctggtagattttgaattgtgcggtgcaaatcatcgtgttcttagattttggtcatttgatcttctgcacaattttttgtggaccatgggaattatcgagctctcgcttacaactgctcttggatggttctggccagaaattttgatgaacaatgttattttatttgaatttc

SEQ ID NO: 36202 - DNA, 1089 bp, Oryza sativa
  Clone ID: PAT_MRT4530_40050C.1
aaaccgaacttgggccttgggccttgtaatagactaggcccatctcggaagtgtctccctccacctccacctacaagtaaaccgcaactatccatccatcccactgtcactctctctgtctccctcccccgacgacctaggcatgccacacccgctgccgccgccgccgccgacgacgacgacgatgccgctgccgctgccgccacctcccctcccgctcccctcgccgtcgtcgccatcatcatccaccaccatccctcgtcgccgccaccaccgccgcctcgcctcctcctcctcgacctcgtcttcctccaccgcctccatattctccacgtcgccgtcgccttcccgccgttgttcgtcgtcccgcgccgccgtgacgagcgacgtcaccacgaccgcctccgtcgtcgtcgtgcccttctcgtgggagctccacccgggcatccccaagaacggcctcggcgccctcgtcctcctccgccgccgggagccggcgctcccgctcccgccgccgatccgcgcgtccccaccacctcgccggcggcgccagcaccaccgtcgccgccgctcggacggcgtcccggcgcgttccggcgccggcgaccccttcaccgcggccattgccgagtgcaccagggaggaggatagcgccgacgatttgcccggacgccgccgctccgacgccgccgccgccgccgcctcatccgagcatcggtggcggtggctcgccggcggcagcgggttcgtcggattcctcgacctctacggctgcaagagcgccatggccgtcgccgacgccgccatcttggctcgccgccggccagtccagagcccggcccctcgccgccgccgccccgcgcgtcgtcgtcgccgcccggcgccccgccggtcacgcacctcgccgtcgccgccctcccccggccggatctgggagggcagccgccgccgccgcgcgttgcgtcgtcgtcgccgctccgccggccatgcgccgcgccgccgccgccctcccccggcctccctccggccggatctgggaggggaggggagggtagccggggcggccgcacgggcgggcggcggcggcgg

SEQ ID NO: 36203 - DNA, 430 bp, Oryza sativa
  Clone ID: PAT_MRT4530_40051C.1
tttctgtcagcacagctggccgaacttgatcttccagctgctgcttgcaccttgacacaacagcatcaggatgcagctctgcaaccaaaacgttgccgccaatgtgcggactgcggcccctcagcgcgctgcaaaggcctcccgcacagcagtgaggcctgtggcagcagctcaagtggaggcagtagcagcagatgcaagcaccagccagcaggcacctctgatgatccgtgctctgcgcggtgatgcagtcgagaggcctcctgtctggatgatgaggcaagctggccgttacatgaaggtgtaccaggacctctgcaagaagcacaccacattcagggagcgctcagagaatgtcgacctggccgttgagatctctctgcagcctttgcatgcgttcagcctgacggtgtgattctgttcagtgaca

SEQ ID NO: 36204 - DNA, 222 bp, Oryza sativa
  Clone ID: PAT_MRT4530_40052C.1
tttgcttaagttgacgcatttgtaactgtttttgctgactatcaagacactgttgctaggcatgaagctgctcatatatgggggataggactatagtgttgcactccacgtgtttggaggactgccttacggaggagcattttgcgctctgatccatgcctagcagacgggtgattgctaggggcagagcactccatgggatactaatgcttgaacaaactg

SEQ ID NO: 36205 - DNA, 567 bp, Oryza sativa
  Clone ID: PAT_MRT4530_40053C.1
atggcgacctccccgagcgacgacgacgaccggaacggcggcgaagcacggctggagcgacggcgacgacggcggagcgaggtccacggcgctagggctcttccgacggcgagggtgacggcggatagaggggagctcgggggtccttttaaaggggctagggcgcggcggcgaaagcccacggcgaccggcatcggaaggaaagattggggaaacacgaatccgaatcaaactcgaatccgcctatttccaaaggaaattagccgacgattccaaaagagaaaaggtagaggagatcccggagatcatttcccctctaaagatttcaccggagaaggaaaggcgcggccaaatttggaaggagacggcagcgcggctcgactagggttcgggcggcggcggcggagcgaggaagacgaacctgacaggtgggacccacctgtcagcggccgagagagaggaggaaggggcgcggcggactgggccgactgggccggggaggagagagggagaaggaaagagagacttgggctgactttcggcccaaagccaaaaggaggattttaa

SEQ ID NO: 36206 - DNA, 458 bp, Oryza sativa
  Clone ID: PAT_MRT4530_40054C.1
tacacggacatcaccggcacgtcggcttcggaccggccgtgacgttcgcgtcagcgagcggcccgtcacaactgtcgcctggagaacgtgaacatcaccatggccgcgggcagaacgcgtccgcctactgccaccacgcgttcgggaagagctcggcgtcgtcgtcccggactcgtgcctcgggaaggaggactacctccgccggcaaggccccgcctccgccgccgccgccggcggcggaacgcaggagaagggaggagaagatgacgatcggtgaaaccgtggcaggttaagtcagcgtgtgtagtggacgtgttcacatcctttaccataatacgctattattatatgtttagaacccgcataccatgtatctatcgtgtaatcgtaaaaaaaaaaaacttttaataaaaccagagaaggacggccccgatgttaggatgaaaaaaaaaaaaaaa

SEQ ID NO: 36207 - DNA, 716 bp, Oryza sativa
  Clone ID: PAT_MRT4530_40055C.1
ccgaagttaccacagggtagaaaagatcaagatggacaccctgttcatttccaacactgaaaacggcgtacgcgtcaagaccttccagggcggctgcggcaccgcccggaaaatgaagttcggtgacatccttatgaagaacgtcaagaacccgatcgtcatcgatcagcagaactcctcgagcaacgaaattccctgcggatcaaagaacggaagcgcggtgacggtgggggagatcagctacacggacatcaccggcacgtcggcgtcggagcgggcggtgacgttcgcgtgcagcgaggcggcgccgtgcagcaagctgtcgctggagaacgtgaacatcaccatggccggcgggcagaacgcgtccgcctactgccaccacgcgttcgggaagagcgtcggcgtcgtcgtcccggactcgtgcctcgggaaggaggactacctccgccggcaagtccccgcctccgccgccgccgccggcggcggaacgcaggagaagggaggagaagatgacgatcggtgaaaccgtggcaggttaagtcagcgtgtgtagtggacgtgttcacatcctttaccataataacgctattattacatgtactaacgtgtgaggataataaaagtttagaacccacataccatgtatctatcgtgtaatcgtaaaaaaaaaacttttaataaaacaagagaaggacggccacgatgttaggatg

SEQ ID NO: 36208 - DNA, 1672 bp, Oryza sativa
  Clone ID: PAT_MRT4530_40056C.1
gggactctcgggtcccggcattctccagcaccagcagccgcctcggccgcaagcttcttcttcagcaactcagcagcacttcacctgctgctgctgcgaccgccgtgaccatccaccacctcgtcgccggcgagaaacctgcagagggcgagggcgagtgcggcggagcaggggatggaggagcatggcaaggcggctgtcggctgggcggccagggacgactccggcgtcctctccccgtacaacttctccaggagggctcagaaggacgatgacgtcaccatcaaggtgctctactgcggcatctgccacaccgacctgcacgtcgtcaagaacgattggggcaacgccatgtaccccgtcgtccccggccacgagatcgtcggcgtcgtcaccggcgtcggcgccggcgtgaccaagttcaaggccggcgacacggtggggcgtgggcttcttcgtcgggtcgcggcgcgtcctgcgacggctgcgggaacgggtacgagaactactgcccaacgatggtgagccaagatagcaaccacctgcaacggcggtcgaccacgaccacggcggcggcgcggccacccagggcggcttctccgacgccatcgtcgtcaacgagcactacgtgctccgcgtgccggcggggctgccgctggacagcgcggcgccgctgagcccgatggtgatccacgggctgaacgcgccggggaagcacgtcggcgtcgtcggcctcggcgggctcggccacgtcgccgtcaagttcgccaaggcgttcgggatgcgcgtcaccgtcatcagcacgtcgccggggaagcggcaggaggcactggagcacctcggcgccgacgagttcctcgtcagccgcgacgcgggctgcgccagatggcggcggggacgcggcggccaccatggacgggatcctcaacacggtgtcggcctggcacccgatcgcgccgctgttctcgctgatgaagcccgatggcgcagatggtgttcgtcggcgggccgaccaggccgctggagctgccggcgtacggccatcggtgccccggagggaagggcatcaacccggcaactgcgtcggcgggcatcagggactggccaggccatgctcgacttcgccggcgagcacggcatcactgccgaggtggaggtcatcaagatggactacgtcaaccaccggcgatggagcggctggagaagaacgatgtccgctaccgcttcggtcatcgacgttgccggcagcagcctcgccggctccggcgacgccaagatataaagctcgccggcttgcttgcttgcttgtgtcgacggcgccggcgccgcctagcttgcttgttgtgtgtcagtggccttgaatgtttggtgatgtgcaaactactacgaaatggagtaagaaataagtggagcatatgtctccatcacttggttattaattagtcgagctaattaattgtacatattgagaaatgatgataggccacattgtttaagtctaaggtctatttgggaattgggatagcttgagattctgagaagcagctatttggtagctagcttatcagaatctggaaaagctaggtttcccagcttctggtttatagttcatttcatggattctacaactatagcttcttataatttggatcaaaaaaaaaactgtttggag

SEQ ID NO: 36209 - DNA, 592 bp, Oryza sativa
  Clone ID: PAT_MRT4530_40057C.1
acccgggggttttggggggagtatggaaaaaaaaaatgggccaaaacgcccaaaatcatatataggcctttatcccccggtttttgggttaaaaaacatttaattattaattattgggttggaacactatttggggggaggcaaaaaaaaaagggggggaccctactagcttggggggaagccagttaaccctaatccgggccggggggaaaaaagctgcccggggggggctcaacccggcacataaacgggagggggcccgggtactgccccccccggggaagccccacgggggtaatccccggggggggggggggctccccgaaaaaaccctcctcggaaaacccctggggggaaaaccccgggtccgaaaaaaacccccgggggggggagtactccgaaaaaaaaaaaaaccaaccttggtccaggggcatggggatgctctcctgggagccccccaccacccggggggggggggggcaagggcacccggggttaacgtcctggagttgggggaaacactgtttcccaaggccgagcgcccccgggggggggaacatcggttggaaccccccccggccggggaactgcc

SEQ ID NO: 36210 - DNA, 1095 bp, Oryza sativa
  Clone ID: PAT_MRT4530_40058C.1
atggaggagcatggcaaggcggctgtcggctgggcggccagggacgactccggcgtcctctccccgtacaacttctccaggagggctcagaaggacgatgacgtcaccatcaaggtgctctactgcggcatctgccacaccgacctgcacgtcgtcaagaacgattggggcaacgccatgtaccccgtcgtccccggccacgagatcgtcggcgtcgtcaccggcgtcggcgccggcgtgaccaagttcaaggccggcgacacggtgggcgtgggcttcttcgtcgggtcgtgccgcacctgcgacagctgcggcaaggggtacgagaactactgcgccaagatggtaaccacctgcaacggcgtcgaccacgaccacggcggcggcgcggccacccagggcggcttctccgacgccatcgtcgtcaacgagcactacgtgctccgcgtgccggcggggctgccgctggacaaggcggcgccgctgctgtgcgccggcgtgacggtgtacaacccgatggtgatccacggcctgaacgcgccggggaagcacgtcggcgtggtcggcctcggcgggctcggccacgtcgccgtcaagttcgccaaggcgttcgggatgcgcgtcaccgtcatcagcacgtcgccggggaagcggcgggaggcgctggagcacctcggcgccgacgagttcctcgtcagccgcgacgcgggccagatggcggcggcggcgggcaccatggacgggatcctcaacacggtgtcggcgtggcacccggtcgcgccgctgttcgcactgatgaagccgatggcgcagatggtgttcgtcggcgcgccgaccaggccgctggagctgccggcgtacgccatcgtcccgggagggaagggcatcaccggcaactgcgtcggcggcatcagggactgccaggccatgctcgacttcgccggcgagcacggaatcaccgccgaggtggaggtgatcaagatggactacgtcaacaccgcgatggagcggctggagaagaacgacgtccgctaccgcttcgtcatcgacgtcgccggcagcagcctcggcggctccggcgacgacaagatataa

SEQ ID NO: 36211 - DNA, 672 bp, Oryza sativa
  Clone ID: PAT_MRT4530_40059C.1
aataagacgaacggttaaacatgtgctaaaaagtcaatggtgtcaaacattttgaaacggaggagtatatactaaaacagagacacaatccagcactatacacgaggacttggaaggcatacaagctatactctagtagtatgatcccaggaagacaataaattctacagccagcctcaagcactagaattgaaattcatcagtgacatacaaaccaaaactgcacattcaaatctacattgtccatgagatctccaattaagaatcaaaaactttggttctcctgctggtattgctgcatgcatgcacttgcacgcgtcaaactgaatgtttcttgttgtaaatgcataaaaagatggaacaatcgtccatagaaaaccgtcatcagtaagcccagatggaagaatatggtctgctatactttcctggcaacgcatgaaggatttggctcaatatttactggagcaacaaccgtctaataactggtgtttcgtagagaccatttgttcactgaaccagcgtgatactgacccaattccctggacatgttttgattcgtccaaccaggaaaatatttcttcatggcccgcatacaataatctcctcttagcctcttcactctccatagcattcctttcccatgatgaagagcgagcttcctgttatatttat

SEQ ID NO: 36212 - DNA, 510 bp, Oryza sativa
  Clone ID: PAT_MRT4530_4005C.1
atgtcgtcggcgaacagcctggtgctggggcgggtgatcggcgacgtggtggacctgttctcgccggaggtgacgctccgggtgatgtacaacggcgtgcgggtcgtcaacggcgaggacctccggccgtcggcggtgtcggcgaggcccagcgtcgaggtgatggtggatccagatgctccaaacccaagcaatccgacgttgagagagtacttacactggttggtgacagatattcctggaacaactgatgcgaactatgggcgcgaggtggtgtgctacgagagcccccggccagcggcggggatccaccgggtggcggtggtgctgttccggcagatggcgcgcggcggcgtggaccagccgccgctgctccgccacaacttctccacccgcggcttcgccgacgaccacgccctcggcgcccccgtcgccgccgccttcttcacctgcaagcccgagggcggcaccggcggccgccgcttccggccaccgtcacggcatagctag

SEQ ID NO: 36213 - DNA, 336 bp, Oryza sativa
  Clone ID: PAT_MRT4530_40060C.1
atgtggaggaggaaacacgaggtggggatcacgcatcagcaggagattgtcagctgtgacgatgagatcgatggcgacaacgaggacgtcgcggaggcgatgaccttgctcgcgatcagaccggcgatggcggaacgtgaccggaagacggggccgggcgtggccaaaggcgaccggagagatcggaggggtagcgtcatggacggcacgcctgacgcacgcggtggtcgtggatccgcagcggcaaggaggctagcggcgaaagggcaaaaccgacgagcgtggcgcagcgcggcagacgtgcagggccgatggcgacaaggtcgtggacagtga

SEQ ID NO: 36214 - DNA, 2461 bp, Oryza sativa
  Clone ID: PAT_MRT4530_40061C.1
cccagtcggtccccgggctgcaggcgcccctcggccccaaccctaacgccgctctcgcctccaccccccaaatcccgaatccgccgcctcttcgttcgtcgtcgagctcgctcgctcgcccaaccctagcgcgccagatctacccgcccccgagcagccgccatggcggagaccctcgacatgacgctcgacgacatcatcaagaacaacaagaaggccaacccctcgtccggccgcggccgccgcggatctgccgctggcggcggcggcggcgggggtgggggtgttggtggtggcggcggcggcggcgtggggccgacgaggcggcccttcaagaggtcggggaacagggcggggccctaccagccgcccaaggcccctgaatcggcgtggcagcacgacatgtactcggatgtcgcggcaggcggcggcggcggcagcggcggaggcgggagggtctcggctatcgagactggcaccaagctctacatctccaatttggacttcggcgtctcgaccgaggatatcaaggagcttttctctgaattaggtgatcttaagaaatacgtaattcactatgacagaagtgggaggtctaagggaacagctgaagttgtatttgcaaggcgtggcgatgctgtcgcagcagtgaagaaatataacaatgtgcaacttgatggtaagccaatgaaaatagagattcttgggaccaatactcctacagctgcagctgctcttccagcaaataacggaggctacgttagaaatgttgctaagagtgcaccaaggggtggcccagctggactaccgcagggtagacctcgtccaagggggggtgggaggcgccgtggtggcggaggaggcagtggtggtcctggtggatccggtggtcgccgtggcaaagagcgtagccagccaaagtctgctgaagaacttgatgctgacttggagaaataccatgcagatgcgatgcagaccaactagatcttcacggtgttgatatttcaacatgaaatctgaaggatgtttatctgcttgttcctgctatttgtgctaccatgttcagtggcaacaacaaaacctttgtttgtcgggtcttggtttactgaattgtacggttttatgtgtctacatagaactagagttaagtggatgctggtgaacactgttatgaatattacttggttgccacttatgttcctttttctgcggagtgaaggcctgctcgagttgctccacatacagaagttactgaagatgtatgaggtgctcgtatcttctgactcctttaacatacatcatcttcaacggcattgttgcatggttatttggacattgttcctctctgtacaagggttataaggctcagccatcctcaatgaggtggctggtgctttttttgttatttatcattctgctattgttgattttgggcttagcaatattcttctacccgttagtgattcatatgacagcggctggaggggtcactttcattttaaagttgatttcctccttgcaaaatctgcaccgtcatatgattattctatcttctagccagctgatcgtcagtttgaagaagcatcgaggtgcaaattctgatttaaaatttgctattgatatttgatagttattcaagtcttaacagcatatgtaggctttggacttcatttcttggccctccatccattgccttcttattctgtgtgatgttagcattgcagtggatcttcattttcattaaaaatagccatcaaactcctttagtatcccaactaggtatgtcatgatcatgtaactgtgctgggaagatccatctattatgctcatgtttctgccctgccgttcagttttcaactgttgcactcagttttcaacagaaggatccatccatcttgttgctcatcaataaggatttctcagtttattgattatttgagtatcatccaagtgttggcctacttgattggaggtgttgaataacaaatttcataaccttataagaggcaaattttgatggctggctcgatggtcatgtttgtcaggcaatgtcaatggcatcagttcagtattttggaaatggtacggtgtagtcatcatttagatggcattaggttaactggaattgaaataatcgtttagattctttgcccagattcaattacataaagcaaaataggtttacttttttttttttgggtttgcaatgtggaaagctcctaggtgatagatgtggaaatttcaatttgctccttctgttgtaattgaggcttgaggtttattctgcgttgcagttttttgccctcaagcattgctgtcatctgcttgacttcttcctttggtgaacatgttttcgcagtggcctttgcaagaacaatgttgccagttaaataccgtatattgaatgccaaaaaaaaaaaaaaaaaaaaaaaaaaaaacaaaaaaaaaaaaaaaaccaaaa

SEQ ID NO: 36215 - DNA, 348 bp, Oryza sativa
  Clone ID: PAT_MRT4530_40062C.1
gggaaaaaaggggcggaaattttttttgaaattggataaccccgcgggtttaaaattgcaaaaaagaaggggggagggttttttttttttttgcggggagaataaacggggaaaattaaaaaccaaaaccccccggggggggaaaaccttaaggggggagtgttggacatggggaaaaacccgcaaattgggggtttttttagggccaaaaaagttggggtttgacctggacttttaacaaaagaaaccttaaaaaactggggaaacctaaattgggaaaaaaaaacctaaaaaattttaatggcctgcgaaaaaaaatgcgaaacctggggccaacccggaaatttc

SEQ ID NO: 36216 - DNA, 626 bp, Oryza sativa
  Clone ID: PAT_MRT4530_40063C.1
aaaaacaaacccccaaaaaatagtacctagttgggggggaccctggattataaaaaaccttgaaacaaaaaaggggaccttgggtctaaactttgagggccaacccccccttttttgggaaaaaaacccgttaaaaaacggggagggggctttaaaaaaaaccccagggggaaaaaaaactaaaaaaagggtttttttaatatggaaaccctttccaaaaaaaaaggggtttggggccaaatataattttggttaggaaaaaccttcaagggggggggggttaaacagccttgtaatattttttgccccgattgggtttgacttaacctcccgaatgtttgtttttgttggggaaaccccccccttttaaaaggggatttttggaggaagacggggagtttggtttttccctccagggcctggccaaaaaacccttttttttggaaaaacccttttttaaaaaaagggggggggggccgaaaacaaaaaaaaaaaggctttttaaaaaaggggggaaaaaaagggcccttaaaggaaaaaattgggccaaaaaggggccttttccccaattttctttggggggctaaagccccccttttaaataaaccccccccttcccctttttt

SEQ ID NO: 36217 - DNA, 492 bp, Oryza sativa
  Clone ID: PAT_MRT4530_40064C.1
atggctatcacacaacacattggagaaggctacaatccggtcgcaaagaggggattatatgtgagggatgttcttcaacggtttggactaacacataaaaggaattgtagctcttctgcctattctgcacagtattcaaagatcaggcatgatccgagtttggaacttggattgaggaggaagggggaaatatgggagcacataaaaacagcttcaataatattgggttcgtgctcagctatcgctgccgcctacttcgtcgtcggatcgttcatgatgcaagaattagatgccaagatgaagcaccgtttcgatcatgccaagacccacattgatgccaaaatggacgagcaaggttttagggaagctattgggatgctttttcttttgtttattttgatgctgttcctttttgcactggtcgatgctgatgattgtaagggcaaaagcatcaggaagaggaagaagaagccaagcctcctccacaattaa

SEQ ID NO: 36218 - DNA, 1842 bp, Oryza sativa
  Clone ID: PAT_MRT4530_40065C.1
atgatcctatgtcgctgcccattcctggccagtgcccggtcccacacctgctcactctccaccgtggccgtcgcggcggccgtgcggcgcggtgacctcaccggcgcggaggaggcgttcgcatccacgccacggaagaccacggccacctacaactgcctccttgccggctacgccagggcgctcggccgcctcgcggacgcacgccacctgttcgaccgaataccgaccccggatgctgtctcctacaacacgctcctctcgtgccacttcgccagcggcgacgccgatggcgcccggaggctcttcgcatcgatgccggtcagggacgtcgtgtcctggaacaccatggtgtcggggctgtccaagagtggggccgtggaggaggccaaggccgtgttcctagcaatgccagtgaggaactccgtttcctggaacgccatggtttccgggttcgcctgctctagagacatgagcgcggcggaggagtggtttaggaatgcgccggagaagggggacgccgttctgtggactgcgatggtgtcggggtacatggatatcggcaatgtggtgaaggccatcgaatactttgaggcaatgccagtgaggaacttggtttcatggaatgctgtggttgctgggtatgtgaagaattcacatgcggatgatgctttgaggctgttcaggaccatggtcagggaggccaatgttcagccaaatgcatcgacgttaagcagcgtgcttcttggttgcagtaacttgtctgcacttggatttggtaagcagatacatcagtggtgtatgaagcttccgttgagtaggaacttgacggtgggcacgtcacttgtgagcatgtattgcaagtgtggggacttgagtagcgcgtgcaaactgtttggtgaaatgcatacgagggatgtggttgcgtggaatgctatgatatctggctatgctcagcatggagatgggaaggaagctatcaatttatttgaaaggatgaaggatgaaggagttgagcccaactggattacttttgtggcagtattgactgcttgtatccacactggcttgtgtgattttggaatacggtgtttcgagggaatgcaggaattgtacggaattgagcctcgggttgatcattactcatgcatggtggatcttctctgcagagctggtaagcttgaaagagctgtggacttgatccgctcaatgccctttgaaccacatccttctgcatatggaaccttattggctgcttgtagagtttataagaacttggagtttgctgagcttgcggctggaaaactgattgaaaaggatccacagagcgcaggtgcctatgtacaacttgcaaatatctatgctggcgcaaatcagtgggatgatgtctctagagtaaggaggtggatgaaggataatgcagttgtgaaaacacctgggtatagctggatagagattaagggtgtgatgcatgagtttagatcaaatgacagattgcaccctcagctttacttgatccatgaaaaactgggccagttagcggagaggatgaaggcaatgggttatgttccagatcttgattttgtcctgcatgatgtggatgaaactctgaaggtgcagatgctaatgaggcacagtgagaagcttgctatttcttttggtctgattagtactgctcctgggatgaccttgaggattttcaagaatctcagggtttgtggagactgtcataatgcagccaaggtcatctccaagatcgaggatcgagaaatcattttgagggatactacacgattccaccattttagaggagggcattgctcatgtggtgattactggtga

SEQ ID NO: 36219 - DNA, 528 bp, Oryza sativa
  Clone ID: PAT_MRT4530_40066C.1
ctacacgacaaagaagtattccacatcggaaactataggctcgaggcgctttaccgccaggaggcctccatcgacggctccatctcgcgctcttgcagctcgattccctgtccaagagctttgcgcgaggaccggctccaccgatggaattgctaagtgacttaggtcactccgcgctagcatggacttggcggggttcttcacttttgcgggtcgcgaggcgcgcgcaaggaggtggacacactccgtgacgagctccctaacgtgctcaagcgttgcatcaatcaggcgagatttgtcatggacgtgatctctgaggtgctcccctggcgtgcgcatgcgtgctcgtcctagaggcaatggtgccagcgctagccgatcagacctagagatcgaggtgaccatgccatgcaccgccttcgtgagtgctggcaccaactcatcctctgcaatagagaagaatgcgaggagagagaggggggaggtggagaaggagaaaaggaaattgacatgtggggcccaccacat

SEQ ID NO: 36220 - DNA, 240 bp, Oryza sativa
  Clone ID: PAT_MRT4530_40067C.1
atgggcgagttcgacgactactgggcgcgggcgtacaggggcgactccggggtgccgcactccgacccgcagcggctggtcaccacctggaccggcgccttcgccctcggcgccgccgcctgcgtccaccaccacgcctccgccctcgcctccaacatcaagttctactgtggaagagagcagcctgtggtgctgggcttgttgcctctgcgcttcgtgagttccttgttcggtcactag

SEQ ID NO: 36221 - DNA, 312 bp, Oryza sativa
  Clone ID: PAT_MRT4530_40068C.1
attaaatagaaaggaaaagcaagcaacttaattaaagaatacaagacaaatactgactccactaaattgcgcgtgcaatgaggcagccgggcaccaccattataacctgggtttaatgcaaatgacctttctccacaatcctaatcatcccacataagtagacacacgtatatagctgcattaactacagatgtatctaaagttgtacaggctataagtccagtctgatggacaatacagagagctacgagtgacgtgcctaggacgctgcttcctggacgaaattctcaaaggtgcgcacatagaggagtg

SEQ ID NO: 36222 - DNA, 318 bp, Oryza sativa
  Clone ID: PAT_MRT4530_40069C.1
atgcgggcggcgggcggagagctggcgggctgcgggcggagcggatggcaggcgagcgcggcggcggagtgcggcgggagagcagcggtgggcgagtgcggcagcgaagtggcggcgggccgcgggtggagcggacgacaggcgagctcagcggcgggcgcctccggatgctacagcaccacgacgttgttcggcgccttggccgcgtcgttcgccctgagcttcttcctcatcaccatcttcatctgccctcaagccctctacgttgcccgtcgccggcgtgatcgtccactggtcatggagcaggagcagcagtag

SEQ ID NO: 36223 - DNA, 2150 bp, Oryza sativa
  Clone ID: PAT_MRT4530_4006C.1
attgtgtgtttgcatggtgttcctaagaaaatagtatccgatcgaggtagccagtttacttcaaagtgttggaagaagctttaggaagagatgggttctaagttgaatttcagtaccgcttatcatccgcagacagacggacaaactgaaagggtaaatcagattttggaagacatgttgagagcttgtgctttagacttcggtggaagttgggataagaatctgccttacgcggaattctcgtacaacaacagttaccaagctagtcttcaaatggctccttatgaagcactatatggtcggaagtgccgcactccgctgtcgtgggatcagacgggagaacgtcaggtttttgggaccgatattctgagggaagcagaagagaaggtaaagatcattcaagaaagattgtgtatagcccagtctcgtcataagaattatgctgacaatcgccgcagggatttaagttttgaggaaggagatcatgtgtaccttcgtgtcacgcctcttcggggagttcatcgttttcacaccaaaggaaaattggcaccgcattttgtgggacctaataagattgtcagtagaagaggagaggtcgcctatcagttggagttacctcaatccttggcagatgttcataatgtgtttcatatgtcacagttgaaaaggtgtttaagggtacccactgaagaagccaatcttgagtagatagaaatccaagaggatctgacatatgttgagaaaccaatccgtatcctggagacagatgagagaagaaccaggaatcgagttatccgtttttgcaaggtccaatggagtaatcactcagaagaagaagctacttggaaacgagaagatgaattaaacgttgaattcgagcttgattcgaattcgttttttcctcctaaccctagatcttccatcgccgttgccggcggccgtgggcctccatcgctgctcctagcccctatataaggacccccgggacctcctcttttcgtcgctacgctcgcctcagctcgccgccgcttgtagcaccgcctccgcgccatgcgccgccgccgctccggtcgtcgtcgtcgctcaggaaggctgccgtcaggttcgccaagtcgtcgccgtcctcatcccatcctccgtttccaccgaggaccgccggagcactgccgtcgtcgtcgacccgaacgcctccgccgcttcgacctcgtcgccgtcgccgtccgttgccgtccgccgttgtccaagctctcgccgcacctcccgccacgaccgtgcgccttccggctacgccgtcaccaccctcggccactggtgttgccgccactgcaccgtctccggccggctgctgttcgtcgccggtgcgccgatcgacgtcgccatctcctccgtcggcgtcgcagcgttgtcctctcctccggctgctcctctgtttcaccagaatgccgtcacccgtgccggcctatccatcctcctcattgtcgacgtcgcctccggcagcccctcccgccgtgcccgtgcattggccgacgtcgccgtctcctcctccagcgtcgcagcggcaaggtcgcccctggcctcgcctccccatcggcggaacaccgccggtgtccgtcgtcgtcttcaccgttcatcctcgccggctcatcgtctcgctgcgccgccaccgtcgtcggcatcgcagcggcgtgttccatgccgtccttgtctccgtgcagctgctgccggctgccctcgtcgcctcctcgccggttccggtcgtcgtcctcccgtcgttctcggtcgtcgttgcgtttgtccctccgtcaagccgtgctgatcgtcgcccgcgtttcgtcaaggttgctgcagccccatcgtcgttttcgtcctcggctccacgtcgtcaggcctcatgccggccgcgtctcgccttcgtccaaggatcactgccgaagtcgtcccctcgccattcgtctccgtcgttcccgtctgtctccgccgcgcccgttctccgtcgtcgttcccacgcctcgtcgcgtggtggtaaggatccatcctctcgctgccccgtcctaatcctttcggtgtcgcccgtgcccgttgtgcggttgtcgaccccgcttctatcgttccggaggttcccgaagcgtggtttgcgatcgtcgccgaag

SEQ ID NO: 36224 - DNA, 493 bp, Oryza sativa
  Clone ID: PAT_MRT4530_40070C.1
ttttggcattcgactgccgcgaaaaccctaggcgccgccgccgccgccgttggccaaaatgtccacgccaccggcggccgccgacgactccccggacaccgaccaaggcaagaccaagtcgaagaagaagagcaagaagcatcaggaggacacctgctgctccctggccgtcgccggagcatcggcggatgaggcggaggacgccaaggccgacggctacctgagcaagccgcagtcggtggcgccgtcgctggacacgtcggagcggccgctccttctaaagaactacgaccgacttaacgtccgaaccggccactacaccccgtttcctgtcggccactccccgataaagcggcccatcggcgagtacctacggtgctgcgtgatcaacctagacaagccgtgaaacccttgctcgcacgaggacaggggatggatcaagcgcctcctgcgagtcgagaagaccggccacagcggtacccttgaccccaag

SEQ ID NO: 36225 - DNA, 967 bp, Oryza sativa
  unsure (1)..(967): unsure at all n locations
  Clone ID: PAT_MRT4530_40071C.1
tcaaactgcccgttgagcgtcgttctgaccacctgatactgttggtttgaccgacggtatgccaccggtgaccagtctaaccgcctccctatcgtctgcctgatctcctattgttgtttcctcttgacttgatgccattggtccaaccaccaagatgccttcggtcacaccgtcgtggtctgactgtcgttcctctactggcctgtgcatctggttatccctgggcaatctaacccttgcagacatgaaggccatgccaacaaagactgctttgacagcctgtttttgaccagcatagtcaaatgctagaggtaacatttcatgcaaagtgaggaaggccataaccccaccaactgaaccaagtaggccttcaagaacttcaggatttaagctgctcggaaacaagtaagcaacaatgatcactcctagtggctcagcgaaaccagagagggttgcaactttaaatgcttgccatttgctgttggtagcaaaatagagtgggagggcttccgcatccccctctggtatattgtgtaaagcaatagcaatagccaagttcagtcccacacgaaggccctgcttcttgcctgcatcagctgttggcacaacagttggctctggaataaacttgacaaccaaaccaaagaaaagaactccagcaaaaaaccaaaggttgcccttcaagaaaccaatagaattcaatgcattgtgtgccaaatctagaaaggaaatgctcaacataagtccagcggcaaaaccctgtagaagcccaagcatcttaagattaggcgtcggattcaaaatcacaaacagcgcaccgatggacgtgctgaggccgccgacgagcgagagggcgagcgccaccagcacctgcgactccattggcggcgagagagagctagggcttgcagggtatcgaggcngggggaggcggggaggagaggagaggagagggagatgggggaag

SEQ ID NO: 36226 - DNA, 602 bp, Oryza sativa
  Clone ID: PAT_MRT4530_40072C.1
ctctcctctcctctcttccccgcctccccccgcctcgataccctgcaagccctagctctctctcgccgccaatggagtcgcaggtgctggtggcgctcgccctctcgctcgtcggcggcctcagcacgtccatcggtgcgctgtttgtgattttgaatccgacgcctaatcttaagatgcttgggcttctacagggttttgccgctggacttatgttgagcatttcctttctagatttggcacacaatgcattgaattctattggtttcttgaagggcaacctttggttttttgctggagttcttttctttggtttggttgtcaagtttattccagagccaactgttgtgccaacagctgatgcaggcaagaagcagactgacgatgatggttcgggtaaagatatgatgaaaaaacatcgtcggcaagtattattcagtgggatcattactgctgttggaatcagcttgcataactttccggaggggatggcagtatttttgggatccatgaagggccttcgtgtgggactgaacttggctattgctattgctttacacaatataccagagggggttgctgtagctctaccactctatttt

SEQ ID NO: 36227 - DNA, 430 bp, Oryza sativa
  Clone ID: PAT_MRT4530_40073C.1
tttgttttttgttagtttaaaggattattgttaatttttgattgatgaggttgattcaaccggtttattttattattcttactatcttcctttggaggataaaatatacttgagttctgactagcggggcaacaagtaaaaaatgaatttccaaacagaaagaaggttgaatcaaaatagccacgcaccctggagcccaaaacgatccaagggggggtgcagtaataggggggggtatggacttcagccatgaaagaaaaggcaaccccaggagcacgctgggagaaaactggcaagtgggcaaggggaccccaaagatcgtccacaccaaacagaaatgcattctggtcctggggtggactgatgaaattccaggacggtttttagaggagtttcgggaactgtgtcattgccatgaagagaacattac

SEQ ID NO: 36228 - DNA, 491 bp, Oryza sativa
  Clone ID: PAT_MRT4530_40074C.1
gccgccttttttttttttttttaaaaggcccaacttttcctttggacctttgggctttggaaattccaaaggaccaaaggaattttttggggtttggggatggggagaagcctaggcaggcagtttttgggccgaaaccccctccacagttagtatggcccacctgcaaatagtatatgggccggttaagcacaagcattagcgccttttcatgtggagtccaggaaaagggaaatttgcaaaggaaaaagggcacccgagatccttaggttttaaacctagttttagggagacccacatgggccccacatgtaagcgtgccacgtaatcatccttacctttttcccttcctttcctttcctccacgtaatcatccttatccagcggtaagtggcaaagccggccggcgggtggggaagaggtcgccggaccgacgtgggaaaggaggacgtccggcggccggcaacgtggcggcaagcaaagaggcggcg

SEQ ID NO: 36229 - DNA, 3077 bp, Oryza sativa
  Clone ID: PAT_MRT4530_40075C.1
gcttgcatgggggatttctgataagtacttgccactccccatagctgaggagtttttttttttttttttccttaccccgttctcgtttttttttttttttttaattaacctgttcaaaattttgtacattatgaactaagcttgtgaacttacagaaacagtattatgcctctttcagtacatgacatgaatacttacaacacaataaacagtgttggaatctaattcttagacactcacatttcctcattacaatacaatcacaatgcaggaatcaagtataaattacaatcttgagctttcaaaattcagaagaatataaagagaaccgtggcttgaatatgttctttttttttcagcatcagagaagcacagaggcagcaatgcagcatctacttgagagggatcttcacgtcagggttgcgcaacggcttgagccacatgtcggccatcaccctcgacgacatgctccagagcacgtcatggccggatttccccgccgccgccgccgtcctccccttcctgccggccttgccgagcccgtaggcgacgagccaggtgcatcgccgtcagccgctgcttctcgccgtcccagacgttacgccggtcggccgacttcagccggaggccgccgacgtgcatgttcgccaccttgaacttcggctcgtcgtcgtcgtcgttgccggcgattctgacggcctggatgatcacgatcgcaggcgcgccaaccggctcgtaccggcggcggcgagcgcccaatcctcgggtggcacggcggtggcgaggaggtggccgccgccccgcttgtcgctggccggtgacacgtcgaacggcgactgctcgtcggccatgtcggcctgcaccttgagcgccttgatggccatggcctcgatcttctgcagcgagaacgccaggatctcgtcgacggtcaccggcgtctcgtgggcgttccagatgccggtgtcgatcctctcctgccgcccgtcgctcatcgccgacgacatcgtccgaagcagcgacacggtctgcgccgcgctggagctcgcgccgagcgccgcgctccgcgcgctgatgatcgccgtcgccatgccctcgaaggcgatctgctccgccgtcttgccgaccacctcgtccgtcccgacgagcgccgccagcttctcgaacagggcctcgcagccgccggccagaaaggtaatcctgcagccataaaattggagccaatagaaggagctggtcatatgcctcaagaggactggccagagaaggttgtgacggccctaagatccttcttgtagagtttggcactatactttttttcctgtacaagtcacaggtaaaagtttgactataagttacaagatatgcctaaatatgcctctaacatgcaaagccgaggcggcaaaatcaatatcaggaagggatgggtaagttcaagaaattatagaactgttcttagttgagtttcctcttggttttacatattcacaagatctggtcgtttaggatgttacgttcctgtataaatgcagtgtgtatatatgcacttggtcacttggatataaatatcatgggtaaatatgtataaatgtatgtacaattgactcgagagccttgatctggttggtgatcgcctccagctcgttgatgcgccacgcgtgcgcgctgtcgtgcaccacctccttcacgacctcgtcgccggcggccgacgtgggcgcctcctccgccgccgccttctcctccttggcttcttcttccgccgcgcctttcgcttcaacgacgttctcttcttgcccttccactcctttgtccactacgtcgaactccgggaactccgagtcatcgaccttctcctccggctccggcggctctggctccttctgctcttgcttggcctctgccagcgatggcaaactgggctcgtcgagcttgaagtcgtcaatgcctcgcaagtccggcgacggcgagccctttgtcggcgtcagcttcggctccgaccgcgacaccttcgggctcgtgatgctgaaggatagcttgctctgcttccgtgcaaacaaggaagaagacgacgacgacgagttaatcttggttgctgctccggtctggttgaacagcccgacgccgccgtcgtccatgatctggaacgacagtttgacgacgagctcgccgcccttcgccttcccggcgagcggcaacgccatgtcccattgccggacacgctccccttgctggctcttgtccgtggactccttcacgaggaggctcaggtcgacggcgctccggccaaagtcgagctcgggggcttccacggccaccgccgacaggaggaacggccggggctcgaacctgagcggcttgccggtgccggcgccgccgctgcagtagaggtggcagcgcacgaagagcgtctcctcgaagtcggcggcgccctgctgcacgcgcgacggcatggtctgcatggcgccgtcgcgcgtctccttcttgcgcacggcgacggcgaggcgcagcccgttcatggacggcggcaggccctgcgccgccaccacctcgacggagaagaggcagccgagccggttcatgccgatgtgcgacagcgcgcggatcggcttccagccccatatccccttcttctctcccgccaccgccgccgcctcgccgcccggggtcgtcaccgccgcgaagctctggctcttggacggcgcgcggcgtgcccccttgtcgccatcgtcgtcgccgtcgtcgtcgtcgtcgtcgtcgacgatcgcgttcttgtcctgcttaggcctcgagcggaacggcgacagggacagccgccgcgaccgcgggcgcgactcggcccggacgacatcggcgccgccgccattgacctcggaggccgagcgaggcagcgcgagcgacgcggtccggcggttggtgtgcgcctggtacagcgtgtggctgagcgcgtcgagctcctggaggatctggttactgctcttgccgtcgtccgccatggctgcttctgctgctgctccgacctcgccggcaacgactcaccactacaattactagtactagtagctagcaagctaacctcgtgc

SEQ ID NO: 36230 - DNA, 350 bp, Oryza sativa
  Clone ID: PAT_MRT4530_40076C.1
tttattaacccggcgccgacgacgacgccacagtgggggccgggcggcgaagcgcccacgtcgacgccggcgtaatgggcggcgccggccttctactcctcgccgcgacagcggcggagggcgccgcgtccagatgggagtccaactccgactaggactaccacatatttgcggacaaccggatgtcggacaacatgcacctgagctgttacgccgcgcagggcggcggccggagcgagctataccacagatttcgagccaaccccgggagggaggtgcagctgccgtacctgtagtcggcgcccaacgcctgactcgtctgcaagtgggcgtgcgcggagaactacctg

SEQ ID NO: 36231 - DNA, 705 bp, Oryza sativa
  Clone ID: PAT_MRT4530_40077C.1
ggatccccgggctgcaggaattcggcacgagggtagcacaagtttagtacctactgttcagcttttatagctttgtactgtctttgaatcttgatgcttgcctgataagtttgcctactgagtattttgttttttgccttcaaattgaaactacatctgacaataataaaagactgtccttggcgtcgtcccaccctaaaattctttcccctgacagtgccactctctggcatgaaccaatcctgtcagcacctaatatgtagccttttggttctttctccttccaataatggttccttttggctctgtaatttcttcttctccagcctcaacctgtgtggattataattgcaattactagtttgtctaatataacctgccgacaatgtgaattatgcattaagatattgtcatgtaattaggtgcacctaacaactaaatgttttgtccttttgtcatcattagttgcatctatgtagtacaattttgttcaggatctattccttcacagtgttgatatgatatactcctaccttataaggcattatttgcttgccatctgtgttggtgttaggttcacgtgaacatacgtcccctatcggtttgttcattcctatgtatttacatgttcagttggtggaaaaactaatgaagttgatagttactccctccgtcccctaatattgacattttgctcgcactgtt

SEQ ID NO: 36232 - DNA, 246 bp, Oryza sativa
  Clone ID: PAT_MRT4530_40078C.1
gcgatttctttgcgcccatgcacgagatggtggccggggagggtctttttaactgggcggcgcctgttgagacgccgctctggaacctccgcatcaacggcaagcacaaccacgcgctcatcgacggcgccttccgcgacctcctcgacggccttgccacgagcagcgcaggcccttccttcgccaccaccgtaaccacgacgaccacaaccacgacgggatgctgctgcagcagcaccttcagca

SEQ ID NO: 36233 - DNA, 354 bp, Oryza sativa
  Clone ID: PAT_MRT4530_40079C.1
tatttctcgtgtgttgctcattggcccgttcaaatccagcctgttgtgtggctaccatgttggcctgttttgcactgaatgtgtgtgtttcagatgtttaccctttcgtggtggtttgtcacccacttggtcatcaaaatcaagagtttagaaatgacattcgtggttaaatcacactcgtgaaattcgatattctaatttcactggaggaaaaattattttgtttgtgtaatcactgaagtcttgactccatggtatccaagagaggtaagaccacatataggtacatctgtacatgcatgctacgcgctgtataaaatgttttggtgagtcgtgtcaaaaaaaaaaaaaaaa

SEQ ID NO: 36234 - DNA, 435 bp, Oryza sativa
  Clone ID: PAT_MRT4530_4007C.1
atggcgatgacgcggtggaggccggtcggcctcgaggtagcgcgccgtggcggcgcacggggtgaggcaggcgtggaggacacggtggaccgggtggaggaagagcgagatgtacagaggatcttggccatctccgagatatacagcggtgacgcctgcatgacaatcatcgagatcgccggagaagagatcgctcgacttgaggcccgcggcgtcggcgtcagcgccggctgcgaggcaggaggtggtggatcgacagacatccgcgcacgtgcgtgggccggtgataggctgagttgggctgcaactgggcccaaacaagacacgattctattcgtggccgagatcagtgagcaggacgtagcactgagaaaagtctatttgggctccctcaactatgtaccacaatcagcaaaggataatggtttaagctga

SEQ ID NO: 36235 - DNA, 673 bp, Oryza sativa
  Clone ID: PAT_MRT4530_40080C.1
ctgcaggcgcagttttaacttaagagagctgaagaacctgaacaaaataatgggtaggttgcgaataatcggatggggtaatttatctcatgtccaagatgccaacgaagctcaactaatgaataaaaagcacatccagtttctagaattgaactttagtgaaatggagtgccatcacagcatgccgctgcaattggacgtgaacattactcctgaagaagtgcggtatgaaaatttgcagtaccaggactcgcagcaacctgaaaatgttacagtaccacacaatcaaatacttgagagcttgcggccacatgaaggcctaagaggactgagaatatctgcttacaattgtcagagctatccccgctggctgggtgatgcctcattttcaaagctgacttacatagaaattaacggtacaaataaggtaatgcaacaatgtgttccaacacttggtgagctacctttccttgaatatctcaggattgggtggatgtctcatgtggaacacattggaagggagttttgcacccgtattcctagcaacaaaggcttcccatcattgataaggttggaatttagcgatatgccccagtggtccgagtggtccgggctagatgatggagatttcccaagcttgtgtactctgagcatcagtgattgcaatcaacta

SEQ ID NO: 36236 - DNA, 291 bp, Oryza sativa
  Clone ID: PAT_MRT4530_40081C.1
atgaccaggaggttgggtggcaatggtggcgctggcgcagacgccactggtgcaggcctagaggcaaggtgcaagggagtggtggcagtgcaaagggagctggcagcggttttcctttggccaaaattggtgaggaggccagcgggtggtgggacagaggagtcctgggccagctctaggggtggcggcaaggtgctgcaacatgtgtggaagtctgtcggtggaggtgtgccggtgcagtggggtggaggcctcatgctgtcactgccagtgcggtggtttctaagctaa

SEQ ID NO: 36237 - DNA, 158 bp, Oryza sativa
  Clone ID: PAT_MRT4530_40082C.1
aacacttgctcgaccaagttcctccacgaagccagaagaagctctgcatggatgacaggctaacaccatgccttgatatctgggtacataaacttggaatggacagggtgcggttcagggagtttgcagcacaattggctgctattccgggctcctaa

SEQ ID NO: 36238 - DNA, 1475 bp, Oryza sativa
  unsure (1)..(1475): unsure at all n locations
  Clone ID: PAT_MRT4530_40083C.1
tgcaggaatcggcacgagggagagagatcttgtctcttttttttaaaatgaagctgataataattcataccaaatgactcattcacactttctacatggggtgtatttttatgtacattgcattacaatatcatcaaagagaacatgatttgtagctaacacatccataccttgcatccttcctctctctttttccttttttttttcagctaggatgccggatgattctctgtagcacgacggtccttgcccgacgaatatcccggctacaccgatctgcctgctctcctagatcctctacactcttcatgaagacctccagcttcttcttgatctcctcaaccccaaacttgaccgcctcctcatctcgctcagcgaactctacgcagtcgatcatcgagctgatctccaactccacccggttgatgagcaccctgatactgtccaaatccttgatggcaatgaacgtccccacctgcattgcgctcaccacctccttctgtccacggagagcgtcctgataccctttcagtagagaatcgatccacttccccatagatcccaccggaatggaagcagctgcggccaatgccgccgcgactggtggggcagcgatggccgcggcaaccaccgagcagatgagcacggccgcgaaggtggtggcgaagatgatgctcgacacacggcgccacgccttgatcgccctgaccttcttgtcgagccggtgtttgcgctgctgcagcttctccagcatggtcagctgctgccggtacacggcctggaaggcgctgaagaactcctcggtgaaggggtccccggccgccttgaactggcgcagctcgtggagcgtgcgcgcgtaccgggcggagggagcggcgtcctcctggccggcggcggcggcgtcgttgtcctcctcgtcgtcgaaccgctggagcgcgacgtgcaggaggagctgggagtcgcgggcgcgcttgaggcacttgtcgagtgcggtgcagaagtcgagggtgtggaggctgctctcgaagtagtcctcgacgaggtcgaacagctcggggctcttccagatgtccttcttgcagtcgaggatgacgcgcaccacctcctggttcatgtcgaggaggcagccggtgacctcgcggagggactcgagggacagcgaacgcacctccacgcccaccgccagcgtcgagatggcgcggctcgtgcgccgctgcagcgtggtgtcgaacgtgcgcagctccgggtctgatcggcacgccgcctcgtacgagctcagctcctccgccgccgccgccgcgggcggcagcgccgactccgagctcgccggccggggaggccggtggctgccgctgctgctgctgttccccattgccggaaggaaaccgggcaggcgtcgctcacagatcagacctccaccggatctttgtattggatttttggggaaagtaacaccaagatcaagaaacgaaang

SEQ ID NO: 36239 - DNA, 349 bp, Oryza sativa
  Clone ID: PAT_MRT4530_40084C.1
aggaggcacccaaatgctttgaatttattaaatcacacacacagaaaggattaccgcgcgaggccacacaaagaggcatgccccacattataaccgaggaggcaagctctcgcatcggagggggggaatagcagccgaactgaaacccccagaagagcttggaccctggagccccttccttggaggcgcgcagtgcactcgctcacacacatcatgggggagaccggaagatggcactctttcctgcataggggtttaccactatggctggggttgagccgttttcttggtaagcacatccgtcggtgtgcaccgtctcgacaaaaccgtaatttttggggcacaaaaa

SEQ ID NO: 36240 - DNA, 1246 bp, Oryza sativa
  Clone ID: PAT_MRT4530_40085C.1
gcacgaggcccgctgcgtcccgttcacaccaccaccgtctcgtcgcctcgtcggcggcgtctcctccgcgcgagggtccccccccaaaccctagccgccgccattgccacgcgcgcgccccccaccccacgaatggaaggaggcggaggcggaggcggaggcggtggcggaggtggaggtggaggaggcggaggcggggcaccgtacgccacgcgcacggcggaggaggtcttccgcgacctccggggccgccgcgccggcatgatcaaggccctcaccaccgatgtggagaagttttacaagctctgcgaccctgaaaaggagaacttgtgcctttatggatatcctaatgaaacatgggaggtgaccttgccagctgaggaagtgcccccagagatccctgaaccagcattgggaatcaacttcgctagggatggcatgaatgagaaagactggttggcgttagtcgcagttcacagtgattcctggttactgtctgttgcattctactttggagcccgatttggttttgacagagaagcaaggaggcgactctttaatatgataaacaatttgccaacaatatttgaggtagtgacaggagccgctaagaagcaggcgaaagaaaagactcccaacagtagtagcaagagcaacaagcctagttcgaaagtgcagtcaaaagctgagtctcgttcgaaatctaagctgtcagcccccaaggatgaagagggaagtggtgatgatgagggagaggaagaggaggatgaccatgacaacactttgtgtgggacctgtggaaccaacgatggcaaggacgagttctggatctgttgcgataactgcgagaagtggtatcatgggaagtgcgtcaagatcacacccgctcgtgccgagcatatcaagcagtacaagtgcccggactgcaccaacaagagggcccgggcatgagtaacaagaagctgtgtcgaactgtgttagagtggagttgtcaatctccggatgtcatgatctcttagatattatcttgccctagcttttctagtttgtaagcttgtctctaatttaattttaaactgtaactgttgattaacctacctgtgtttaaagcttcatctttcctgtgttaattctagcattcatagtgtgtaaacttgcacatcttgtgtcaactgaagcctgaaggtactgcggctcccctgacccaaaaaaaaaaaaaaaaaaaaaaaaaaaaaaaaaaaaaaaa

SEQ ID NO: 36241 - DNA, 315 bp, Oryza sativa
  Clone ID: PAT_MRT4530_40086C.1
atggaaaataaaggtgtcggtggcgtcgagggagaccgacagcggtctcgcgcgcacaaggcacgacaccatgggcccactgtgctctacgaggctccatcgctctcgctcaagcggagagtgataccgtcaccggtctcacgcgctgaaagcgcgataccacgggcccactacgctcccccacgcctcgtcgctctcgcgcatgcggcgtcaccggtctcgtgcgcgcaaagcgcgataccgcgtgccgttctctatcacgtcacgctcggtctcgcgctttcggattacgagaccgacctcggtttcgcgtaa

SEQ ID NO: 36242 - DNA, 2322 bp, Oryza sativa
  Clone ID: PAT_MRT4530_40087C.1
atggccggcggcgtgctggccacggtgcggtgggcgacggcgtgcgcggcggtgctgaacgcggccgcggcgtccaccgggggggcggtggcggcgctcgccctccgcggcggcgggggatgcggaggggcgctcggcccggccgccgcagccgcgtccgcggcgtcggcggcgaggctcgtcgcgtccgcggtggccgggttcgcgcagggcgccgccgcggccgccattgccgcgggggccatcggggcgcacgtcgacagcgaccgcgacctccgccacctctcgcggctgcggtacaagagatggctttggtggacaaggtttggggtggtcattactgtgctgcagtttgttttagcactttgtttgttgtgtattatagtgaaggatttctctgctgggagatcttcaaaacagtgcttgtcaggacatgaccaagacaacagtaactggaagcacactctgttaataagttttatcgtcatcatgtgggtggcaactatagttcaatgttctactggttctgatgtattaaggtggaggagtgtattagaagaagatgatatatgtgttgtggcaaaattattgggtgatcttatggcttatcgcgcatctggaactggccaccttgagcttatagcagggttttcattgttgcagaaatttaagtcatccgcagttgtttcaaaagaacaagcagaggctcctcaggatctcattaaagaggctgttctctttcatccatttgctgaagctgcctatacaggaccacttcttgattttggaaggaatccttttatgtttccatgtgtttggctcaatcggcagggtgttatgacaccatggacccgtgctaggcgaccagttcttgaaggcgataattggtggcgagggcatgcagctgctttcctaaaatatgtcagtgtacccccggaagttcttataaaaggccgtgttagccaggcaagacgtgaggctgcctattttgttgttgtcctgcacgatttgaaaacgttagtcattgccatccgcggaactgagactcctgaagatgttataactgatggcttgtgtagggaatgctctcttacggtggatgacttggatgggctgatcaattctgatcagttacccctacaagttaaggatgctgtcatctcatcctttccacaccatggacatgctggaatggttgaatcagctcgagaactgtacgctaagcttgaagggctgcccatccatcaagataaaccagatgcagtgccagctggattcttatcttctttgctcggcgctggatgtgagtgccatggatacaatattgaaatcgttgggcattctttaggaggttctgtagctgcacttcttggtatcagactgtatggacgctttccaaaattacatgtatatgcatatggagcagcaccatgtgtggactatgtgatcgcagaagcatgttcacagtttgttaccagtattgtccacaatgatgaattttctgcccggttatccatgaattcaataattagattacgtgctgctgctgtgagagctctctcaaaggatgctttgccgaattccgccaaagttggaaaactagttgctgggatcgtgaggacgaagggatacaatcgaaatgttgcagatcatcgtcagtctactggtgctcttcagatagtcaatgaggcaaagctaagaaatgatcaaatccacggaaataatctaatgcacacaattagaggtggtgtattcctccttggtaaagcgatatcttgcttggtaaatactccaaaatatcgagtgagctccacagcagcaatcaactatgagttggggagcagatctagaatgaatattcttggtgatagagggaactgcatggctgcttcctgcagtgttctggatgttcctcattttggagaacctagtaatgcatgcggaaatgggaagtcttctgaagatgatctgaatgaatgtagcagggaatacaggctacctcattcaaatgatggcacaaaactctcgattgatcctaatgatctgcgtacaataagtttgcctgaaggacaatcaccggaggtgtatctgcctggtctcgttattcatcttgttccagtaaagaatcatacctctccatttcagaagacacctgtgactcgacacaagagtcgcaagaacaagagttacaaagcatttatagccaatcgacaagattttatggaccttgttgttacacctcgtatgttccttgatcatcttccatggaggtgccactatgccatgcaaagggttatagaaactcggaaaagggcatgctaa

SEQ ID NO: 36243 - DNA, 3003 bp, Oryza sativa
  Clone ID: PAT_MRT4530_40088C.1
atgacttaccttggccatgctcttgtgctgctgctcttcttggcctctcccaccagttcttgcaccgagcaagagaggaactcactcatccagtttctcactgggctctcgaaggatggtggcctgggcatgtcatggaagaatggcacggactgctgcgcatgggaagggatcacctgcaacccaaacaggatggttactgatgtgtttctggcttctagaggccttgaaggggtcatctcaccttcccttggcaatctcacaggtctgatgcgcctcaacttgtcccacaacttgctgtccggtggcttaccgctggaactggtgtcatcaagcagcatcgtggtccttgatgtcagttttaactacatgacaggaggcatgagtgacctgccatcttcaacccctgaccggcctctgcaggtactgaacatatcaagcaacttgtttacaggaatttttccatcaaccacatggcaggtgatgaagagtcttgtcgcgatcaatgccagcaccaacagctttactgggaatataccaacttcgttctgtgtcagtgcaccatcctttgctttgcttgaacttagtaataaccaattcagtggaggcatccctccagggcttggtaattgctccaagttgacattcctcagcactggcagaaacaatctcagtgggacccttccatatgagctcttcaatattacctctttgaagcacctttcttttcctaacaatcagttagaaggatcaattgagggcatcatgaagctcataaatctggtcacccttgatctcggaggaaataagctcattggtagcattccagattccataggacagctgaaaagactggagaagctccatctggacaacaacaacatgtccggggagctgccatggactttgagtgactgcacaaaccttgtaaccatcgacctcaagagcaacagcttcagcgggaagctcaccaatgtcaacttctccacactgcccaatctgaaaactttagatgtcgtttggaacaatttttctggaacagttccagaaagcatctactcatgcagaaatctaactgcattacggctgtcttacaatgggttccatggccagttgtcagagagaataggaaatctgcagtacctctcttttctatcaattgttaatatctctcttacaaatatcacaaggacaattcaggtacttcagagttgcaggaacctcacctccttactcattggtcgcaacttcaagcaagaaacaatgccagagggtgatataattgatggttttgagaatcttcaggtcctttccctggccaattatacccgactggatcagcagtctaaacttcctcttctatctagattatcgagcaacagcctttccggagaaattccaaaagccttaatggagatgccaatgttcaaaacagataatgttgaaccaagggtctttgagttgcctgtttttacagctccattacttcaataccgaagaaccagtgctctcccaaaagtgctgaatctaggtatcaataacttcactggtgtcatcccgaaggagattggtcagttaaaggcacttcttttactcaatttgagctccaacaaattctctggagggataccagaatcaatctgcaacatcacaaacctgcaggtgcttgacatatcaagcaatgacctcactggtccaatccctgcagcattgaacaaactgaacttcctttcagcatttaatgtatctaacaatgacctagaaggatcagttccaactgtaggccaacttagcacgtttccgaattctagctttgatggcaatccaaaattgtgtggtcctatgcttgtacaccattgtggttcagataaaacatcgtatgtctccaaaaagcgacataacaagacagccatcttagcacttgcatttggtgtattttttggaggtatcaccatcctgttcttgctagctcgtcttattctcttcttgaggggcaagaatttcgtgactgagaacaggagatgcagaaacgatggcaccgaagaaacattgtccaacatcaagtcggagcaaaccttggtgatgctgtcacaaggaaagggagagcaaaccaagctcacattcactgatctgaaggctacaaaaaactttgacaaggagaacatcatcggttgtggaggatatgggctagtctacaaagctgagttatctgatggatcgatggttgccataaagaagctcaacagcgacatgtgtctgatggagagggaattcagtgcagaggttgacgcactctctacagcgcagcatgacaatcttgtgccgctgtggggttactgcatccagggaaactcaatgttgctcatatattcctacatggagaatggcagcctggatgattggcttcataacaggaatgatgatgccagctcgtttcttaactggccaatgcggctcaagattgcacaaggagcaagccagggtatatcttacatccatgatgtctgcaagcctcaaatagtccaccgtgacatcaagtgcagcaatgttttacttgacaaagaattcaaagctcacattgcagattttgggctatcaaggttgatccttcccaacagaacccatgtcacaacagagctagtcggcactttcggttacatccccccagagtatggacaagggtgggtggctacattgagaggtgacatgtacagctttggagtagtcctgctcgagctgctcaccggaaggcggcctgttccaatcttgtcttcatcaaaacaacttgtcgagtgggtgcaggagatgatatctgaaggaaagtatattgaggtcctggatccaacactccgaggcacaggatatgaaaaacagatggtgaaggttcttgaagttgcatgccagtgtgtaaatcataatcctggaatgagaccaactatacaagaggttgtctcctgcctggacatcataggcaccgagctgcagacaacaaaactcaattaa

SEQ ID NO: 36244 - DNA, 644 bp, Oryza sativa
  unsure (1)..(644): unsure at all n locations
  Clone ID: PAT_MRT4530_40089C.1
ccacgcgtccgattattttggatatgcctttccatctgatatgttcttcattcattctttctcttgggtatgttttgtttatctgctcaggcttctctttagagctggatattacttttctactggtcctttcggcaaattctggatcagaagaggatatgatcctcgaaaagacccagactcacgaatgtaagcatgggcctccttttgtaattgttatttatttggcacctttttccattgcattattatagacagaaaaagtgtgttttgtacgtaatgcttctcatgttcccctttttagatggaagcataaaagtgaccattgattaagataataatagaataattaagtacaatgcacaagtgacaagaaaaataatgtgtcttaccagatcattctccaagtgaagcacagatttctggatcggtagcaatagtgcttctgcctttgcaatctgcaattgtatagtttgatgattttttttagatggattgggttaatcaggttacggggaaactggcaggccagttaattggatctggatgccagtttattggactatatcatggctaacatcagatgattttggatcagcatangctatattccagctaacttgtcaanacactgctctgatcct

SEQ ID NO: 36245 - DNA, 522 bp, Oryza sativa
  Clone ID: PAT_MRT4530_4008C.1
ggccaagggctaccccgtccaccccttctccgtcgatttccgccgccgaaacccactccacaccgtgcgccgatcggggccgtcggttcggctgccgcgtggccgccgcgtggtgcgccggttttccccggtccgtggactcggtccgccgtggaccgccctcccgagtcactgtcaggtggggcccgcatgtcggcgccgccctctctctcgtcgggatttaattattgcgcaataattcaattaagtagtcttatagcctgtttgcattgtttgccttgtatgtcgttagattccggcttttccgacgctccggtgtacttcgagatagtcgccgaggttcctccagcagcaaagcaaggcaagtcatgcttgtcacttgaccatgttaatcctatattgcaaatgtcctaatgcaagggtgggcatgatggagcgggacgggccctgcgacggcctctgtcgctttcggatccacctaggcacgagaggggactgcccgtcgcccgctggggacggggg

SEQ ID NO: 36246 - DNA, 696 bp, Oryza sativa
  Clone ID: PAT_MRT4530_40090C.1
gagggaccgagcccgagcactcgccgccgcttcaaccgccgctccccgcaacgacgccccccccaccagcgaagccatagacaagttggtctcatgaattcaggaagcacattggcatccagagtttcctgttcatcgggaaacaacggcatcttcccaccctgccttctcccaggattcctgggattcccagttgtgtttgtaaacttccacttgttcaaggccattgttcgcagccctgcatcttctgttgtgttgggaatctgtggagggcgccttccatagagaggtgccccataagtcttttgtttagttagtctgggaactggcatagctggaatttgtggtgcaaaacatccttggcatcagtagtctacactgctgaatctcaggttcctgaagatggtttcctctgaaataagctctgttacaacaacccatgcacaaggtcccaagctctttagagggaagatacttctgccaatgggccctccagatgtcgtgccttctgagaacgttgagttcgatttttctgatgtttttggtcctacagcagtccagactcccacagatctgagcatcctcactccagacagtcctgcacctttgactgagtccagtgaggggatttacaatgaccctttggttattgtcaagagatctcattctcttgttggtccaagttcacttgttagc

SEQ ID NO: 36247 - DNA, 2451 bp, Oryza sativa
  Clone ID: PAT_MRT4530_40091C.1
aagactagagactcaatgggtcttatattggtgtggatagcacagttccaggaatcaaaatacattagctgtatcagacacctgcgactggtgatgcagaacaaactagctagctagttaatgttgatggccaccatagaggtgaagaggtgctgcaagtgctgacatgaaaccagcaacattggtcatttcgaaactagcaacattggtccataccaaggcctacaatcagctaccaaacaacaattatctgcaagctaaactgccaggcgtatatacaaaatccaccatcctcatcctataccgagcggattccagatagatcatcaaaaatgcagaatggagcccacattttcaaagaggatataatcgatgcgcaggctatggaagttgctcaacggacccttctcttgctctcaggagtccttgactcgttccctttgagaggtggtgattcaaactctaagccagccacacctgaaaccaaaccgtctctgtcatagacgatcctttggcatccaggatccaatgtgggaactaccacgcgacctgatctagttcttctcagtttgagagattcaggtgttgaaactgatgatgacttggccttgccacgggtaagaggagaataatgtccatatggaattggagttctgatcattggcgatctagtagcgccctttaacatgaaatgctcagatctctgctcctgtgctgagcctaaatgctgattacgcaagctaggagcaccatctggaattggagttctgatcattggcgatctagcagcaccttgtgacatggactgctcaggtctctgctcctgtgctgagcctacattctgcttaggtgatctaggagcaccctgtaatatgtcacactctgatctctgcacctctgctgggcctacaggctgcttttccaggtaaaagttatcaagcctattataaatgtgcatcatgaggagcacaactaaaatcaatggtagaaacatgctaaatatgaattcagcatcatgaatataagaaggaagtatgatgtttctatttcccagggactccacatctgaatgaactgaagttgaaatgtcttcatttggtactacctcctcgttcaatgtcatgtgctgagctatttccgggaaaccttgattttccaagcaattattgctattacatgtacttatgggtagaatattgtccaaacaactgtctggggagagattagccctttcaggtagcacggtggctaaaacctctttagatccctgactcactgcactgccagcattagcacttccatctcccatctcacagatcatattatcagtggacatatcgaaatttgaatcggagttgacaacatggctgccaacctcctgatgttctgcatctgcatggataaattcattctgattccctgactcagtggacataccgtaaattgaatcagagttgacaagatggctgccagcctcctgatattctgcatctgaatggataaattcattctgattccctgcatcttcagaagttttgtccctagtagtttcttctatagaagtcaaagatgcactaagatctatattgccatgacccctttctttagaaaagctcttcacgaccaagtctatctgctgattacccaccttgttacatacagctagagatcctgtactgccttcgttaaaagcagtagtcttttcctttgctgaaatgtcaaggtcgcaggtgtattcctcaaatcttggttttttgtttgacaaataggaacctttttcaaaggaatcagcatcattacctgaggaacttcttgagttgttaagaaggttcgctaggaaagaagatccaactttatcaataaagtttcctatctggaatcgctccaaataaaatttagttcggccatctcgtgaaatgctagtgtaagaacagctctgttgagatcctaagttgtaactctcccacaagcatggaaatccagtcatgaatttttcgcagacctcaagcgaatatccattattttccatttgcgaaaggtccaacgggccatcaattaacactatgatgctgtcttcagcttcaagcatacaagccttatgccgttttacaatgggtgcagaagtgaatagatggggtttgtggttcctttccgtgtggccggcgatgcggaccttccggtcgtccccctccaccctcttcagccaccaatcgaacagctccacgcaggggtgctcctcgcagtcggaggaggaggagggggaggggacggggccggcggaggcggaggcggaggcggcggtggcgcgtagagggttccgcgagaaggaagggctgaggatggtggccggctgcggcgcgcgccggcgagggctcgccggcggcggcggcggcgggggggtaggggtttgggagggttcggtgcccatattattttttttctcttttcttt

SEQ ID NO: 36248 - DNA, 996 bp, Oryza sativa
  Clone ID: PAT_MRT4530_40092C.1
atggaggaactggttttacctctgaaattgatgcccttacacaccaatggccggttgtatgacatgaggttgtcctcacctactgctacctgtgtgatcaatagttcatctggttcattcgacccgatctaccgagcttggacgaagaagtatccttcagctctaaatgcctttgaccacattgttgcctatggcaaagggaagaagatagcgctgtttttggactacgacggtacactgtcgccaattgtcgatgaacctgacaatgctatcatgtctgaccagatgcgcgaggtggtgaggaatgctgccttgcatctacccactgcgattatcagtggaaggtctcgtgataaggtgtttgattttgttaaactaacagaattgtactatgctggtagccatggaatggacatcatgggtccagttggggaacatgattcagttactaaccataggagctccattaactcaaatagaaagcagggcaagggagtgaagatcttccaggctggtactgaattcttaccaatgatcaatgaggtttttagattgctcatcgataagacaaaggcaatcgacggtgtgaaaattgagaacaacaagttctgtgtatcggtgcactaccgcaatgttgaggagaaggttttggaaattcgtccagtgatagactggaacaaggggaaggctgtggagttcttgctggactccctagatctagctagctgtaaaaatgttctccctatttacatcggggatgattgtaccgacgaggatgcttttaaggtgcggaattctgctttcattcagaaggttcttcgtgacgataaaaggggtttcgggattctggtgtcatctgtaccaaaggattctcatgccctatattctctgattgatccatctgagggtagatttctgaattctgacaaagagaataagcagaagggcaacagaattaacttggacatagtggacagttgtacatcatatagttaa

SEQ ID NO: 36249 - DNA, 420 bp, Oryza sativa
  Clone ID: PAT_MRT4530_40093C.1
cccagcgtccgcccagcgtgcggggggactgctattttgagttgtgctcgcatggttgaattttgatgtgtttaactgtatgtgaacatggtgtatgcgaatctgaaaatatgtgaaaaaaaaaaaaaaaaaaaaaaaaaaaaaaaaaaaaaaaaaaaaaaaaaaaaaaaaaaaaaaagaggggaaaaaaaaaaaaaaaaaaaaaaaaaaaaaaaaaaaaaaaaaaaaaaaaaaaaaaataaaaaaaaaaaaaaaaggggggcctttttaggggtccaaatttttttccccgggttttggagagttaaatttttttttttggggcccaaaaaaaaaaaataggggcccgtttttaaaaaagttggactgggaaaaaccttgggtttcccaaatttataggttttggaaaaaatccctttt

SEQ ID NO: 36250 - DNA, 258 bp, Oryza sativa
  Clone ID: PAT_MRT4530_40094C.1
tcctttttttttttttttttgtaccaataccccacatctgacttgatatacggaagagctcatataataagcttccatcataccgccgagaatggggaaggctgggcaattctgaatgcttacacttcccaagagaatatatttgttcgctcagacaacagtaccggcgagcgatgaagtcggctgcttttttggtgcgatatacaaagccatccactgggaactggaagcgccactccttcgggaagcgcccccccc

SEQ ID NO: 36251 - DNA, 294 bp, Oryza sativa
  Clone ID: PAT_MRT4530_40095C.1
atggagcctggaggatcaggggcgcgactcgaggctgggattcctcctcggctcctcgacgaatcggagaattggtgcgtggcgtcgcggccggcgagggagacgacgacgacgaacaagaagaagaagaagaagaagaaagcgcgcggcgcgacggaggcaggcaggcacgacgggacgaagctgcgaggcggcttccgctttccgatgatgattgtcactttggcggtgctgccgactgacaagagtgacagtggtgatagccacaaggacagatccaggtacatcatctga

SEQ ID NO: 36252 - DNA, 126 bp, Oryza sativa
  Clone ID: PAT_MRT4530_40096C.1
atgacgagcctcccaccgcttttctctgtcggcgacgaccaccgcgactcccccatcccgcacggtgagcccaagatgctccttgtcgatttcatgggcatcatcgatgaggaggaattggattag

SEQ ID NO: 36253 - DNA, 618 bp, Oryza sativa
  unsure (1)..(618): unsure at all n locations
  Clone ID: PAT_MRT4530_40097C.1
ctcacgttttaggcatgcacgagctcttgaacacggaaggacgttcttgaaagggataggtactgctgatggatctacatactaacctgcatcactaggctctgtactgaacaacaaccgggacgacgctgaaagactagctaaggctcagtccctgattactgatatgccacttgaccccagatgcgtccggtacggaagaccttttcttttatcatggaggatgcatggaaacattcacattgctggagcgagcaccctagaaactgcttgattcacatccaaatgatatatcctcttgcactaatggtgactaaccttcatgctgcttgaatacggcggaatgatgccgctaaacttaacagtatgctctcagatcggggaggaaagaaagaaccagtgccgctagtggatggatatcaacgtgaagatacctgttatgctctctcaagagtgggcgcgctaaatactaagactctacatggcgcattatcacccatcttggtcctgcaatctgaaacgccactgcagtcacaaggcagagaaccgtgtacaggctaatcttagggtaaactatactgctggacacgtanatttgactgaagacttatataggtg

SEQ ID NO: 36254 - DNA, 537 bp, Oryza sativa
  Clone ID: PAT_MRT4530_40098C.1
tcacccctttcctcccctcgtggtggtaatggtgtcagcagctcctgcgggccagattcggcgttcctcagccccctcccgcagatccatcggtggcggtggcatatccgatgggtggatccagtgaaggcagtggcagtggcgtcggtagctcccgctagcggatcttgcggagttggcggcggtggcgtttccgacgggcagatccggcggaggcgatagtggtggcgttttcggcgactgaatctggcggttctctaccccctcctcctcatcctccgcgcccaagcttctaccgtagcagcggcggttgcatcggtgctcccatgggcatatcctgcggaggaggcggcgacggcgtttccggcgagcagatctagtgatctcccccttcgccccaaccttctcccgcagatctggcgatggcgatgacttctccgtcggatctaacggccgcggcggcgacccgcggacggatccggtagatttcttgtttgtgttgtttgtattgttcattgctgtccggttagcctccat

SEQ ID NO: 36255 - DNA, 590 bp, Oryza sativa
  unsure (1)..(590): unsure at all n locations
  Clone ID: PAT_MRT4530_40099C.1
gtagatgtttggagtagctgctgtgaagctagcccacaacgaagtaaagtagtcagtaaaaaagaaagagagtttagagagagagagagagagagagagtttaggtgtttggggggggggggggggngccccgctctgcctnccccattntcgaaccattgcctagcntgttgccctccgccgcgcgcgttgcaccccttgccgttctttctgcgtngngnnnttcccccgctccgaccccttcccctgcntctgcccccccccacgcgccccggtcgctcccgctctctcccccccgtcctccccacccccctccnnccccccccccccgntncccccccccctccgggccccccgctccctccccctctcttcccccctccccccctctccccccccccttccttccccctctctctcttctccttcccccccccccccccccccccccccccctccccccccccccccccccccccccccccccccccccccctcgtcccccccncccccctcccctccccnccctccgcgnccncccctcccccccctcccccccccccccccgccgccccccccccccccctcct

SEQ ID NO: 36256 - DNA, 775 bp, Oryza sativa
  Clone ID: PAT_MRT4530_4009C.1
attttaatttaaaatcggatttattgcgtcagccgaggggaggggcgcgcggaccgggtccacgggagtggggcccacgcggcagcctcacggtccacggtggaccgggtgcacgcggcttgcgccggccggcgccgtgggtcccacgcgtcagccgcacccgagggcgcgggcggctgacggccgggccccacatggcagccacggggcgcgcccgaaggcggcctcgccggcacggccgatgggaggcggcgcacccgcgccccgatggtcgccgccggcgaccaccggcgcggcggagcggcgcccgagagaggggagggaagggggaagtgaaacggcggtccacggctcaccccgggtcgacggcgacgacgggaacggcgaccggagcggaaaaaggcggcggcgcggctcgggtcgacgaggacggcggcgttccggcggtcggcgaccgaaacggaggggtggacgaggtcggcaaggacgcggcgaagccgaaggaggcggcgccgaagcgggagaaggtccggggcgacgacggcggcggaccggagctcggcggcgacggcggagagagagagcgacggcgcgagctcgattccggcggagagagagggcggcgagcggcggaaacggtggagagaggcacggggagcgtttatatagtgttgggagtgagagagggcgaccggaggggaaggaaaccggcgcggcgatctcaggctccatcaatggcgccgacgaggtttgcgggagcatttccaaacgaatc

SEQ ID NO: 36257 - DNA, 254 bp, Oryza sativa
  Clone ID: PAT_MRT4530_400C.1
gtttgctggcgtctacttgcgatcagactcaagctcaagcccaagcatatgttggccctaaacttcgccgtccatatggcggtatctacccaagctacaactctgctccctgtagcattcccaccgtcggtggtatctggtactgaattgtagcagtatagtagtataggagaccaaagtcatgcatcatcgtgtgtgacaagttgaaacatcggggtgatacaaatctgaatgaaatgtcatgcaatttaaac

SEQ ID NO: 36258 - DNA, 151 bp, Oryza sativa
  Clone ID: PAT_MRT4530_40100C.1
gatacgtttgagacggatcaagaaaaacatcaggaggaaatctgtggattcgagccatcgagctaatcacaggggtgaaagacggggacgaatacagctaggcgccgtgtgctcttgacatggaatgccactctattttcttcgtttactt

SEQ ID NO: 36259 - DNA, 667 bp, Oryza sativa
  Clone ID: PAT_MRT4530_40101C.1
cccacgcgtccgccagggaggccgaaaccgaatctgccggcgtcgccacgccatcgtacgccacttctgcctcaggatgccacggtctgcaggcctccgcgcggcgcgtgtagcaccacagcgccgcgtccgcccacagctcaccggaggctcgttgacgctgcccccgcgcgcagcaccatgatgcagttgtcgcccacagctccactcgccagaggctcgtcgtcgcggccgtcctctcgcattggggaggccggatctaggcgggaaggggccagatctggcaggggcgctagatccagcattgccgcctcgccatcgccaccccagtccaccgtgacgccgacaccattgctcctcttcaacatcggcggccaggccgtcgcgccgtcactcctccttgcatccgcctgtcgccgctgcggctgtcgccggctcggagctggccgaggtcgttggcgccgaccctgtgcccatggaggagagagagaggccttgccgccgccgtccttgcaaccgtgtggttgccggcggcccgctcgggtagcggcgaggcggagggagggggtgggggtggtggcgccgcggcggcggtcgcctcccgtatcgcccctgcccctagagcgacacgggggaaagaaaaaatagaaaaaatcggacgcgtggg

SEQ ID NO: 36260 - DNA, 565 bp, Oryza sativa
  unsure (1)..(565): unsure at all n locations
  Clone ID: PAT_MRT4530_40102C.1
ggactttnttntnttttttttttctcttctaataagtttatacaactaaagtttacatatctatagtttatccacctaaagtttgtaaagcgaatgtttacttttagtaagtttatacacctaaagtttacacatctaaagtttatcaacctaaagtttgtagagcgaatgtttataagtcaaaatttatatacccgattcaaattcaaattcagattcaaatattttatatatagaatatttctatacataaagtttatgcgtgcattattttcctctttttagtaagtttatgcacctaaagtttacacatctaaagtttatccatctaaagactaaagagttaatttttataagtcaaaaatttatatacccgattcaaattcaaatctggattcaaatattttttatatagaatatttctatacataaagtttatgcgtgcaaagtttacggtataaagtctatgcacatgaatgagagtattagattttttttctaatttttttactaactttgtttttttattgaaatttatgatgaaaggaggggagaggattggggg

SEQ ID NO: 36261 - DNA, 274 bp, Oryza sativa
  unsure (1)..(274): unsure at all n locations
  Clone ID: PAT_MRT4530_40103C.1
aggcaacgtcagcttgtaagctggttgagcttccgttcgtgcacagaagtncgcccccccgagacgggtacaaccacattttatatacttcgtcattcactcacgcgggtcacaggaatcctgacatttctgcggaccacgtacgtacagagaccgcaccgtgttcacacaggctcactgttctagagagtcacgcatatgcgccaagctagctggcttacctgaaagggctgcaagatgctggcaaaaaggccgtggtagcactcacttgccg

SEQ ID NO: 36262 - DNA, 909 bp, Oryza sativa
  Clone ID: PAT_MRT4530_40104C.1
atgtcgcagccgacgcagcagcagcggggattcggattcagcggcgttggagctgcggcggcggcggcggcgccttcgcctcgcgggatgccgatggctgcgggggccgcggggccgcgtcgtctcgccgtgcagcagaagcagaagcagccggcgctcgtgccgccgccgccgacgcagcagcagactcagggattcggtggtgtcgggggggctggagcggcggcgctggtggtgggatcttcttcgtcggcacgagggatggcggcggcggcggcggcggagtggatggcgcacgaggacgcgtggagggcgtgcaaccgggatttcgcgactcccttcgcctccgtcgaggacgccatcagcaggctgcttccgtaccacgtgttcgcggagtacgaggaggacgagatctacgtggaggaccagccgccggcgaaggacaagtcgagcgtgcaggagtgggatgacgaccacgaagccgaggcgatccgcatggccgaggagttcgagaagcaggtggtgaccttcaacgtcgccgtcctgaagtccgccgccggcgccgcccgcgccgaggagcggctcatggtggagaacctcctgctcgcctacgagcggcggcagtcggagcacgtccgcgccctcgtccggcagcagcagctggtggccctgcagaagcagcagcagatgatggcggagcagcggcagcagcagcaacagatgatggcagcgttgcagcagcgccagcagccggcgacgatcatgccggcgcaggggcatcccgacgcgatggatttgttcctggatgcgtacgccgccggcgagcagtcggcgtacagctggatgacggcggcgcatgccgtgccgcagccgcaatcgcagccgcggcaacagcaaccggatgcatga

SEQ ID NO: 36263 - DNA, 605 bp, Oryza sativa
  Clone ID: PAT_MRT4530_40105C.1
cgactttctttattttctccacaacatatattatcagctaaacgttcacaatcacaattattattttatacatttcttctcaacatatccactaccaccttttctttcttccttgtagtttatggatatgttcagtatcgctaatttgcagcccactgatacagtaaaaatataaagaagatctatattgatggcagctgcagctgctatggttgtacaaccacaatatagaaccgtcgcacaaccgttatgtagatgttgcctcatatttttttattatcttctcaacttactacctccgttcataaatataatggataatatttttttaaagaaaaaacacataaacgagtaacgaaagaacaaactatagtataaaatgtgatatgaataaataaactagtgcaaaagttcataggggaaaaataaactaagtagctatatatgtcttaggatgataaaacttttatatttatggacaaactaaaagattatattatattggtagtcgtgtctactgagtacgtagtacgtgccatattaggtttagcgcattataagcatgccaactgaaattaacctaagcagcttattaatcaactaat

SEQ ID NO: 36264 - DNA, 385 bp, Oryza sativa
  Clone ID: PAT_MRT4530_40106C.1
ttttggttgttgttggtccccccttctcgcgccgtctgcggccgcgaggtttactacgcgttttcgcgcgccgccggatgggtccgaccggcgaccagggcgtggtccccaagcacccgctcccgggtcccgggcgtacctgctcgcgtcgcgcgcgacccccggggtcgggccggtctcccaccactgagggagtgccggcgcctcccgttgcgacgcctgcgcccatgttggaggtgctcttcgaggaggaggaggccccctggcgtccaagaaggggcccatgcccctttcccgaggggttccccgggcgcgacgagtgcgacctcgacacgcgccccgacgacgccggttcgccccgttcccacctgggggattaatggaa

SEQ ID NO: 36265 - DNA, 530 bp, Oryza sativa
  Clone ID: PAT_MRT4530_40107C.1
tttttttttgttttttttttactggacaatcatgtcaaataatatacttaagaacatattccaattaatggtaatatagtgtatgatgtacaacttgtagctgatctaccaggtaactattgaaccatgataaattctatggttaatcactagttaatttaccatatattcgtagaaaatgctactccaggatagaactatctcaacagatctggttggcacttgacgcatatcttagatgacaaaccgcagaagttagtcgcaagcatacctagtcgccgaaagcatttcaaactgccatagaagagtgtgggtaactaccgaccattcataatcatagccatggaatatggctttggcttcgactaaccagttctactttgcctataggcctcctaatttgtcaattccgatatcaagtgggcacagctaagcagcaaaggttgatgtgccagcagattacaccacacatgcaggcctaggaatgtcggaaaagatagctatacgtcatatattagtctatgtctgta

SEQ ID NO: 36266 - DNA, 234 bp, Oryza sativa
  Clone ID: PAT_MRT4530_40108C.1
ggttcataaacacttttagggcgaaacagaaatcggcccaaccgcaaatatttatcagattgttgtccattgaagagataaaagggagaagttaagaaatatttgtcagattgttgtacattgaagagataaaaggaagaagttaagagaacactttgatcattcgtccagccataaaaaccaaactagattatcgatcccggtcactattacagacttgtgttagttttacac

SEQ ID NO: 36267 - DNA, 274 bp, Oryza sativa
  Clone ID: PAT_MRT4530_40109C.1
atgtcgacggtggcgacgcctcgcggcaggtcgtcccagcgccggacacggtgcaagtgcgccggtggcggcggaggcgaccgcgccgcggcgtgctgcttcaacccgctgaggtccctcttccggtgccccggccgcggccgaggccgacgcagccgcagccgcagccgacacacgacgccgtcgaaggtccgtgacgcgtctgtcgcaggcggcgtcgagcagcagagcgaggagccgtccttcttcgtctacgccatgccgaaccagggcg

SEQ ID NO: 36268 - DNA, 534 bp, Oryza sativa
  Clone ID: PAT_MRT4530_4010C.1
atgggatacacacatcagccctatctcctttttttctcccttctttgcacaacctctcccctcacctatcaccgacgctccaagacagcatgggagagcaggcgacagttggcggttgacgagctcgatggcggcaagcggatccaggcggcagccggcgacatgggtgggaagcggcgacgtgaacgtccctcatcgattcccccgtgccgtcggtgggcgggcaggcggaggcgatgccgtgggctgcggctactcacgccgacaagggaggcagcgggtgggcgggcgggtggatctgacggcggcggaggtggcagtggaaattggcaactacggcagaaatcggcgatgacaacgacgttgttactactgctgctcacaccatcgagatgtagtggcgacgccaatgccaacggtggatcctcagctccatccctgtccgccgccgctgctccaaaccgatgcctttgctgtgctcggatgaggaggcggagacacaaagtggtgtggggcccgccatttggccagtga

SEQ ID NO: 36269 - DNA, 627 bp, Oryza sativa
  Clone ID: PAT_MRT4530_40110C.1
atggcgacgtgctgcgcatctaacagcgaggggagatgggagacgggctcctctgacagccaacggaacggcgaccccagcgatggctggatccatccaccatgcgacggtggacgacggccccggcgacggtgggatctttcccctatccagagtggccggaggcagaagtggaggattgatacgtcagatctggcacgagcatcaccgctggaaacgaatccacatcggacggcgacctctacacctcaaaatcgccggatccagtacgtctttggtcgttcctgtctccggtcgagattggcggcgactgctggtcgttggcgggcacacccatctctgcatgtgttggttggttgggcgaggaggatgattgggttccgggtttcgacgcctgtgggaggctgcgatgatgaggaggatggacgtcgacagccccagcccggaccagctacagtgtggcgaaacatggacgaaaaccaatcgttccggcagcaaatcgatgcccttaacgaaaggataagaatcctggagaggtacattgaagaaaagaagagggaattcgataacctacaacagcaatacgacacgctccggcatgctgagcatggcttttgctggagctag

SEQ ID NO: 36270 - DNA, 459 bp, Oryza sativa
  unsure (1)..(459): unsure at all n locations
  Clone ID: PAT_MRT4530_40111C.1
cacaaacaaaattggtttgcagttgcagacgaagaacaccggcaatggcgttaactgcttctcttcgctgctaccctctactgggctcagcagcagcagcatcatcgtcagtctcacttccggcctccacaagagcgccggtgcttcacaggacaacaggagtaccgaggagaaggctgcaacgatgcctgtgctcgcagcagtacgccgagaagcagtcatccggctcgcagcagcagcagcagaatcagcagctggagcgactcttctccaatctcaaccaggcaaccatgaagcacggacctgggagtgtcaccagttcgatcttccttgtggccggcactacggtaggggcgggtatccttgcaatccctgcagtgacacaggaagctgggattctttggcctcagcagttacatgcatcttctgcttggnttatatggttgtaacagggttgtt

SEQ ID NO: 36271 - DNA, 876 bp, Oryza sativa
  Clone ID: PAT_MRT4530_40112C.1
atggcgagcggcggcgggcggcgcagaggggcggcgacaaagctgagaggcggcaggtggcgggtggagtggcagcgagtggctaccatcaagaacgcgcagagcaactacctatccatggacagcttcctcgccaccatctccgacagtgtcgccgccaccattaggaaggtctcccgggcgtgccttgtcatggcgtgcggtgctgcggcggccgcctccgtcgccgtggccgcgcaccttctattcttcagcctcctcgtcagaacagcggcgagtggagcgacgacgggcggcgggtggagcagaggggtggcgggagcggcagcgggcggagcggtggcaggcgagctcatcggccaaggttgccgcccgccttgctcgctcattcttgacatgaacttgagggggatcgacgtcgaggcaacggaagaagtgcggagcaactgtccgcggatagtggtcggcgaggacgagcgggcagtatggcgagctcgagctcgccggctcccctctcctctccctctccactctcggatcttcctcttattcctctcggctctccctcgtcctcgtggcagagcggcggtggtggcaagccgctggcagagcggaggggctggcggcgacctcgccaaggacgccgtgcgcacctccgacgcgagaggagcgacgacgcgtaacagtctgcgggagggagggagaggagcggcggtgcgtttaggtcggcggccggcgggagggcgagagaggaacggcgacgcgcagcagctggcgggagagggtcggcggcgcacgccggccgatgggtgggatggagagaagcggcggcacgtgccgtgccggtggagagggtggccgacgggagggcggtag

SEQ ID NO: 36272 - DNA, 1051 bp, Oryza sativa
  unsure (1)..(1051): unsure at all n locations
  Clone ID: PAT_MRT4530_40113C.1
ccacgcgntccgaaaacagcaaaccagcgttggcacgagcatatccggcggcgcggcggcggcgtgctctccctaccctcctccggccatcgccggcggctcctccgaccaccgtagggctccgctccgccgctgcctaggggattcatggcgaggttggtgtcgaccgctctcatgagagggctcgtgagatcgagccgcgcgccgagagtagctgctgtgtcacaaccagctatccagcagtttaggaactactcaccaggacttggtggtgattctagaggaagtggggactcaagttcaacacgagtagctgctgatcctgatacacatcaagatttccagcctacaagcaaaagttccaacatgtcttttgatgacattgttgctcaggatatcaaagagaacccagtcttgatctacatgaagggttttcctgagtctcctatgtgtggattcagtgcattggcagttaaagtcctcaagctatatgatgtccctatcagtgctagagatattttgggagacctcaagctcaaagagtgtgtcaaagcccacaccaactggcctacgtttccacaaatatttatcaaaggagagtttgttggggggtctgatatcatattagatatgcatcagaagggtcagcttaaggatgtgcttggcgatattgcacaaaagcatgagcaaaaagaatcatcatgaagatgacaatagtacgccattttggtcacgtgagctttagcatcagtatgggagctggattcttcctttccaaattttcgttcccgtttatgtagtatggatttgctttctcctatcgtttgagcttttcatgtcaaagatggtggaagaagaataaccctctgttccagttgtatacaagctttttcacgataaataaatgccacttgtccttgtatcgtttcgggctaagctgcgactataaatgattagggtctcatgtacggactgttgtgttttactccttccgtttcatattataagtcgtttgacccctttttaaatcaaatttcttgaaagtttgatc

SEQ ID NO: 36273 - DNA, 207 bp, Oryza sativa
  Clone ID: PAT_MRT4530_40114C.1
atggcggcggcggcggcacgcgcggagcctgaccgacgagtcgacgacgacctggaggagctgaaggggtgcgtggatctcaggttcgggttcagctgcgacgtaatccctgagttctgcggcactgcccccgtgctcaagctctgctactccatgacccagcgctgtcgaagtggagcaccagccgcggcacagtcaaagttttga

SEQ ID NO: 36274 - DNA, 1427 bp, Oryza sativa
  Clone ID: PAT_MRT4530_40115C.1
atggtgacactttgctttatgcctggatggagtcacatgaagaggagccaagggcaagtagtttctttggaggtgatattggagcaagcaggcaaaagctttgatatgacctatatgcacctgcgagaaacaagacagtcagatgagaacaaaagagtatatgtaccaggaaaaagttcaaatgtcaagtcagacagagtacaagcacaagggccatatgtcatattttcgtcatatcagacagccagataccattacccatggcttggagaagagctggagaaaggaatggcctcactgcaggtccacaaacaaaaggggatagcaagaactctgctccaaggtcggcggcggcgctctccctagctagccgctccttctcctctgtcgccggcggcgcctccgaccaccgcagggctccgtcccgccgcctcccagggtagtcatggcgagattgatgtcgtccgccctcatcaggggtctcgtgagatcgagctgcgcgccgaccgtagctgctgtggcccaaccaactatccatcagtttaggaactactcatcaggacttggtggcgattctactgcaactggggactcaagttcaacacgagttgctgctgatcctgatacacatcaagatttccagcctacaaccaaaagttccaacatgtcttttgatgacattgtttctcaggatatcaaggagaacccagtcctgatctacatgaagggttatcctgatgctcctatggtgtgggttcagtgcgttggcagttagagtcctcaagcaatatgatgtccctatcagtgctagggatattttgggagacctcaagctcaaagagagtgtcaaagcccacaccaactggcctacatttccacaaatatttatcaaaggagagtttgttgggggatctgatatcatattagatatgcatcagaagggtcagcttaaggatgtgcttggtgatgatgtccctatcagtgctagagatattttgggagaactcaagctcaaagagtgtgtcaaagcccacaccaactggcctacgtttccacaaatatttatcaaaggagagtttgttggggggtctgatatcatattagatatgcatcaggcaagtgagcttattgtccccaggttttattaccagaagggtcagcttaaggatgtgcttggcgatattgcacaaaagcatgagcaaaaagaatcatcatgacggcggcttctgtgccccttggtggtcccgtctgcgttgccatctgtgtgggtgccggggccttcctgtccgagctcccctgcccgtctctgttgtatcgatgcgcttcctcccatcgtttgagcttttcatgtcaaagatggtggaagaagaataaccctctgttccagttgtatacaagctttttcacgataaaaaaaaaaaaaaaaa

SEQ ID NO: 36275 - DNA, 228 bp, Oryza sativa
  Clone ID: PAT_MRT4530_40116C.1
atgaggattcgtattcctatttctttctttggattgagcgacaaaaacaagagtgagaatgcaggattgaagttcagtacttgcttactagctttctacttggcagggacaggggttcgtggcagacttacttgtctatgcaggcgtgaaacaatattcctttcctctggactttatcatcattatatacttgctttaccacttgaattagatcttctttttaatacc

SEQ ID NO: 36276 - DNA, 602 bp, Oryza sativa
  Clone ID: PAT_MRT4530_40117C.1
caggcttaatctaacagattaatcttcacctttctcagcctttatgtcgcgatacatgctaacaattgcaataatatataggttcatctatatccctattaaaagcagggtttgttactttgttagtagtgctttggtttatttgtggcatagaaatgcatacgtttgtcttgactagctctgtggcttgaattcacatagtgtatgagacagttttgcaattgatcacaggttatcaatcgagctttttgggtagttgaattgttgtaaatagctctatttccatgaagtttgatcagtgatacaccataccaccttgatgctaaaactgagccaaagattcatgtcagatgatggaactatatcttaatcaatgcagcatcaatattgaactgtctcgtgatgttgtaaatatggaactataccttcgtaaagtttgatacaccatacaatctagtttgatacaccatacaatcttatgttgttatactaatattgagccaaaggttcatttcagatgatggaactatatctcacccaatttcatcatcaatatcaaactggcttgagttttttttccccaaaaaaaagacttcatacaa

SEQ ID NO: 36277 - DNA, 227 bp, Oryza sativa
  unsure (1)..(227): unsure at all n locations
  Clone ID: PAT_MRT4530_40118C.1
gcagagtaaggcgtcttcgtactcgcctctctccgcgcctccgcgcttttcctcctcctctcccctctctccctttttctgccgttcgtctcngcntcnnccctttccgccgccttgagggagtgcnttttgntccacgtcggtcaggccgggttccaggtctgtttcgcgtgctgtgagctcttctggcttgttcttggtttctctttttgntggtcggatgccct

SEQ ID NO: 36278 - DNA, 157 bp, Oryza sativa
  Clone ID: PAT_MRT4530_40119C.1
caaaaccccattcgcttcgctcctcctcgtggttttcttcaacgcccgctggcgctcgccgaaggtagtatccgcgcggcgaggatcgcctgaggaggaggagaataggacgctccccctcccctctttccttcgtcccctctcctcctttcacctc

SEQ ID NO: 36279 - DNA, 860 bp, Oryza sativa
  Clone ID: PAT_MRT4530_4011C.1
acgtcagcgatgacgtcactaccggcggtggcggctcggcggctcggacggtgcacgctcgccggcgaacggcggcgcttcggcacgaacggaggacaccaacgggtagagcgcgacgcggcgaactcaccggtgaccaaaggagcggcggaagaccaacggacggcgacggcgacgaggttgaaacggcggagaagatcgggtcgacggcggcgatggtgctccggcggtcttcggtggcgacgaagagacggacgaggacggcggcgacttggtgaccacgacggcggtcttcccgagcgacggcgacgacgggaacgacggcggcgcacggctggagcggcggccacgacggcggcgctaagctactcggcgctagggcgctacagacgacgagaggcgaaggcgagggtggcgacgggtagaggagagctcgggggtccttttaaaggggctaggaggcgacggcgaaggcccacggcgaccggcgacgagaaggaaagatcgggctcggagagagaaaagccgatccgattcgacctcgaatcaaacactttccaagccgatttagccgatgtttccaaaggagaaaaggtagaggagatcgagaagatcatttcccctctatcaattcggccggaaacggaaaggatcgatcgaatttggaagggaacagcggcggcgcggcgctagggtttcgggcggcggccgatgcgaggaagacgacgacctgacaggcgggacccacctgtcagcgacagcgagggcgcgcgcgcgggcggcggactgggccggactgggccgaggagagagagaagggttttgggccgactttcggcccaaagccaaaagaagacttt

SEQ ID NO: 36280 - DNA, 426 bp, Oryza sativa
  unsure (1)..(426): unsure at all n locations
  Clone ID: PAT_MRT4530_40120C.1
aagcaagaaacgcacagcttcgcctggtgtctcccccccgagtccccaacccctcctctcctcctcttcccttccccgcgccgagatgagatcttccccctaaggcagtattttgatcccgatggttttgcgccgacaaccctcctaaggtcatatactttgcacagcgctctatttganaggatcctgatgaaccaatatgtaaacaagaaattgagtaaccagaacaacatgtaccatatgacacgcatttgctcaccaaggaggttcattttgagtataggttcttcactttataaataanggatactgttacaccagaaaccatataaagcatagnatttagaatgtaatttggaccagactgctgcagtataatatataaattaacatgtatgaagtaaattccatacatttaacaacatg

SEQ ID NO: 36281 - DNA, 246 bp, Oryza sativa
  Clone ID: PAT_MRT4530_40121C.1
atggcccagcacgagggaaagcacgccgagcacggcacggctatgggccgggccggcacggcccgtagttgggccgtgcctgggccgagcgcaggagagcccgaagtcgccgcgagcgcgaggagatcaggagaccgcaggagcgccgagcgcgtgcgtgcgagtggcgacgcgatgtgcatggtcgcctcgcctgttgctgtgccgcatgcggcatgcccagaactaagtgcgtggtcagactga

SEQ ID NO: 36282 - DNA, 478 bp, Oryza sativa
  Clone ID: PAT_MRT4530_40122C.1
cccacgcgtccgaaaaaaaaaaaaaaaaaaaaaaaaaaaaaaaaaaaaaaaaaaaaaaaaaaaaaaaggggagggaaaaaaaaaaagagagagaaaaaaaaaaaaaaaaaaaaaaaaaaaggggggggccttttaaaagaaccaaactttctttccccttctttccaaggtaaaattttttttttggggcccccaaaataaaattcatggcccgtgttttaaaaccgtcgaactgggaaaaaccttgggttacccaaattaaatgcctttgaaaaaaatccccttttcccaagtggggtaaatacaaaaaagcccccaacaaatcccctttccaaaaatttgcccacctaaaatggaaaagggaccccccctttaacgggccattaaaccccgggggttgtggggttacccccaagggaaccctttcattttgcaacgccctaaccccccccccttttagttttttccctttcttttt

SEQ ID NO: 36283 - DNA, 213 bp, Oryza sativa
  Clone ID: PAT_MRT4530_40123C.1
atgggacggggcatacctgcccccactccatcgggtacagggtggaatgtgggggcacggccgcccgtccgatcggacgtgaccggcgacatgccgctgggcgagggcctcggggcgaggcagtgcgagggcccgaggggtgtgacgtggcaccccgaggccccatggctgcctctgcgtcttccgaggtgtggggggagggccaggctgtag

SEQ ID NO: 36284 - DNA, 279 bp, Oryza sativa
  Clone ID: PAT_MRT4530_40124C.1
atggccaagtaccggaatcgatataaatggaatcaaaaggggagcaaaggcacaggcacacggatagtgtcggtgatatgggctcgggggtatgcgaagtgcgggggagttaccttcccgtccagctacgtggccctacagcctggccctccccccacacctcggaagacgcagaggcagccatggggcctcggggtgccacgtcacacccctcgggccctcgcactgcctcgccccgaggccctcgcccagctgccacgtggagaggggagcgagtag

SEQ ID NO: 36285 - DNA, 466 bp, Oryza sativa
  Clone ID: PAT_MRT4530_40125C.1
aacgaaatctctcatccttggataatggtcaaatgaagatgtccaatatcagatccaacattatttgattaacctaaattcatgtatatcatctttacagaatgagaatggcttatgaatcattccatacaaaaccaaaacaaattttgggaattttataacagaaaccgcgcacgattgatgaaaacgggatcacattcaatatcaggaatcaataaacagaaatttcttcttttttgctcttcaagttttttcatacactcaaaatgcaaaagggaaacaaaactagattcatccgacaaaatcatatattgcatttttatagcaagtatcatttctcccctaatttttttttggtctacattgatccaccatacgaataaatgatagggtttgtctcataggtataatttaaaaagaatttatgacctttgcttggaatgcatgccccaggaggaggatcaaa

SEQ ID NO: 36286 - DNA, 269 bp, Oryza sativa
  Clone ID: PAT_MRT4530_40126C.1
acgtacaattacagctcgaattacttcggatctttcccgagagaagcaaaaattactttcgagggtttagttatggaagccctacccaacggaatgttccgcgttcgcctagagaatgacaccatcatcctgggctatatttcaggaaagatccggtctagttctatacgaatactgatgggggatagggtcaaaattgaagtaagtcgttatgattcaagacattatcacttattaatccgttcaccggggaaggacgggccggggtg

SEQ ID NO: 36287 - DNA, 184 bp, Oryza sativa
  Clone ID: PAT_MRT4530_40127C.1
tatattggtgattttgggggacctgcgatgctgccgttgagatgccacgagctggaagggtctgggctgccttgaagaggagttctgcatcgagagggaggagggcgaccagaagaacaacagggtgatcgtgcgcggtaagtttgacccggagaagctgtgcaagaagatctggtgcaaggcc

SEQ ID NO: 36288 - DNA, 166 bp, Oryza sativa
  Clone ID: PAT_MRT4530_40128C.1
cgaggctgatgaggaagcagtcgaccgagaagcccgagaggctcttttaaaatcagagatcgcttgtcacacggcacgcgctactcggataaccgtatcaattctagagccaacacctgcaacaaaccccgacttcccgtgaggggcccatttattacataaaacg

SEQ ID NO: 36289 - DNA, 2470 bp, Oryza sativa
  Clone ID: PAT_MRT4530_40129C.1
gcgcgcggggcactcccctccacgcccgtcccgtctgcatctacccgccacttcctcctcctcctcctccgcctctcagcttctgctcttccttgttctttggcccgcgagctgatatctgcagtttgcaaccgagaagagaaaaaaaacgaaccgggtttttttttaggtcggcgggcggctaaagaaagaagggagctttttgggtaaaaatttagtcttgtttttttttccttcgctggttggggttggggttttcagggatggggggaaaggaggggctgcgtcaactggcccgattcccatcgctctgaacttgatggatgcatctgtgaacgccaagaaggttagtttctgtgggaacactggtcatagccgctgtggtgaagttcatcgacctgcctggccctgtcgtatgcgggatcactccttgaacagaagcaaccccttcttacttcaggtctggtttgcgtttccatttaagtataaaaggacctgtatttggcatgggctttaagtagcatttaaaccttcaaagcatagtttgacagcaatatacactacaatcggtgttatacttctgttgaaaaagatggtggatgaggaactgtttgataagagctccaatgatcacagcatcagttctgaggaagaagacatgcttgtcaggagttatagcaatctcaacgtcagctttggataccattgtaattcttatcagtgtttttctctagacactgatgagtatgacatctctcccaacaagaggcttgaaactaataccatgatgacatcacaaaatggatccttcacttgtttgtctggtgctgcgattagtgccaatttcacgctggccaatacaaacatttgcaagggtcttatcggggaagaaattttaccagaactagactctcctaattctttcagaaaaattgtttcatccccatcaatgtcaagattggacttgttatccacctcacaaggcagccctgtatcgactgagagctctatatttgaaatcagtaaaaatatctggaggtccagtgccccaactactgtctcatccaattttctgacaagtacagagataaaaatggctggtggagctgctggagaggatagagtccaagctgtgtgctctgagaagaatggatggttgatttgtggaatatatgatggatttaatggacgagatgcagctgactttttggcagtaactttatatgataatatagtatattacctatatttgttagagtgccggattaaacaagaaaatggtctatatggttcaccagagggctctcttaatggtgttaaaagtgagttaacactggccatgagatttgcagaaaatgaagatgtgaaattttctgaaacatttcgagctggtgtgcttaagtgcctcactactgctgttgagcaagctgaaaatgactttttatgcatggttgaacaagagatggacgatagaccagatttagtatcagttgggtcttgtgttctggttgtgcttctacatggaacagatttgtgcatcttaaatcttggggatagtagagctgtgcttgcttcagtgccgtcttcaggaatggataaattgaaggctgttcaattgactgagatccactcacttgaaaatccattggagtaccaaaaacttttagctgatcatcctaatgagccatcagttgtgatgggtaacaaaataaaggggaagctgaaggttactcgtgcttttggagttggctatctaaaacagaagaagttgaacgatgcactcatgggaattctccgagttcgtaatttgtgcagcccgccttatgtgtacacaaatcctcacacagttagtcataaagtcacagaggatgatttgtttgttgtgcttggtagtgatggcttatttgatttcttcagcaatgacgaagttgttcagttggtttatcaatttatgcatgataatccaattggtgatcctgcaaagtatctcattgagcaacttttacttaaagcagcgaaggaagcagctttaacagctgaagaattgatgaggatacctgttgggagcaggagaaagtaccacgatgatgttaccatcattgttatcatccttggaaatgctcaaaggacaatgacagcgtcaacttcactctgaagatgcagaattcatgcaacaagcttatcaactggtaaaaagttttgcggatgttcgcatatgaatgtgttttaggaatctcgtgtgatagttaataaacgaaatgatgtgtatatatccatctggagttttgggagtgaccagcccttttgttagatcaaaaggtggacggcaaatttgtttgtcataattttgcacatgacttaaacactgatgctcttctgtggcattacaatcagaagagcagaatggaatagtctgaagctttcattaaaaaaaaaaaaaaaaaaaaaaaaaaaaaaaaacccccaccat

SEQ ID NO: 36290 - DNA, 396 bp, Oryza sativa
  Clone ID: PAT_MRT4530_4012C.1
ccatgatcgccaacctccccatctccttcatctaaactccccgcgcctcctcctcgaagcagcggtcatcgacgttggagccccctccgttctagtcaccgacagtagccaccatcgtgtcggccgcatctctccccctctccatccgccgctgcccccgctccaccgtcggctgcctctccccccctccgtcgctgcgcccgctcgactgctcgagagaatcaacaagagaagagaagagaaaaagaaaaagaaaggagagatgcatcccgttagtcaggcgagtgggttttgggtgaagctgtcagccgccaaggccaagttccacccaatttacttcacagaaacgaacaggggcgagaatagagataccggacatacacatttgaagcttga

SEQ ID NO: 36291 - DNA, 916 bp, Oryza sativa
  Clone ID: PAT_MRT4530_40130C.1
tcagacccaaatcccgtcgttggcgatgccttcccgctgctcctcgactgcgccgacgaagttgttcccgttgaggtcgagctcggtccacaccgggagcgtgaggagcacaaccgcgtcgaccacggccatcggcaagtggtcgcagaacgccgtgggtgacccgcacgacgacgacccggtccgcctggatcgggaggagcatgccacggtggagtccaccgccctgctgtggtgctcgaacgcatggaggaactcgattaggccggacagcgcagccgcgtcgtcttgcaggccaaccttccactccagcagcgtgtcggccagctgctgtggtggccacggcgagcaccagcaatagcaacagtagacggagggcgtgcagtaggcggagggcggcgtgtctccgcaagaaggcagcgacgggaaccgcacgacggcgacggcacggaagagcgaggcgccggagccaaccgcgccggccgctgtcggtgcggctgtccagccgcgcccgccgccgccgtccgcgacggctaagaaccgcacgacggcgatagcatggaggagcgaggcgccggagccaaccgcgtcggccaccgccgcccgcgccgtccccagccgcgccgccgccgccgtccccagccgtgcccgtcgccgccgtccgccgcccacgccgtcccctgccgtcccgggagtccttcccctctccgaccctatagcacccagctctacatccacttggagaaccgcgtcccggtcgcgacccgcatgcccgaacaaaacacaggcaggtcgagacggacaggtcaggggccgcatccgcacgcacgcacgtacgcgcgcctcctgctccgatcaaatccaccgcaaggcgcagcgtgttgcaggctgcagtccggccccgggccgcgtctga

SEQ ID NO: 36292 - DNA, 233 bp, Oryza sativa
  Clone ID: PAT_MRT4530_40131C.1
tgaagtgccagttgttgccatatatgtcactgatctccccaacggttgtctaatcaacttgacccctaggcaaagggatttcttgttagctggaaataagagaaaccctcaagcatacaggcgtgaggttgaggagtcggtacacgaacatatttagtggctttagactcgaactacttagatgccaggctctggctagagtcacgtggtccaaggagctcacgttaacagta

SEQ ID NO: 36293 - DNA, 362 bp, Oryza sativa
  unsure (1)..(362): unsure at all n locations
  Clone ID: PAT_MRT4530_40132C.1
gaacgtgtataaacttgataaacacaggctgagagcctcggtttgaggagcctgaaaagagcctaaattggtaagatctgaccttagtatgtgcgctgctttaccaatggtcgtgacttgctcatggtgctatgagcgacagataagtgcttttatagaagaagtccggttgttgcagccaacttgttgaaatcctacgactgggngaaactctgcgtggctcagtatgaagtgtattcaacatcaatccaaaaggcctcacgagcaagtgatgcttcttcctgagactctgaaccccccgaagacgacggtttggggagagcctcacctttcggacgccgacaaaggcataccggacctgg

SEQ ID NO: 36294 - DNA, 454 bp, Oryza sativa
  unsure (1)..(454): unsure at all n locations
  Clone ID: PAT_MRT4530_40133C.1
nnnaaacgtanagttntagatcgatagctgtcgtttgtgcttgatcagtaagcggacgcgtgggatgaaatgtgatttacggtatgatgaatacaggtgttataatttatggccaaatctacacctattttgctttttttaaacatctaaatgataacaactttcatttttggccttgctaatatttttacaacaattttacaaacaacgtaaaatactaacccctaccataatgaataaatcaatttgaacccaaaattttaatttattatcaaccagcacaaccaaaatttaaaattttttaggaaaaaaggggacctttcaaaattaaaaatcaagtttctataaattttaaaaaattgggtaaattattgaactatttttttgatttcaaaatttttttactattggacttttaatttgtagtgttgaatttaaaaataattttgtaaac

SEQ ID NO: 36295 - DNA, 195 bp, Oryza sativa
  Clone ID: PAT_MRT4530_40134C.1
atgcagacggcgaagggaaggctccttccatggtcaacatcagcatgggccgttggcccgttgcacccttccagtgagtactggattttctccaagggaaaatacatcggcatatcgcagaagttaacttttggcgtcgctctcgtgccagctctggactatgcaacagcagcagcagcagcaaagccggcgtga

SEQ ID NO: 36296 - DNA, 264 bp, Oryza sativa
  unsure (1)..(264): unsure at all n locations
  Clone ID: PAT_MRT4530_40135C.1
ngagggangnangnctcacccctccgcctcgnttcttcatctcctctcctttaattcggccccgcnccgcccgcttcacccccatcctacaccgcgtgcctccttaccttctctttgttggaataacgatcgtttcgcttgctgctccggggaggtttttnttgggcgatcgatcggctgggcaggttcgtcggagggaggtttctnccgcgcgccgccggggtgtcgacgtgtcgagcngtgcgtggaggangagaagcgtgc

SEQ ID NO: 36297 - DNA, 213 bp, Oryza sativa
  unsure (1)..(213): unsure at all n locations
  Clone ID: PAT_MRT4530_40137C.1
gaggcnnagnacgtntggccggacnttgggccccgccgaaaancttaaaancccngcccgggcntccccgnngnnaataacgtccgnngtcctcnnngnccgaantaaggtccaccaccaccaccaccaccactngtccgacgnccgnttccccntaatgcccaagnacgaaccaaccctaaccttaggcngcaccaccngncganccccana

SEQ ID NO: 36298 - DNA, 939 bp, Oryza sativa
  unsure (1)..(939): unsure at all n locations
  Clone ID: PAT_MRT4530_40138C.1
attcgattccttcctcccactccactccacgcaggctccgcagccaagatcaaggcaacgaccgggaagaacaaattctcgcctgaagaaacgagaggaagcagcaaatcgccgccgattcgctcgtcggaatccccaccatccaatccaccggcggcggggggccctcaccctaggggagggggtgggtagcgcggctggtggccggaaccctatcctatccgatcggcgtgggcgagaccacctcctctttttgccgccacgcgcgcggggcggcggccgtctggttttgcggggcggatgccggtgggcgcgcgcgcccactggtctggcaggcatcggcggcgcctcgctccgcgtgccctcgcgctcccggcggcggcggcggccgttcagctacttatgtagccgcttgctactagggcgctttcgtcgctcgcgtcgtcgcgcgttggctttggttgtgtggttttgaatgggccagatggtttcggatgaaaattttgaagagcaggccgctcgtaatggtggaattatcaagcacggaagggaaatcctgttccaggtgaaaatctgtctaggcacaccttttgctttcatgctatggatggagtatgccggagctgacctagcagaatcggggtttcaccatatgtggctgcctccaccaacacagtcattatctatagaaacttatctgtttcagaactgacacttgcctcaactcttgttatggttccctccatgacctacaagcattgcttcggaaaatgaaagaacacaatgtaagagctatggcagatgttgttattaaccatcgagttggggctactcaaggatcgaatgggatgtataatcgttatgattggtatcccagtatcatgggntgaccatgctgtnacatcttgttctggttggaaggggaacgnaagacccgtg

SEQ ID NO: 36299 - DNA, 949 bp, Oryza sativa
  unsure (1)..(949): unsure at all n locations
  Clone ID: PAT_MRT4530_40139C.1
ccccgcgtccgccccgcgtccgggcgtccagcaacgagnaaccactgcccacaccgatctctgccgccgccggcggcagcggcggcaacgcgccgccggggaggccgacgacggtggattcgatgctgctggacaagggcgcggcgatgctgcaggcgctgcgcccggtgaagcatatcaagcagcacgtgtgcacgttcgcgctgtacgcgcacgacccgcgccggcaggtggagacccaccacttcgtctcccgcctcaaccaggacgtcctccagtgcgccgtctacgacgccgacgacaagcacgcccgcctcatcggagtggagtatatcgtgtcgcggaagatcttcgactcgctgccggcggaggagcagcggttgtggcactcgcacgcgcacgagatcaaggcggggttgtgggtgagcccgcacgttcccgggatgctggagaaggcggagctggagaagatggccggcacgttcggcaagttctggtgcacctggcaggtggaccgcggcgaccgcctcccgctgggcgcgccggcgctgatggtgtcgccgcaggacgaccccgcggcggacgtgcgccccgacctcgtgcgcaaccgggacgacaagtaccgctactccacgacggagctgcgggcggcgagggccgacgtcgcggtgccggcggagccgcgaccggggcaggccgactactggctccgccaccgcaagggcttcgccgtggacgtcgtgccgcacgaaatgaagtgccacgcgccgttcccgtaagctgtgaacagtacgctggcagagctgtggcacacgactcgtgtacgtgaacgtagtagtgtaggaacgaccgtgggtcgttgtatcgtgtgtacggctccgtcgtaaactcgtaacaccaactgctaccactcttctgggcaaaaaatggtgcgtgacttgacttgagc

SEQ ID NO: 36300 - DNA, 693 bp, Oryza sativa
  Clone ID: PAT_MRT4530_4013C.1
atgtggaagtacagtagtgctttgcaacagaggcccgaagaccggtccttatatggccgagccgggggagagggcgcgcggaccgggtccacgggagtggggcccacgcggcagcctcacggtccacggtggaccgggtgcacgcggctgacgctggccggcgccgtgggtcccacgcgtcagccgcccccgaggcgtgggcggctgacggccgggccccacctggcagccgcgaggcgcgcccgaaggcggcctcgccggcacggccgacgggaggcggcgcacccgcgccccgatggtcgacgccggcgaccaccggcgcggcggagcggcgcccgagagagaggagagaagggggaagtgaaacggcggtcctcggctcaccccgggtcgacggtgacaacggaaacggcggccgaagcggaggaaggcggcggcgcggctcgggtcgacgaggacagcggcgttccggcggtcggcgggcggaacggaggagtggacgaggtcgacgagaacgcggcgaagccgaaggaggcgatgccgaagcgggaggaggtccggggcgacgacggcggcggaccggagctcggcggcgacggcggagagagaggacgacggcgcgggctcgaatccgacggggagagagtgcggcgagtggcggaaacggaggagggaggcacggggaacgtttaa

SEQ ID NO: 36301 - DNA, 431 bp, Oryza sativa
  Clone ID: PAT_MRT4530_40140C.1
cggacgcgtgggcggacgcgtgggcggacgcgtggggttccctgctgttattttcacctgcattgcattatctactgttttgtttgctggtgctgcaattatgggatacataatgtttggtgaatcaacagaatctcagttcacattgaacttgccatctaatctggtagcttccaagattgccgtctggacaacggtgacaaatccaataactaaatatccttactgtgttattttgtcttttttacacctattttcccacgctactttgtcattattgaacaacatgttggcagttcattacaaactaatagatagctagttcaattatacggaataagaagattttcaatttattaggttgtaaaaaagcatatttaattcaagtttctcataatgttgtttcatactttgttccatgttgtaagccg

SEQ ID NO: 36302 - DNA, 930 bp, Oryza sativa
  Clone ID: PAT_MRT4530_40141C.1
atggggctgagccgcttctccgactggatatggccggggagtagaaccacccggcgagctcgcgacgctccggcgagcagcgtggccttggccgtggccggcgcgctgttcccggactccccctccgggttccgggagccgacggtgggcaccctcaggggcccggcgagctccggcggcggcgctcgacgcgcccggaaggggacgagccggcggcgcagccgtgaggtggtcgacagggagcacgacatggtcgtcgtgccgctcggcggcggcggcgacgggtactcgtcggactcgggctccgacgactccgactggtccatcggctggctcgagccgcaggggccggagctccacagcgacggggattccgacggcagcttcgccgtcctcgtgccgtgttaccgccacggccgttgccgcgtcgaggagcccggccgcggtaggctcgccgacggcaacgtttccgaccgagtagccatggatggtcacccggcaatcaagcacacgcagaagaccgatgccatcgccgctcgggccgcggcgcggaggccggagttccaccgccgccaacgccgtcgccgctcgggccacggcgtggaggccagagatctggatctggctgacggtggcttcccgcccacggcggatgaagaggtggggcgcggcggctgtggcagcttcctcgattcgccgtcgccggaggaggaggggaggcacagcgccaggccccatcgccgttgccgctcagcccggtgccgtctcccgctctccctcgtccccgccgtgtcctactcgcctccacgacctccgcttgagccgccgctccacccaacctccgtgacctccgtctccgcccggctctgcggccaggccaatcgcaccatcgatctgggaggttcacacggcaacaggtttgggtggtga

SEQ ID NO: 36303 - DNA, 357 bp, Oryza sativa
  unsure (1)..(357): unsure at all n locations
  Clone ID: PAT_MRT4530_40142C.1
tggatattagggattgcgggaagctagagagaggtttcttggattgtaggcacatccggatgngatgaattgaggacgtaggttgcttccgcggtttgcataagttatcgtggagtgaacaatccagcaaagtctatgatttgtctgaggctgtgagcaatatagatggacgaacgatgaggtagaagaacattggttctgcctaatgatctgctcatatagcagaacgattgtagcgcggcgtttcaggtatttncgtcactgctgatttttgctctgcaggtaatcaaaagcagagaagacccctttggttttctatgtngtttcccatttnttaggtgttttttaaaggaattt

SEQ ID NO: 36304 - DNA, 1036 bp, Oryza sativa
  unsure (1)..(1036): unsure at all n locations
  Clone ID: PAT_MRT4530_40143C.1
caaattactccaaacggcaggaaaccctagccatctccgtctataaatnagctcatatctggaagggctctcacactcgatccgcgcggctcattttttcagttccactcgagctaagtgcggtacactgatcaacgatggtgtcctccaagatccactgcgccatggccgcgctgctccttgcaattctcctcccggtttctcatgcgtcggggaggtatgtagctccggctccggctcctgttcctgttcctccgccgccgcgcacctcgccgccgagccgtatccagccggtcgtcgtcgtccagggcacaatctactgcaagtcctgcaacctcagcggctacaaccgctacatggacgcgtctcccctaccaaatgcgacggcgcagctggtgtgctacggggacaaggtgctgaacatgacgagcacggcgacggacaagaacggctacttcctggtgatggtgtacaggctggacgtgttccggcggagcaggtgccgggtctacctgggctcgtcgccgtcgccgctgtgcgcggcgccgttcatcccgtcgaacaagtggctggggctcacgctggagagggagagggtggcgtcgctgcccaagggcgtccgcggcgtgtaccgccccaagagcacgctcatgttcggccccggcaccggcggcaagtgcccggccgccgccgccgccgacgccgccggcgtgccgatgatgtgatgagacgatcgatattgacatggagaattcgagatgtgcgttcacgcatatcgccaatttagttagtggtttggttggatgatgcatggtttaattaagttcgtgcacgttatttggaattaataatgggtagaaattagctagctcgtcttttggtcgatggagcatttgttgtaaccttgtagtagctcgtcgcttaggtttgcagtggttttagttcgctcgtcagtgtaatgtcatgagaaaaaaaattatctgagtacgtctatcctttcggtcgatttaaaaaaaaaaaaaaaaaaaaaaaaaaa

SEQ ID NO: 36305 - DNA, 114 bp, Oryza sativa
  Clone ID: PAT_MRT4530_40144C.1
atgaaaaaggccacattgtctacggcaccgtcctttccatcggtggctgacaatgggtcccacattcagtattccacagagggggaggattctgaataccagatttcaccctga

SEQ ID NO: 36306 - DNA, 729 bp, Oryza sativa
  Clone ID: PAT_MRT4530_40145C.1
atgaagaagaaattggcgaggatgttgactaggctgcagctaattcgcagaagaagaaagctgccgagaaaaagaaaccagcagcaacaattctcaaaccggctccaccacctcctccacctccttctccttctgtacagcaatcgtcaagtgaccgaactccatcggctgtggggagtcatcatattgaggaggaaatacaaccaactgctcctgctatcccagactcggctacatgagatccaagctctaatcccagatgagctagccgatatccttactctagctatttatctcgagcagcatcaattcaagttggaaaaagccaagctaagactagccgaacgtcgggagcgtgaagatatcgaagctacaatccaaaccaatcggcagcttgttcatgaagaaaaggccaaacttgatcagctatctgagggtccgattaggtccaatattgatcggctcgaagctcgcaagattgagctcttggcacaacttgaagaatgtgatgctgaactggacatggaacataaaaagctagctgatctcccaaaatctatcgaagaacagaaggtaagactcaaatcggctatcaagaatgttgctgatctaaccaagtctttgaaaatcatccttggaaccgatgctcaagacaccaaagccattgaagaagtagagcaaattaggcaaagagctatttcggctatccagcgatatttgtctcagtga

SEQ ID NO: 36307 - DNA, 808 bp, Oryza sativa
  Clone ID: PAT_MRT4530_40146C.1
gatcaaatcaactggcacgctaacacacccgaagtcgcagaagaagaaagctgccgagaaaaagaaaccagcagcaacaattctcaaaccggctccaccacctcctccacctccttctccttctgtacagcaatcgtcaagtgaccgaactccatcggctgtggggagtcatcatattgaggaggaaatacaaccaactgctcctgctatcccagctttagtcaatcttttttctttcaatattaaagattatcttgacgaagaaatagaagaagataccaccagcaaacctttagttcccctgactcggctacatgagatccaagctctaatcccagatgagctagccgatatccttactctagctatttatctcgagcagcatcaattcaagttggaaaaagccaagctaagactagccgaacgtcgggagcgtgaagatatcgaagctacaatccaaaccaatcggcagcttgttcatgaagaaaaggccaaacttgatcagctatctgagggtccgattaggtccaatattgatcggctcgaagctcgcaagattgagctcttggcacaacttgaagaatgtgatgctgaactggacatggaacataaaaagctagctgatctcccaaaatctatcgaagaacagaaggtaagactcaaatcggctatcaagaatgttgctgatctaaccaagtctttgaaaatcatccttggaaccgatgctcaagacaccaaagccattgaagaagtagagcaaattaggcaaagagctatttcggctatccagcgatatttgtctcagtga

SEQ ID NO: 36308 - DNA, 1148 bp, Oryza sativa
  Clone ID: PAT_MRT4530_40147C.1
ccatactacaccagaacacaacaatggcgtcccaacgccggcgatcatccgccgccaccatcgccgtcttcttcttcctcctctccttgttagcggtgttcttccagccggccgccgcctactaccaccctcaggggaagaggcagaccgtcgccgtcttctggggacgcaacaaggccgagggctcgctccggcaaacctgcgacaccggcgactacaacatcgtcatcatctccttcctcagcgtcttcggccatggcaagtactggctcgacctctccggccacgacctccgagacgtcggcgccgacatccgccactgccagtccaagggcgtctacatgctcctctccatcggcggcgacggcgacggctactccctcccttcctccaagtccgccgccgacgtcgcctacaacctctaccactccttcctcggccgcccacgcgccggcatcttccgccccttcggcgacgacaccatcgtcaacggcgtcaacttcttcatcgaccacggccccggcgaccactacgacgacctcgccaaccgcatcaacgactacaaccagaacatccacgaccccatcggcatcatgctgacggcgacggtgaggtgctcgtaccctgacccgaggatgaagaaggcgctggacaccaagctgttcacgcagatccacgtgaggttctacgacgacccgaggtgctcgtacaaccacgcggggctcgccggcgtcatggcgcagtggaacaggtggtcggcgaggtacccaaacagccggatcttcctggggctcgcggcggcgaacgtgacggggaagaacgacatggtcggcgtcggggagctcagccggaagctgctgccggcggtgcagaagacggagagctacgcgggagtgacgctctggaacagctactacgactccaagactcactacggaagatatgtcaagcactgggcttaatttaatcaattaatttaagctcagatcaaccagctataataatctactacagtgcatgcagctcaatcactatcgcagtaatcacggtgtcatgggtttaatgtagtaaactacccccacttaattacatgttgtttgttgttttttgatcttggtctcgagagcaagtgttttttttatttgcac

SEQ ID NO: 36309 - DNA, 1441 bp, Oryza sativa
  Clone ID: PAT_MRT4530_40148C.1
tcacacactcatggcagtcctaccaatggcgacaccgatgtagggcacgcttctcggccctacctcaacggctgtcccatcgtagcgcaccgacgacggcggcggcgacggcggcacgatgacagcgacggcgcggcggcacgaaggcggcggtgcggcggcgccagggcggcgcaacggcggcgcacggcgtggcggcacgaaggcggcggcgcggcgtggtggaggggaagggggaaaaaggaggggaaggaggggggagtggtgtgggatggaagggcgaccgggggagggatttatagggcgcggggaggggtggccggctttaaacaacgacggaacggcgtggcgacgtggggcttggggcgacggcgacgcgcggcgacgggacggcgcagcgcgacggcgacagtgcgcggcgcgggtggggctcgaggcgctgatggcgacagcggtgacgcgatgacgcggtagcagcacggggctcggggcgcggcggcggctcgtggcttggtggcgcggcaacggcgcagggcgacggcgacaggatggcgggtgacgcaacggcgcagggcgacgggcgacgcgatgacgacggcggagcgtcgacgggacggcgacgcggcgacgggacggcgtggcgcggcacgggggctcggcgcgcggcgatggcgacagggcagtgcggggctcgagacgacggcgacacgacggacgcgacgcgcgggcgcaggacggcgtgacagcggcggcgcgcggcgcgaggcaatgacggcgacggcgcgcggcgcggcagcggcgacgcgacgggcaggcggcgctgcgcggggcgcgaggtggtgtgtgcgcggcgcgaggcgccggggcacggctgcgaagccgacgcaacggcgatggcgacggcgcgcggcgcggcgatgatgtcgatgcgacggcgacgacgacggcacgcgcggaggacggatgtgaccgacgacagcgatggcgcgcggcggtatggagacggcgcggcgacggtgacatgacgcggtggcgcggcagggcgactgcggtgacaagacggcgcacggcggcgcggggcgcaaggcagcggcgcagcagagggcggcagcggcgtggcgcgcgcaggggcggcgcggggagcgagggggagcacggcagaggaggggtggtggttagggaaccaaatcaaacaccgccgcctcttggggtgcgtcgccgtccccgtgcgcggcgttgtcctccgaccgcccgccgccattccacgtcgccggctgctgccgccggtggccgcatgccgccgccgcgccttggctcggccggaccggcttcgtgccacgcctgtgcccctggctgccgctcccctcggccgcccgatcggctcaggctgatctgggccgtccacgtggtggacgcgcacccgacgccacgtgtggaccat

SEQ ID NO: 36310 - DNA, 840 bp, Oryza sativa
  unsure (1)..(840): unsure at all n locations
  Clone ID: PAT_MRT4530_40149C.1
aagcacacgaccccagcccgtcccacatcccacagcccactcgtcccaccgccctacccactccaccccgcccccacaccacaccacgcaacnccatccgcctccgcacgcgcaacacgcaacacgcaaccgcgcccccacctcgccgccccgcaactcccaccgccccacacctcggcccccgccccacaacgcccaacgctcggccccacacccacccccacccccactcgcaacccacactcgcgcacacccacaccccacaccacacccgccactcgcacacccaacctcgccacccgccacgctcgcgccgcgcccgccccacgcgcacgccacgcgcacaccacgcgccccgccccgccccgcaccgaagcgcacaccacaccaccccaccacaccatcacccccgccgccgcccgaacgcacgcacgcaacgcccacacccaccctccgccccccgccaccaccgccccgcaatccgcccccaccgcccacccccacccccacccgcaaaccccacactcgcgcaacccacgcgccacgcacaccgccatcgcacgcgaactcgcacggttacacggccgccacccaggaaccaccgacntccctcccaccatcgacacacccacccaccgggcgggcgggcggggcgggcccattgggccgcgcccacccaccccgccccggaagcgcacatggcccaagccacccacccgccgcagtcggcacccacacgcaccccgcgcatgccacaccgcaccagcgcccctggatggcacgtgcgcgagcatcccagcggataagactatactcccccccggagtacacagtctgcac

SEQ ID NO: 36311 - DNA, 1990 bp, Oryza sativa
  Clone ID: PAT_MRT4530_4014C.1
atatctttactcagccggatctgaacatgagacaaaggagatggttggaattaattaaggattatgacatgggaattcattatcacccgggaaaggctaatgttgtagcagacgctcttagcagaaaagactattgcaatgctacggaaggacgacagttgccattggagttatgcaaggaatttgaaagactaaatttggggattgtcagtagaggtttcgttgcagccttagaagcgaagcccactctaattgatcaagttagagaagcccaaattaagggatcctgatattcaagaaatcaagaagaatatgagaagaggaaaagctatcggtttcttggaggatgagcaaggaactgtatggttgggcgagagaatctgtgtccccgacaacaaagatttaaaagatgcaattctgaaaaaagctcatgataccttatactctattcaccctggtagtaccaaaatgtaccaggatctcaaggaaagattttggtgggcaagtatgaagcgtgaaatcgcagaatacgtagcagtatgtgatgtttgtcagcgagtcaaggcagaacatcagaaacccgccggtttgttgcagcctttgaagattcctgaatggaagtgggaagaaatcggtatggattttatcactggtttacccagaacgtcatcagggccatgactctatttgggtgatagtcgatagacttacaaaagtagctcatttcattccggtaaagacaacctattccggaagtcggttagcggaattgtatatggcaaggatcgtgtgtttgcatggcgtccctaagaaaatagtgtctgatcgaggcagtcagtttacttcaaatttttggaagaaactttaggaagagatgggttctaagctgaactttagcactgcttatcatccgcagacagacggacaaaccgaaagggtgaatcaaattttggaagacatgttgagagcttgtgctttagatttcggtggaagttgggataagaatctaccttatgcagaattttcgtacaacaacagttatcaagctagtctacagatggctccgtacgaagcactgtatggtcggaagtgtcgcactccgtacgaggttgcctatcagttagagttacctcaatctttggcaggagtccataatgtgttccatgtgtcgcaattgaagaagtgtttaagggtacctaccgaagaagctaatcttgaacagatagaagtccaagaggatctgacctatgttgaaaaaccaatccgtatcttggaaacaaatgagagaagaaccaggaatcgagttatccgtttttgcaaagtccagtggagtaatcactcggaagaagaatcaacttgggaacgagaagatgaattgaatcgcggattcgagttcgattcggatcgatctctctcccgaaccctaatctttccttctcgtcgccggtcgctgtgggcattcgccgccgcctttcaacccctataaaaggatccccggtgtctcctctacccgtcgccacctttgctttcgcctctcgccatcggaagagccctagcgccccgtgcttcgccgtcgctccagtcgtcgtcgtcgctcggggaggtcgccatcgtggtcgccatctcgtcgccgtcctcgtccgcccctacgccgtcgctgtcgaccgccggagcaccgtcgtcgtcgtcaagccgatcgtcgccgccgctcttcctcgacgccgtcgccgtccgttgattttccacctccgttcgcgccgccgcgccgtcgttcgccggcgagcgtgtgcgcccgagctgccgagtcgccgagccgccgccggaggtgacgtcaccgctgacgtcatcgtcgtcgtctctcattccgacgtttccggagagtctgttttcgcaggagaagaatttgaagagttccaaggccagcaaggcaagtcacacagatcccaaacaaccctttgagcatgcaaaagagcaaaatcaccaaaacagc

SEQ ID NO: 36312 - DNA, 370 bp, Oryza sativa
  Clone ID: PAT_MRT4530_40150C.1
gggttgggtttatttaagggagagaacgtgacatccttttaattactttgggggttaattaaattggaacaagcaacttcttgaaaaattttacacctggcacacacccacaatttttctgcaaatactgatgcacaaacggcacacccacacccccaaaattatcaggctccatcccccaaattaacaaatcgatcaatttacttaccccacacgaaccaccaaacaaccaaatcttgcgccactcccccttacacgcgcacgcgttttatataacttttttctgctttttccaagcaacatttacactacacaaaacacacacaaatacttttctttttattaccaaacccaaatctacttgtaattt

SEQ ID NO: 36313 - DNA, 327 bp, Oryza sativa
  Clone ID: PAT_MRT4530_40151C.1
atgcagctcaacccgaaagcaagaactcgtcgaaacaaaacgaaagtaaaagggtggcgatgcgccgaaattgtattgaatgtgactcaatccatgcacggcaatatcctcatgaagcatattaactcaacccgacaacatgtaccacgtcacattgtcggtatcggctgaatcggccaacctagtccgactcgaactctgccgatcctagtcatagccgattcggactttagccgatcctcgctctgtttccggaacaatttccatcttgaattctgcttcgatcctatcttcatctctgatacttggattaccaaatttggtcgt

SEQ ID NO: 36314 - DNA, 276 bp, Oryza sativa
  Clone ID: PAT_MRT4530_40152C.1
gggagaagatcagtcctactttattcatgccatgaccatgcatacatatgggctttaacagatccatgaaaaatttccttgcccgaaaccgaaacatacatatttggcaaactcactcactttggctgcaaagcgaccgtgcaaagtgcgtcctcacacccaattttattaaatcgatcggggccggcacgggggggcacacttttattttgccgaaaaccccgacatgatgcccccgtaaaacggggcctggccgaaacaatccagggtgggccc

SEQ ID NO: 36315 - DNA, 397 bp, Oryza sativa
  Clone ID: PAT_MRT4530_40153C.1
acattctcgctgagctagcaacggaagcgcggggagtatacaagagggggctctagagccatatctggcgcctatgcgcccccgatccctgatcggcctcacagtgcagtccgagctagtacgcatcgaccacgtacacgacctctctagcctacccgagcactctactaaaagagctattgcggagaactgtagctgtgcgctggctgacacaaaaagtacagacgttgcgtctggcaccggcttgccaggaaatatactcgctggtgcagtcgctcatcattacgctggcgattgtaccggtccatcccacgaggcgctctgagacgctctagatgggacactgatgacgacagacgcgggtacctgagaagcgcagtctcaggaacatcaggac

SEQ ID NO: 36316 - DNA, 2064 bp, Oryza sativa
  Clone ID: PAT_MRT4530_40154C.1
atggatcatgttgctggtgttcaatttgccgagcaaatcgagcaagctttgagaaaggccgacgagctcggcgacgatgacctgagagccgcgttacgtcgtgcgaggaactcaccggctgacacggcgttccaactccctctgctgcaacttcccgtagaagaccccgtccatgccggagcagcagccacccagccggagcagcagaatgcgggacgcaggttgatgtgcccagagctgtatcgcgccgccttctctggatctgtagacaagctccaggaacttcttgtttcacccagtggaacggcagcagaggaacaaggaagaaggcatgacggccagtgcgtcctggacgagaccaccgcagggctgaacaccgttcttcacttggcggccagtcaagggaagattgggcttgtgaggaagctctgcgatggcgacgacacggccgcggcggcggtggcggcgctgctgccgaaagagaccaccaagtcggagacggcgttgcaccacgccgcgagggcggggaggcgcgacatggtgtcccttctcatcaggctagctcagatgcatggatccggcgctcccgggctactggtgacgaagaacagcgcgggcgacacggcattgcacgtggcggcacggcacgggcgcgtggcggtggtgaaggtcctgatggtggccgctccggccttgtcttgcggtgtgaacaacttcggaatgtcgccgctgtacctcgccgtcgtcgggcggtcgattggcgccgtgaaagccatcgtccagtggaagcacgcgtctgcgtctggccccaagaggcagaacgctttgcacgcagctgttcttcagagcgtagaaatcacacgcgagttattgtcatggaactcgaatctggccaaggaacccgatgaatcggaaagcactccgctgcactacgcggcgtctgatggcgtccgagagatcatcagcatgttgattcagtcgatgccatcggctatgtacatcccagacaaagaaggattgacacctcttcatgtcgcagcgaagatgggtcatcttgatgtcatccaagacatgctgaaagaatgcccagactctgccgagcttgtcgacaacgagggcagaaacattctccatctggccatcgagagaggccatgaacctgtagtgtcatacatccttggcgatccatctcttgctgagcttttcaatgagcaagacaagaaagggaacacacccatgcactacgcggtgaaggccgggaacccgcgtctcgcaattttggagagcagaaacatcaaactgaacattgttaacaacgaagggcaaacaccattcgacctcgcatcaaacacaaccggtttcttgcacatgattggttttttgctcagactgtcagccaatggagctcggttcggggcgcaacgacaagattgcatatcccaatggagcagcaaaaatgttaaggaatggaacgagaaaacgaccaagaaccttggcatcgtcgccgtgctgatcgccaccatcgccctgaccgccatgttcaacgtgccaggagggtacaactccgacggcgtggcgaacctccgcgcgacgacgccttacaacgccttcctggtgctcgacaccgtggccatggcgtcctccgtgatcgccaccatgctcctcacctacggcaggggggcggcacgctcaagcacggcgtggatatgcatgtccctcatcttcctctggatggcgctgatgagcatgatcctggcgttcatggccgccgtcgtctccgggctggacagcacgaccaccaagtacatcctgtggagcatcttcgtgctgccgttcgccttcttggtcgcgctcagcttcgtctgggccgtgccagcgccgaccttcaccacactgcttctgttgcctcgtgccctcgccggagaagacagtgggtggacgcgtcggcgcatcgggcggcgtttccggtcggtgggggtttacctgttagttctgtacttgttctggttcttgaatgctgtggcgtttttccttaccgtctatgtcgtcgtaaacgcgatctga

SEQ ID NO: 36317 - DNA, 372 bp, Oryza sativa
  Clone ID: PAT_MRT4530_40155C.1
aggggaccaaaagcaaaattttttttaagggtcccaaaagcgaaggcccaagccccaaaatgcccatagcagtcccagacttaggggggatcatatgccgcataaccccccaatcctgattggttgaacattcaacatcccggacccccataattccccaaatccttaaacgagcaacccactgggccccccccaacttattttggggcccctgggccacaaacctgggcctagaacaacccccctaagcagggggcttcatcagggaagcccccctttgggaagacggccctgccctcagggcaggccccccggccctcacatgcgggtatgcgcccaacacggatgcctggggaggaacccccaagcata

SEQ ID NO: 36318 - DNA, 303 bp, Oryza sativa
  Clone ID: PAT_MRT4530_40156C.1
ataggcccacaagacaggtgtaaccgtcctggaaactgcattaattgccacaaccgttataaggaccaacctatcagtgaccctgccgaagctggaggcctgttgggccagcctaggttcggccgaaccctagcggcgcccaatcagcctggacctccacatgtacactccggatgcactctcaatgatggttgcggggtagaatggtcatttcgccttttctacaaccgtcataccgaccctataaaaggaggagctcatttcacttcacaacacactcaagcaagctcaaatatctcttct

SEQ ID NO: 36319 - DNA, 384 bp, Oryza sativa
  Clone ID: PAT_MRT4530_40157C.1
gctgtacatggatgaggcttgtgcatttttgttgtctttcgacatagagctgccatactgccgaaagccatgctgccagatggtttcatggcaattgctgcctgatggttgaaattcaggatgagatggttctcacgtttgcttacccttgtgttgtatggatgtacttaacaagggatgtaaagttttttttgtgtttggatactactttgttttaaggttacaccgaagtgtcagttcaacctctgtccatttgttgtatggatgcacttaaaagggttaaagcttctctctttggatacactttggttcaaggttatacccaagtagtcagatcaactcagtccatttgagtatggatgcacttaaaaaaaaaaaaaaaaa

SEQ ID NO: 36320 - DNA, 659 bp, Oryza sativa
  Clone ID: PAT_MRT4530_40158C.1
ggcgggcgagcggcagcgttgaggccttgagggctggcggcggcttggatggggattggggatggggacaagctagaaggggattgactctagggttttcacaaggtgatgggctgttgggctgggctagacgcctgggcctcatctgctctggctcgttaaggctcgcgagccagctcgagctggctcgttatctctaacaagctgaaatgccagctcggctcgttaggaaattcaaacgagccgagccgagcctgtcatgagccgagcgagctaagaagccacgagcttcccgtccacccctactagccaccacgctgacggttattggcgcccgcaaccatcgtggagaatttgttccccgtagcacccaaatcttgcattctacttggcgcaacgtagatatgctgtctactacagtacaggatcatgggagtttcgatcgattctgtttcctgcaggagttcggggaggatgatttatggttagaagaggatacaaatgatgcagttgattcttcttctcaagtatctctaccgtgttgcaggacatttccgaagggttccctagagaagtgagaaacttgcccctaatgttaggtcttggcagaactctcctattagatactcactctattcaaaagtctaagaactatatca

SEQ ID NO: 36321 - DNA, 3084 bp, Oryza sativa
  Clone ID: PAT_MRT4530_40159C.1
atctgctttagggtttccgtcgatctctctccctcgcgcgcgccgccgatgtcgtcggagccgccgccgccgcagccgcagccgcaggaggcggcgggccgggaggcgtcgtcctccctctcccccgcgaaggaatctgccgccggtggaggcggggtcggggggtcgggggcaccggagacgaacacgctgtgggtgggcaacctgcccgcgcaggcggcggaggacgacgtgatggcgtccttctccccgcacggcgcgctcgactgcgtcatggcccgcgcgggcccgcggagctacgcgttcgtgctgttccgctccgtcccggaggcccgcgccgccctcgacgcgctccagggctccaaggtcaagggcagcgtcgtccggctcgagttcgcccggccggctagagctgttaagaacttatgggttggtggcattagctcctcaatttcaaaggaggagctggaggaggagtttaagaaatttggaaaggttgatggtattgcattctctcgtgatcagacttccgcgtacattgattttgacaagctggaagatgcaatttcggcacatagagccttgaatggaagagttttaggtggacaagaactgtgtgttgatttccaaaggtccaggggcagagcggaatggttggagacaggcagcttcaatggtagaactggacctgcaaagggttatggagtacgaaatcgagaatccaatcccaccaatgttctttgggtaggtttccctaatacagctaaaatcaatgaggaggcacttcggcaagcgatggctgtacatggtgctgttacaaatacaaaagttttcccaacaaggcaatatgcttttgtggagtttgcaacagttggggaagcttctaatgctaagaaaaatctagatggtcgtcttttcaatgatcagagaattcaaattcttttctcgaacagtgagcttgcgccaaataaattagataatccaacagcagtttctggatttccaaaatcagagatgtattatgatgatggtcagtatggcgcttctgattattttgatcctcgacggggaagatcaagatactttgagtacagtggtgtccctgtttctggtggtattcttccatcaccggaatctggaaatcctctcttaactggacgatctgctcagagtacattcgatccaagagaagccaagaggttgcggttggatgctgcagctgacccttatgatacaagggcaggtagtgagggtctttattctgctgggtactctcagcgcgagagtgcacgttctgagaggagctcaagtcctgctattcgaatccatggcacagtgcaccgaacatcataccttgagcacttctggcgtggtagcattgccaaaggtggatctcctcctctggatcttacacatattccactgttttgcagaccggatgttgttaattgttccgctagaactggactagatatgctggcaaagcattatagagacgcttcagggtttgatatcgtcttcttcttgccagatagtgaagatgactttgtttcttacactgaatttttgcgctacttaggctcaaaaagtcgggcaggggttgtaaaggttgatggggggactactttatttttggtcccaccttccgattttttacgaaatgttttgcaagttgatggtccagaacgtctttacggtgtagtattacacattccgcaaatgtctgctgctgctcctgcttctgctcccactcctgctgtacaaaggccacaactaactgcaccagaatcacaaccttactacgatgaaagggaaattcctttgcagagaaggtatagtatgattacgcctagcaacaatcaccatcgagatgctgatcaccgtggatctttacgtgaggattcattgcatcaattggggcaaattcttgcacgacctcgggtggatgaaggacaagtagttcagccaaaccttgccggtatccctacaaacgcaggactacaggtacagccttcactccagcctgatatgatagccactttagctaaacttttgccaagtgggcagtcatcagctctggtcactggccagcttcccctgagctcaacagaccaacctgcattaacccaaatgaatgatgcatctactcttgcaaaagtatggagacctgaaaatcaagcaatggcttctacttcatccttagagcagatcggtaatttccagcattcaggacaacagttcagcaaacaagctggagcagttcatctgccaaactatgggaacttggcaggtgcacaggagcacccaacacaacatagtgcttacaatcctgaaatgactctaaacttgccaccaccaccaccacctcctacgctgccacccagttctgctatattatcatcgcaagttggacacagtttgcctacgcagatgagtcagcaacagtatcaaccagagcagtattatatgactcaaagcaattatggtcaattggccacagttagcagttctaatcttcaggcgcaccatcaacaaattgttgcgactcctgctgcacaagctcctgttgctgcgcaattccctcctgctatgcaagctcctgctgccgcacaagctcctgttgctgcacaagcttctgctgacgaggcagaacggaacaggaagtatcaggcgactcttcagttggctcagcgcctgttgggtcagctacaacagaagcctggaaatcaaccttaaggctatcttggaaatcaaccttcaggctaagttacttattcaggtgcaaaaaaaaattccccaacttgacggcttggtccgctctctcctaacctaagcgacgacccatgttggtgtgaagttgtcgatgctacctacctgataaggacgaatataagcctaattatcgccattaatactcgaggcttatgaaaaaattctccctctttctttcttttttgccgtttgagttaagtgcacttgggctaggtgtgtttctgcttgaacgacattgtaagtttgtaaaccgtttgttttgttagtttttcctactcgttaaaaaaaaaaaaaaaaaaaaaaaaaaaaaaa

SEQ ID NO: 36322 - DNA, 3455 bp, Oryza sativa
  Clone ID: PAT_MRT4530_4015C.1
acctgtggcagcagtttgtcgccaacttccaaggaacatacaagcgccacgcgatcgaggacgatcttcatgcgttaacacagaactcaggtgaatctttgagggaatacgttcggcgctttaacaagtgcaggaataccatccccgaaatcaccgacgcttctgtaattcgcgccttcaagtctggcgtcagagatcgctacactacccaagagttggcaacaaggcatatcacaactactcgaaggttattcgagatcgttgaaagatgcgcccacgtcgacgacgcactaagacgcaagaacgacaagccgaagactgggggagagaaaaagtcagccgcagacacatctgagtcgagcaagaagaaaaatcgcaaaaacgggaaaaggaaagctcaagcggaagtcctcgcagcagagtacgcgaacccttccaagcgcccggacccacaaagcagcgacacaaagaaatcatggtgtcccatacacaaaacagatagacattctctggaggattgccttcttttcaaaaagtcgctcgagaagcacatggcgtttgagaaaggcaagcgagtacgcgttgtcgagaagaacgaggagtcgcctcctcacgaatcgaactccgcgtacccagactccgacctccatgtttcgcacatcttcggcggttccacgacgtactcctccaagcgagaatacaagaaagtggaacgcgaagtttgctcgacatggcagggggctgcacccaagatgaagtggtccgagcagaagatggagttctcggaagtagaccatcccaagaccgcggttatcccaggacggtatccgattgtggtcgaacccactattcggaacatcaaggtagcacgagtcctcattgacgggggcagctcgatcaacctcctttttgctagcactctggatgcaatgggaatcccaaaaagtgagttgacgccgactgatcaacctttccatgggattactccccaatcatcatccagacctttgggcaagattacgttgcctgtaacctttggccaagccaacaacttccgaatagagcaaatcacctttgatgtcactgaattcgatacagcttacaacgccatcatcgggaggactgcacttgcgaagttcatggccgcatcccactatgcatatcaagtactcaagatgccggggccgaaggggacaatcactattcaagggaacgcaaaactggcggtgcagtgtgacaagcgaagcctcgacatggtcgagcaaacgtccactccacccgccacgtctaagccacccaagaaagaactcgcgctcatcgccttcctccgcgacaatgccgacgtgttcgcttggcaaccgtccgacatgccgggggtcaccagggaggtgattgagcacaaactaatggtgcgacccgatgccaaaccagtcaagcaaagactgcggagatttgcaacagatcgaaaacaagccatacgagaagagctcgacaaacttctcaaagctagcttcatcagggaagtactccatccagagtggcttgccaatccagttatggtgtggaaagccaatggtaaatggagaatgtgcgtcgacttcacagacctcaacaaggcgtgccccaaggatcacttccctctccctcaaatagaccaactggtggattcaacagccggatgcgaactattaagcttcctcgacgcttactctggctaccaccaaatcagcatggccaaggaggacgaggagaaaacaacgttcatcaccccgttcggagtattttgctacgtcaagatgcccttcggattgataacagctggcaacactttccaacgcatggtccaaggcacactcagcaatcaacttggcaacaatgtcgaggcgtacgtcgacgacatcgtcgtcataaccaagacaagcgattcattgatcgacgacctccgggaaacgttcgacaacctccgacgatatcgtctcatgctcaatccagagaagtgcgcgttcggagtaccgtcaggcaagctactcggattccttgtttctggcagaggaatagaggcagatcccgagaagatcaaagcaatcgagaacatgaagtctcccacaagactcaaggaggaagccgaagaggcatttattgcactcaagtgctacctatcaaaccctcctgtactcgttgctccccaacctaatgaagaattatttctttatattgctgctacgccatactccgttagcactgtcattgtcgtcgagcgagagaaagtacagcaaccagtctattacgtcatcgaagctctccatgacgcaaagacaagatatccacagattcaaaaactgctctacgcagttatcatgacatcaaggaagctacgtcactactttcaagcccacagggtcacaattgtttcctccttccctcttggcgaagttgtactcgccgacttcgtggccgattggaccatgccagataacaagccagataaccaaagcgacaatgagacatggacaatggtgttcgatggcgcactcaataaccaaggagcgggggctggatttatcttaacatctccatccggagatcaattcaaacacgcaatccacctcaacttcagggcaaccaacaacactgcagaatacgaaggactactcgccgggatacgagctgcagccgcacttggggccaagcgactaatcgtcaaaggggactctgagcttgtcgcaaaccaggtacacaaagactacaagtgttccaaccccgagttatccaagtaccttgcagaagtcaggaagcttgagaagagcgaggagttacccgaagactatacagaggccgagaaaataacccgtaaagcaaaaatctactgtatgatcggcaacgacctatacaaaaaagccccaaacaggatacttctcaaatgcgtctctaccgacaacggcagacaactcctcctcgacatacatgaaggcatatgtgggtcgcacgccgccggtcggacattggtcggcaaagcctttcgccaagggtttttctggccaacggcccttaaagatgcatgcaacatggtccagcgatgtgaagcctgtcaattccacagcaaacacacaaagctacctgcacaagcgcttcaaactatccctctgacttggccgttctcgtgctgggggctagatatacttgggccattcccacgaggacagggcggctacaaattcctgtttgtagcaatcgacaagttcaccaaatggatcgaagcatcaccaaccaaagaaatcaaggccgataacgccatcaagttcatcagagggatattttgcagatacggactaccgcaccgcatcataaccgacaacggctcccaattcatcagcgccgatttccaagattactgcatcggcttaggagtcaaaatatgtttcgcctcggtctctcaccctcaaagcaatggataa

SEQ ID NO: 36323 - DNA, 3330 bp, Oryza sativa
  Clone ID: PAT_MRT4530_40160C.1
atgggggtagcggaaggagatgccgagtcaatggcgacgaaggtggcagatctcaccgcaagcctcaacaacatcttggtgtctcttcaagggatggagaagtggattccgtgcgtcgacaatgggatccgagagctgaacaagtccatggaggggatcgaagtgcacgtcaccgctctggaggcgtcgacgccgatgaacatgaagacgcccgtagggccccgcgtcgaagaacaacaccagggggctgctgttgagtcccttgcggctcaagagcgaaccctgggcagaggtaaacgacagtttcctcactctccaattcctttcgagttgggtgaaagttcagagaggggaaatggtgtaaatggaagttttagatatgggggaactaggttgcccaaaactgactgtcctaggtttgatggagataaccctaagctttggaaaaccaattgtgaaaaatatttccacatgtatcaagttccttttgagtcgtgggcagcctttgcaaccttgcatttcactgggaatgcagctctatggttgcagacctatgaagagctacatagtgtggagagttgggctgaattctatgtagcggttcatagtaagtttggaagggataagtatcaggagcatttgaaggagttagatgggctagtgcagatgggaagtgtggaggagtaccattctagatttgaggaacttatgcatcgagtcttagtgtataacaaggggtatgatgagacctattttgtcactaagtttgtggggggcttgaaaactgaaattaaaattgcgatcaagttgcataaaccaagaacggttgatgctgctctatctcttgcaaaaacgcaggaagaattgctgaatgaagtaggcaagaaggggtacagcaagactgtattcaaggagccatataagcctcaagggaagccaagttacaaagggaaggggattctaggtccaacccctgaggagcctaagaaggtagaggagaagccgaaatgggaggacaggtttgaatcacttaagtctgctagaagagcaagaggggagtgtttcaagtgtggtgagaagtgggggccgggacataaatgcccaaagtcagtccagcttcacatcctggaagagctgcttgaggtgttccagattagagatgcaaatgagggagaggctgaagagggagactctggaagtgaagaagaattggtcatatcagaatgtgccatgacaggttcttctggaaggaagacaataagattggaagggttgattcagaagcatcatttgttaattctggtggattctgggagtactagcaacttcttggctgaaagggtagcagaaaaattgaacctaccaataagaggaacaaccctgtcacaaataaccattgctgatgggggcaagatgacctgtgcaaaagtagctcctggggttgagtggtggtgtcagggacaatcatttgtgacagatctcaagctgctgccgttgggaagctatgatatgattttgggaatggattggttagaggaattcagtccaatgtggatagattggaagagaaagaagatgaggtactcaccaattcagaagaatgagatagaaaagcaggtgagccaaatgcttaaccagggcatcatacagccaagtgtgagcccatttgcctcaccagttctactggtgaagaaaaaagatgggacatggagattttgtgtggactacaggggactgaatgggataacaataaagaataagtacccaatgcccgtggttgaggagctgttggatgagttggcaggtgcccaatggtttacaaaactggatctgagatctggataccatcagatttggttaaaggaagaggatgagcataagacggcatttagaactcaccaaggtcattatgaattcaaagtaatgccatttggattaacaaatgctcctgctacattccaagggctgatgaacactatttttaaccatctgattaggaagggggtcttggtctttgtggatgatatattgatctatagcaaaagtctccaggaacatgtgcagatgttgaaagaggttctgactgtgttgcataagcataaattgtttgtcaaaatgagcaaatgttcctttgcccagcagcacttggagtatttggggcacattattggcatacaaggagtgccggagtggctacagacccagccaaggcagactgaggtggaagattgtcaagccatcagcatatctgttcctcgatggctggaggtgatccaggagtggtatgaaaaggatgcacaggctaaagagttgttggctcagttaagtatagacccaaagggggtaggagactttgctctagtggatggggtgattcaacatcaaggtaggatttggttggggaatcaccaagaggctaaacaagcagtgttgttggcattacatagcagtggcttgggtgggcattctggtgtggctgcaacatatcaaagggtgaagcagttgttttcctggccagccatgaagaaggaggtccatgactatgtgcaaggttgtcaggcttggcataccatcagcatggacttcattgagggcttgcccagattagggggatttgacacaataatggtggtaatcgacaagttcactaaatttgccaggtttattcctctcacacatccatttactgctttgtcagtggctcagctgtttatgcgccatgtttatgaggtgtttggaatgcctagaatcatcatctctgatagggatagagtattcaccagtgcactttggcaagaattgtttagattggctgatgtcaaactaaatatgagttcgtcctaccaccctcaaaccaatgggcagacagaaagattgaaccaatgcctagaaacttacttaagagctcagcaaagaatgaagcatcaagctaacaaacaccgctcagagagacattttgaggttggagacatggtgttcctcaagcttcaaccgtatgtgcagctatcagtggcgcgcagatcatgtcacaagctgaatttccggtattttggaccctacaaagtgctggataaagtgggaaaggtagcataccgcttggagttgccaaaggagagccagattcacccagttgtatatgtttctctcctcaagaaagctgttgctccaggtacgcaagtttgttctgacctccctgtgcagtgtctggaggaagcagatggaagtcgcccagagaagatactgcgtcaacaactaatcaagcgaggttgtgctgcggtacgcttcgggctggtacaatggtcagggcttccggaagaactggcaacctaa

SEQ ID NO: 36324 - DNA, 170 bp, Oryza sativa
  Clone ID: PAT_MRT4530_40161C.1
tgacgacacagcacgcgtacgtagcttggcctagctgagcggccgcccggggggcggggttttttgcccaatatttagcgcgtggccatttgcatatgctaatcttttattttacatcaaacatacggcttattcttggcgccgtcgaacaccaagaggccgttaaacaa

SEQ ID NO: 36325 - DNA, 1329 bp, Oryza sativa
  Clone ID: PAT_MRT4530_40162C.1
atggcggcggtagccatgtcaggctccatggaggcttctccggcggccgcggtggtgccctgccggcgagacatgaagcggcggttacaggaggagattgacgcggtgcgtggcctcctcggcaaggcggaggcgttggtggccgtggcgagcgaggacgtcaatggcagcgcggcggcgtcggcgtcggcggtggcgaagcgctccccacgacgagtccggtcgcctcctcgccgtggtaggagcaatcgcgaggagctcgatcgagcgagggatcgtcgccatggcggcaggagcgatcgcgaggtgttcgatcgagggagggatcgccgccatggcggcaggagcgatcgcgatcgcgaggtgttcgatcgagggagggatcgccgccatggcggcaggagcgaccgcgaggagctcgatcgagagagggatcgccgccgcagccgcagccgccgcagccattgcgaggagctcgatcgagagagggatcgccgccgccgccggagcagcgatcgcgaggtgttcgatcgagcgaggaagattcctcgccggcggccgcacgaggcggagtccgaaccgcgcaagatcgaggccgcagcgggcgcgccgccgcaatgccaggccaaagacggcgagatcgcgccggcgatggacgcgtcgccgtcgctctgcgagcgggaggagggcgagatcgccgacgatcatggcgcggcactggacatcgacatcgacatcccccgcggcggcgccatctctcctctagtggtgaacaaggctcagtcctcaccgctcgccaagaacgacgacgacgacgagctcgtcgacatctccggcgaagcctccccggtcgcaatcgagaacttcccggaagccactaaatcgagcatcagtccgagcagcgatgaaccctcactgggaaactactccggcgacgacgacgacgacgacggcgacgacggtgagagcagcaagaaaccggacacgacatgtcttcccaccgaagccgcggcgacggcgacgacgccattggtggcggcggcggcatcacctccagccacacagacgagccagctgatcgccatagccaaggagaagcagaggctccggcgagagctcgagaggagggcggcgcgggaggcgctggaggcgatggcgagggcggcgcggccgatccgcgacgacatcgccgccacggacatgatgcagctcggtctcttcgagacgcagtacatcgtcagcaccgagaaatcccaggatagcctgcgccgcggcagcggcggcctgcttcagcagctcggcttcttcctcaaaccagagtattcatga

SEQ ID NO: 36326 - DNA, 246 bp, Oryza sativa
  Clone ID: PAT_MRT4530_40163C.1
ttttggtttttttttttttttttttttttttttttttttattttttttttttggttatattttttttttttatttttgttagtttttacaaactaaaataatctcataacttattaactttattagcaagggtaaaacattatttacaacatacagaaccgaccttggccttaaaaagaagaagacaaagagcaagcgaatgacactaaagagaaaactgtcaaacagggaaaaccaaaaaaagga

SEQ ID NO: 36327 - DNA, 641 bp, Oryza sativa
  Clone ID: PAT_MRT4530_40164C.1
aagttgcatccatcttttaccaatgcacagactttctatattgtcaagatgacatacttgtttgctttaccaactagatttgcttttgttttaaaccatgatgctgtattgatttcaaatgctgtactaactaggacttctgctggccttccttgtctccttccacccaccaatggaggctcctctccacctccccctcgccaccgcctcctcctcctcctccggcgccaccgccgacgagtcttcctcctccgccgctcgccactgtcccggtggataacccggcggcgaaccccaccgtgacgtcgacgacgaacccggcggcaatgccggggacgcagacgacgccgtcgctggcgaacccggtggccgcgggcggcggcggcggcggcggaggcgggagctggtgcgtggcgagcccgagcgcgagcacggcggcgctgcaggtggcgctggactacgcgtgcgggcagggcggcgtggactgctccgccatccagtccggcggcggctgcttcaaccccaacaccgttcgcgaccacgcgtcgttcgccttcaacagctactaccagaagaaccccgtccagaccagctgcgacttcgccggcaccgccatcctcaccagcaccgatcccagtaag

SEQ ID NO: 36328 - DNA, 387 bp, Oryza sativa
  Clone ID: PAT_MRT4530_40165C.1
actaacaccacacagtgatacgcatgggtgaggatatgtcacggaagggtcacatatcacacttaatttaactacgagacccaccagacataacataaagagcataagctacacatgctacactcaaggccatcattctgtaaaccacattcgaacatacatgccacagctgagctaaacttaaacattatacgattagacattagccacacatacgttatagccataaagcggctatactattaaactcgtatatatccgcttcaaatggaccatgttgctgagaactgatcgccgtcattgcaggaatgacctcagcattgattggatgaattactcgcatgaccggtcgctcgcactgcaggagggccatgtgtcatcgacata

SEQ ID NO: 36329 - DNA, 243 bp, Oryza sativa
  Clone ID: PAT_MRT4530_40166C.1
tctacttcgaacagagtcaagctcaagcccaagctatgttggccctaaacatgcccggcatatgcgggatttaaccaagctaccacactgctccctgtagcatttccaccggcggtggtatctggtattgaatggtagcagtataatagcccaggagagaaaaataaagtcatgcatcatcgggtgtgacaagttgaaacatcggggtgatacaaagttgaataaaaagggcatgcaaggttt

SEQ ID NO: 36330 - DNA, 1730 bp, Oryza sativa
  Clone ID: PAT_MRT4530_40167C.1
cccgggctgcaggtcaggaccactcccttccggcgcggcggagatcggaatcggcggcgatggcggcgacgacgacgagacccctccccctcctcctcctgctgcttctgcctcctctcctcctcctgctgctctccttccacgccgccgccgccgccgccgccgaggagttcccgcgcgacgggcgggtgatagagctggacgagagcagcttcgaggcggcgctgggcgccatcgactacctcttcgtcgacttctacgcgccatggtgcggccactgcaagcgcctcgcccccgagttagatgaagctgcaccggtgttggcaggactgagtgagcccatcatagttgccaaagtaaatgctgacaagtacaggaagcttggatcgaaatatggagtggacgggttccctacactgatgctttttatccacggggtccccatcgaatacactggttcaagaaaagctgacttgcttgtccgcaatcttaataagtttgttgcacctgatgtttctattcttgagtcggactctgcgatcaagagctttgttgagaatgctggcacgagctttccaatgttcattgggtttggggtgaatgagtcgttgattgctggttatggagggaaatacaagaaaagagcatggtttgctgttgcaaaagatttttctgaggacttcatggtcacttatgattttgataaggttcctgcattggtttcacttcatccaaagtacaaagaacaaagtgtattttatggcccatttgaaggaagtttcttggaagattttatacggcaatccctgcttcctttgactgtccccatcaacacagagacactcaaaatgttggatgatgatgacagaaaagttgttcttgcaattttggaggatgattcagatgaaacttcttcacagttggtaaaagttttgaggtctgctgccaatgcaaaccgtgacttggtgtttgggtatgtcggaatcaaacaatgggatgagtttgtcgagacttttgatatttccaagagctcacagctgccaaagctaatcgtctgggatagaaatgaggagtatgaagtggtggaaggctcagagaagttagaggaaggtgatcaagcttctcaaataagccaattccttgagggatatagagcaggaagaacaacaaagaagaaagtcagtggcccatctttcatgggtttcctgaactctcttgtcagcctgaactcgctatacattcttatatgtgtcttcgctcttcttggtgtcatgatatactttactgggcaagatgatactcctcaggtaagacgagctcatgaagagtgaaagaagcttaccaaaagaggctatccaccaagagatacatatatatatagttcagaggtcaggtttcaaacttccaagtgatgcaatcctgaaggacctggttttattggttgattctgacattattgtatctctgtcggcaattatctagttgtgccttgtgcagttgtgctctcctgcggttctgccttctgttcctctgtttatttgttaattagaactaaaactagcttccacatgtgcatgatagaaaatgtgattcttagttcagttctaatttgaacagttctgtgaaaaatatttttgttgtccaactattgccaaaacgtttgtacaagtgatacaatagtaataaggcgtgtatatctaaaaaaaaaaattgtttactactagttctcc

SEQ ID NO: 36331 - DNA, 301 bp, Oryza sativa
  Clone ID: PAT_MRT4530_40168C.1
ggccttggttttgttgcttgcgatggtcacactggagcatgcttcgatggtgagacactggcgcgtgctattcttagaagcgtcggtgttggttgtgactgtaccgacaacgttcatgaggagtttgacaggaagctgttactactgaaccacctgtggctacagatatattgtcggacactataaggggaacgtcagatatgttgctgattgatgtgacccggagcgcgatactgtcaggagtagctcctctattgggaagagctattacctggctgccggccgggtctgcagcatttga

SEQ ID NO: 36332 - DNA, 297 bp, Oryza sativa
  Clone ID: PAT_MRT4530_40169C.1
ataatcgacacccaccacaatctacagaataatatatcaagacagaagatcaacatacaagccaacatacgccaagacaagacgccagatatcgacttcagagataggcacggctagtcccctacggtgtctccggatactgtcaggagagacgaaagcgctatctttgatctcgccggacacgaactcgaggaggaagactaccctgttgtcgactacgagtcagaccttcagaccaccatgtcgacaacagttatatatgctaccctaaatattgtactggtgtgattatggtga

SEQ ID NO: 36333 - DNA, 4418 bp, Oryza sativa
  Clone ID: PAT_MRT4530_4016C.1
tacatagaatttacgtaattgatcaatgttcctaagaatttgctaactcgcggccatcaccgtctgcaatcttaaatgcacccggccgcaagacttgcgtgattgtgtacggtccttcccatttgggtgagagcttgttacgccctgcctggctttgaacccgtcagaggacgtagtcactaatcgaaagtgtgcgtgctctgatgcgcttctcgtgatatcggcgaagggcctgttggtaactggctgctctgacggcaactctttctcgatgttcctcgagtagattcacgtcgtcggttcgctgttcctcctgatcctcgtcggagtacttatgtactcatgtactctgatgctgtaactcagtagggagcatagcctctgagccgtacatgaggaagaagggtgtctccttgttggacgttgtcggtgtggtacgcacggcccatagtacagagggaagttcttcaacccacttcttgtcatgtgacatcagtctgtcgtagacacgggtcttaattccttgtagtactatgccatttgccctcttgacctgtccattgctctgagggtgagaaaccgaagcgaagcagatcttgactcccagcctaatgcagtaatcctggaagttggcactgatgaactgggagccgttgtccgttatgatgcggtgaggcaatccatatctgtagaatatctctttaatgaatttgatggcactgtcggccttgatttcccccgtggaggtcgcttcccttgtcctcgtgggaatggtccgagtatgtcgagcccccagcatgagatcggccaagtgagagggatagtttggaacgcttgcgctggtaactttgtgtgtttactatgaaattgacaagcttcacaccgctgtaccatgtcgcaaatgtctttgagggcagtaggccagaaaaacccttgtcgaaaagcttttccgaccaatgtgcgatcggcggcatgtgacccacagatcccttcgtgtatgtcgaggaggagatgtttgccatcgtcgaacgagacgcatttgagaagtaccccgtttggtgagtagattttggcttgacgggttattttctcggcttctgcatcgtcctcgggcaacttgtcactacttatgaatttaatgagtgggatccgctagccgtctgtggtctcgatgtcggcaatggcacactctgcctctgtagcccccgagctgatgtcgggggcaactgtgctatcttcgtcgtttgcctctttcaccgatggctttgtcaggacgtccagagaggtgccgggtttgagtggctcccgtctggacgcacgccgtgctagatcatctggttcgatgttgtccttgcggtatacgtgtcggacctcgattccatcaaatcttttttccagcttcctgagtacttctgcgaggtacttggataactctacctcggggctagaccacttgtagtctttgtgcacctggtttgcgactagttcggaatccccttttacgatcagtcgcttgactccaagtgcggctgctgctcttatcccagtgagtagtccttagtattcggtagtgttgttggtcgccctgaagttgaggtgaattgcatgcttgaactgatctcccgaaggtgatgtcaagatgaaccctgcccctgctccttggctgttgagtgcaccgtcgaacgccattgtccatgtttcgttgtcggtttgactgtctgacctgttttcaagcatagtccaatcggctacgaagtcggcgagaacctgggacttgatggctgttcgtggcacaaagtggacatcaaactagcttagctcgactacccatttcgcaatgaggccgacaacgtctttgtttctcacgacttcaccaagagggaaggaggaaacaactgtgaccctgtgggcttggaagtagtgacgtagctttcttgacgtcatgattactgcatagagcagtttttggatgtagtagactggtctttgcaccttctctctctcgacaacaatgacagtactcatggaatatggcgtggcggcaatataaaggaataattcttcattaggatggggagtaacaagtacaggggggtttgacaggtagcgcttgagtgcgatgaatgcctcttcggcttcttgtgtccatacaaatttgtcttgtttcttcagcaaagcgaagaaaggttgtcctcgttctcccatcctagcgacgaaccagcttagtgccgccatgcatccagttagcttctgtacttccttgagtcttgtgggcgacttcacgttcttgattgccttgatcttctcgggattttcttcggttcctctgccaaatacgaggaacctgagcagcttgcccgatggtactccgaacgtgcacttttctggattgagcacgaggcgatatcatcggcggttgtcgaatgtttcccgtagatcgtcaatcaatgagtcgcttgtcttggtcttgacaacaatgtcatcgacgtaggcctcaacattgttcccaagctgatcgttaagtgccccttggaccgtgcgttgaaaagtgtttcctgcagttatcagtccaaacggcatcttaacgtagcaaaatacaccgaacggcgtgataaatgctgtcttctcctcatcctctttcgccatgctgatttggtggtaaccggagtaagcgtcaagaaaacttaacaactcacaaccagctgttgagtcgaccagtttcctgggtggctcagctgtggcgggtgggctgggcgtgtgctcgaccatgtcgaggctctgcttgtcgcattgcactgccagctttgcgttcccttgaacagtgattgttcccttcggcccaggcatcaagagcacttgatatgtgtagtgagatgcggccatgaacttcgcgagagcagttcttccgatgatagcattgtatgttcgtgggattcccatagtgtccaaggtgcaggcgaagagaaggttgatggagctgcccccatcgataagaacccgtgcgaccttggtattctaaatagtgggctcgaccacaatcggatatcgtcctggcgtgacagcagtcttggggtggtcttcatctgagaactcgatcttctgttctaaccacttcatcttggtcgcagcccttcgtttgcccttctccaatgccagttgctttgcgagcgactttttgaagacgaagcaatcttccaaagagtgtctgtctgacttgtgtatggggcaccatattttcttcgtgtcgttgccttgtgggtcagggtgcttgggagggtccacgtactctgccgcgaggacttccgtttgagctttcgttttcccactcttgtgactcttcttcttgcttgattcaggtgcgtctttggctggtttcttctctcctcccgtcttcggcttgttgttcttgcgtcttagtgcgtcgtccgcgtgagcgcatcaatcgacaatctcgaatagttttcgagcagtcctgatcctccttgtcgccaactcctgggtggtatagcgatctctgacaccagtcttgaaagcgtagatcacggaagcattggtgatctcggggatagtatttctgcactcattaaagcgtcgaacgtagtccctcaatgatttgcccggattctgtgtcaacgcgtgtaggtcgtcttcgatcgcatggcgcttgtaagttccttggaagttagcaacgaactgctgccacagatctgcccatgaagaaatcgagtatggccggaggtgaacaagccatgaacgtgcagatcctttcaacgccactggcaaataattcgctaacgcgttgtcgtccgctccggcagtgtagagtactatcacgtagagcacggttgaaagctttacatctgccgctgggggtggtgggttgtcgatgatcgtatgtcctccgtggatttctgtctgacaatgaggatgatgaggatgatgacgatgacgatgagtcacttggttccggtgtacgattacgaggatgacgtccgggttctcgagaatcctgtcgtcgcctcccgttgatgtcccggcgacgatctccatcgtcatcatcgttatggcggcgtcctcgaccagtatcgcctggcatccgctgttcgcgatcatcatgttcgtggcggctgtggcggttatcacggtctcggttttcgcttgggtgtcctcctcgctcctcgttctcgcgacgtcgtgatgagacgcgatgtcaggaatggttttcattgtctcgcgcgtgtcgtacttctcggcggccattaagatggtcacaaagatcgccggtgccgcgaggtggaggggtgtcttgtcgaggtgatgtccgctgctcaggtggttcaccatttgcaccgctagctggcggttgttctggtttgctccggcagtggcctcctcgaacgcattactgagattggcca

SEQ ID NO: 36334 - DNA, 457 bp, Oryza sativa
  Clone ID: PAT_MRT4530_40170C.1
gcggttttagagcgcgagcggccgacctgatgctgatgccggttgtgtaatcagttgagcgcgagaactaggcccagaagggtgtgaagatcaatgtgcatggggaaatgaaccgtggcgataatgttgccaggcgtgcacaaactctatatttatgtgtgctggatgccacaattattagccagcagctactactgcaggcatggagcgaacctgagaaccagcttaatggcggaaccgatgtggaccgggtggcacacccgtcatgatcatcggtggtgacggctactgtgcctgaggcaccgcgctgaacctgtcagggcgcaactatgaggcgtgcattgtcgacaacctttgcacgcgtaagtttgacctgacccttgggctggacaccatgacccccacaccaccatgcatgagcgtgtcacggtctggggcgagcagttagggaagcaca

SEQ ID NO: 36335 - DNA, 612 bp, Oryza sativa
  Clone ID: PAT_MRT4530_40171C.1
atgtctggctctgccacttctgccgccttgcgattcgcgaattgtggatctcaggcctctacaaggcctcctccaccaccctccaagagcccgtcctacatcaacccctctgtaccggacatcttcattgagctctgcattggtcgtcgcagtccagcaccccgactatccacaacattgcctcttgcttgctgccaccgagtttcctctgtctatcgctcccgatggcactgccgacttggtctagagtaccaatcttattcgagctccggttgccaccgaccccatgtcctcgctctgcctcgtcccccgctgcttctactagagtttgccgtcaagatgcagatctttgtgaaaaccctgaccggcaagtccatcacccttgaggtggagtcatccgacacaatcgacaatgtgaaggcgaagatccaggataaggagggtattcccccggaccagcagcgcctcatcttcgctggcaagcagctcgaggaaggacgcacccttgctgactacaacattcagaaggagtcgaccctccatcttgtcctccgtctccgtggtggcctgtgggcttgcagtattggctcgcctttttatctcttgctatag

SEQ ID NO: 36336 - DNA, 210 bp, Oryza sativa
  Clone ID: PAT_MRT4530_40172C.1
atgggagggagcaaggatcttgaagagacctcagttgcagatcatggcgcggccaccaatcacgaggttgtgggcttgggtgccgccctccgcgacgccatcttgggagagggcaaggagcttgacgaggtcaccgctgcctgctgctcactagacctcggccatctcatcgcctgccaagagaaacaaggaaataagagggagagctga

SEQ ID NO: 36337 - DNA, 855 bp, Oryza sativa
  Clone ID: PAT_MRT4530_40173C.1
atgctcgggatgcggccatgctcgggaggcctgcctccccaccggcagcggctgttagagtcggctcagggaggtggcggcggcgcggggaagggagcggcggatccggcagctgtgttggtggggagagccggatccggcgcctgcctccccactggcggcgacggcggcgatgctagggagggctctcggcgatgctcgggaggcctgcctccccaccggtggcggttctcggagtcggctcagggagggggcggtggcacaggggagggggcggcggatccggcggctgtgttggtggggagagccggatccggcgcctgcctccctaccggtggcggcggcggctcttggcgttcgcgcgcccgattgagatatgtgtcattcgtgacggccggatgcccgattgagatattttaccacatcactgacctttgctctgtgatgggggttctacccgatagagatgaggcttgccgcccgttacagatggccaaacctgtgctaatgggtaaacggggtgctagagatgacgatgacattgtggatcatgtcatagatgtcagcattgcaaaacatcttttgtcacctctccatgctgttgttgtcctccatatggattcagatccccaccctcgacaatatcctcatcgccaaatctccgagttctggcggatgattatttctgccgggcacccggcaccggcggagatcataaacttgctctcctcgaaaccctacctacccaacaaaatcaacaaccagatcaatgatccccctcttaaaaaaaatcatgatcatgcaaacgacccaacaataagatgggagcatgtaataccccgaatttcgaattag

SEQ ID NO: 36338 - DNA, 397 bp, Oryza sativa
  unsure (1)..(397): unsure at all n locations
  Clone ID: PAT_MRT4530_40174C.1
gccgcttctatcggccctgccccccttcgccttcctcgcctcgcctcgcctccccacttcgcttcactgcttccctactacacactcgccgccattccccccgccccaaatattctctcgcattcgcgttcccaccgcctcgccctagatctcaccacctcgcgtcggcctccaatggggtgcttcctgtccaagccggcgggggcgggtcccctcccgnncaacgacgccgccgcgctcccccgccgacaaacccgcagatcccgangcggcggcggcaacggggtggaagttcaagcttttggttccctttaagtgaagggttaattgcgcgcttgggntaataatgggtaaaagctggtttcctgtgttaaaattgttantcggttaaaatttc

SEQ ID NO: 36339 - DNA, 409 bp, Oryza sativa
  Clone ID: PAT_MRT4530_40175C.1
gcacgagggtttttaacaaggtcatgcgggccgagtgggagaagtacttgcttggcaaagctgaactggatggattgcataggaagaacaagaaaacatctcagcaactaaaagggtttggtgttctggatggggaagttcctatgaggtctggtgagagtgcaggtcctgttagcattagcaaggttgaggctaatgccttacttgcggctgcctctgaaataagcactgtaactaaggaagcaaatcttgctgatgattcaaatgtcagctgcaagaagagatcattcggaaaagggaaagggacagggaaatttaagaaaaccatggcaaagagagaagccagtaagttgagaaacagaaatactacagaacatactgatttggaagttgaaggtcaatcaggaaa

SEQ ID NO: 36340 - DNA, 1918 bp, Oryza sativa
  Clone ID: PAT_MRT4530_40176C.1
tgcccaatctatctgtcttctccataagagagcatctcaggtgtagtttttagtttctctctctaaaaatgggaggcaactgaggaagaaggaagaacacggccttcatttcatccaattgagtcaagagaggaaatctgaatttgggggcggccaagaaatggagcagtatgaggtgctggagcagattgggaaggggtcatttggctctgccctcctggtgagacacaaggttgagaagaagaggtatgtcttgaagaagatcagacttgcccgtcagaccgacagatgccgccgatcagcacaccaagagatggagctcattgcaaaagtaaggaacccttacattgtggaatacaaagattcatgggtggagaagggttgttatgtgtgcatcgtgattggttactgtgaaggaggagacatgtcagaagccattaagaaggccaacagtaattatttctcagaagagagactttgtatgtggcttgtgcagctcctgatggcacttgattacttgcatgtcaaccatatccttcatcgtgatgtgaagtgctcaaatatatttctgacgaaggatcaaaacatacggctcggtgattttggtttggccaaagtattgacttctgacgatttaacttcatcagttgtgggtactcccagctacatgtgccctgaacttcttgctgacattccatatggttccaagtctgacatatgggcactaggctgttgcctctatgagatgactgctttgaagcctgcatttaaagcatttgatatgcaaacactgataaacaagataagcaagtcggttctcgctcctctaccgaccatctactccggtgcatttagggggctcatcaagagcatgctgcgaaaaagtccagatcacagaccaagtgctgcagaattgcttaagcacccacaccttcagccctttgtactggaactccaattgaagtcgagtcccgctcgcaatcttttcccggatacaaataaggcttcatgttctgatgatgaaaacaattggaaggctaagtacagcaagagccattcatttaaagtagacaggattgtaaaagttgacaaagttgctgctaacaatggccatcctagttctactggaactgcaaaagattaccaagaattgctaaaacaaccaatggatgagttgttaggacaattaaccgagaaagttgttgatgaagtgatacatggaaatcattcaagagtaacaaaatctccagctcctactccaagaagggcatcatcaactcctagaatacgactagaaccttcaaagacatttcatgctagagcagctgagactccaccatccaaatgttcactggaacgagcaagtcaacctacaagacgagcatcaaccccggtgaacatgttgcaaactcctgagaaacggcagggcgccgacatcctcaccagactaaaatcacccgacgtttcagtgaactctcctcgaatcgacagaatcgccgaattcccgataccatcatttgatgatgaacaattgcaccccacaaccaagctcaagctctatccaccatccatcactgaccaatcgatcaccaaggacaagtgcacattccaggttctccgaagcgacagcagcaagaaccacaccggagacagttctgatcccagcattcttggcactgacagtaatccactcatcacgagctcatcggattggatgaagcagaggagattcgacacgacgtcgtaccgtcagagagccgaggcactggaaggattgctggagttcagtgcacagctgctgcagcaggagaggtttgaggagctggggatcttgctgaagccatttgggccagggaaggcgtctccgagagagacggccatatggttgtcaaagagcttcaaagggactggattgtga

SEQ ID NO: 36341 - DNA, 1669 bp, Oryza sativa
  Clone ID: PAT_MRT4530_40177C.1
ccggccgggatcacacctttctcgccggccgggccgccgcccgccgccgcatcgccgctgcagcctccttcccccttcaccgccgtacaccctccagccagccatggcggagcagactgagagagctttcctgaagcagcccaaggtcttcctttgcccaaagaaatctggcaaagggaagaagcctggcaagggaggtaaccgcttctggaagaatattggccttggcttcaagacaccccgggaagcaattgaagggacctacatcgataagaaatgcccattcactggaactgtttctatcagaggtagaattattgctggaacatgccacagtgccaagatgaataggacaatcatcgtacgcagaaactacctccattttgtgaagaaatatcagcgatatgaaaagaggcactccaacattccagctcacatttctccatgcttccgtgttaaggaaggagaccatgtcatcattggccagtgcaggcctttatcaaaaactgtgaggttcaacgttattaaagtcatcccagctggttccacagcaccttcccttccattctatctgctaacatctggcactacaaattctactggaaatcatcggtatcgcgacgaatataatccgttatgcgatgatttcccaccggaatttccaccgccagataccgcggcaatttcaatcttctgtgtcgatcccaatggctgctgcaacttcacaacggtgcaggcagcggtcaatgctgttccaagcttcagcaagaagaggaatgttgtatggatcaacaagggaatctactatgagaaggtgacagtcccagcaaccaagcccaacatcacatttcagggccagggattcgatctgacggcaatttcttggaacgacactgccaactcatcgcatggaacgttctacagcggttcagtgtccgttttcgcaacaggctttgttgcgaaaaacatcagcttcattaatgtggcaccaatcccaagacccggtgatgtcggtgctcaggcggtagcactgaggatcggcggtgaccaggcagcattctggggttgcggcttctttggtgcgcaagatacgcttcacgatgatcgtggccggcattacttcaaggaatgcttcatccagggttccattgactttatctttggagatgccaggtcactctatgaaaattgcagggtgatttccatagcagatcctgttcctgcaggggtgagaaccatcacaggttcagtcactgcgcatgcccgggaatctgtagacgacaacactggctactcttttgtcaattgcagcattggcggcaccggcaggatatggctggggagagcatggagaccatattccacagtcgtcttcgcctacacttcaatgtcagacatcattgcctctgaaggatggaatgattggaatgatccttcaagagaccagtatgcatcctctctctattcagtgtcaattgttacctgcatgacaaaaaggactgtgttctatggagagtacaggtgcacgggtgatggtgcaaacttatcagatagagtgccatatgctcagaagcttagtgatgtgcaggttttgccttacctgaacacttcttttattgacggagacagatggctaaagccatactgtgattcactgatatctgcttga

SEQ ID NO: 36342 - DNA, 4320 bp, Oryza sativa
  Clone ID: PAT_MRT4530_40178C.1
atggcgcaggatagtaagttggatttgctgttgaagtcaatggcggaaaacgagaagaaacgggaagaggctgaggcccgcatgcgagctgatttcgcagaacttaagaagtctctggagatcaggttgcccgcggtggagaagaaggtggatgacctcgggatcgatctggtggcgctgagtaacaaggtggagcaattggagcacaaccccaatcagcctccttcaggagatgaattcgccggcaaggtgacgaccgtggcgttacccaagaaggagccgatctacaaggcgacaccaccgaccaaaggtacgcgtgagcttgaccccacttctcctgttcatcattcaaatgagggttggggatctcagtttgaaaacacggggttcagtgccaggatgattggtaatgtaccgcccatgtcctgtccgcaattcaacggagataaccctcacatgtggaaatccaactgtgaagtgtattttgatgtgtatgggattcatcctcaaaattgggtcaaggtagccactctgaatttttgtgggaacacagcgttctggcttcagtcagtgagggctcagttgatgggggtcacttggtttgaattatgtgacagagtttgtgctagattctctcgggacagacagcaagctcttattagacagtggattcatgtttctcagacttcttctgtggctgattatgtggataggttcgatagtatcatgcatcaattgttggcttatgggggggcaaatgaacctatctattttgtgaccaaatttgtggatggactcaaggacaatatcagggttggtgtgatggggcacaggccacaggacctggacactgcatgtactttagctcttttgcagaaagaagctttggaaggtgtccaggctatcaatgtcaagaaaaatgactctggaacctttgttaaatctaaatccacctcaaatttttctcagtctgtccttcctagcaagagtacagccttgataaatactgaagagaaaaggagtgcagagtttagcaggcccaaggatgataagatatcggccctcagagcttacagaagatcaaaggggctctgttttgtttgtggtgagagatggagtaaggatcacaaatgtgctacatcagtccaactccatattgttgaggagttgattcatgccctgcaatctggaggtgaagaaaatagctgttctgatggaactcctgaaattgatgacgattctttgatggcaatatcatttcatgctttgcatggtaccgattctcctaagtcaattagactcagaggctgggtccagggtacagagttactcatgctggtggattcgggtagtactcattcttttattgacactaagattggctccaaattgcatggtgtccagaaattacttcagaccattaaggtacaagtggctgatggagggcagatagcttgtgatatgtttttgcctaagtgcaactggtggacacagggtcataattttaccagtgatttcaggttattgccactgggtaattatgatgtgatattgggaatggattggctggagcagtttagccctatgcaaattgattggattcataagtggcttgaattccaacatcaacatcagctggtgaaacttcagggcattgttcctcagactgattgctgtccaaccataacaggagcacagttacagggtatgtccaagaatggatctatcatgtgtatggttcagctgaatgctgtggaagttcctgaacatgctgtcatccccactattgtacaacccttacttcaagaatttcaggaactattctctgaacctactgaattacctcctaagagaacatgtgaccaccatattcccctcattgaaggagccaaacctgtcaatttgagaccctaccggtataagccagctctgaaagatgaaatcgaaaaacaagtcactgaaatgcttaagactggagtcattcaacccagccacagtcctttctcttctcctgcccttcttgtcaagaaaaaagatggatcctggcgtctctgtattgattatcgacagttgaacaatatcactgtcaagagcaagtatcctgtcccagtaatagaagagctgttagatgaattatcaggggcccagtggttttccaagttagatttaagagctggataccatcagatcagaatggctgagggagatgagtataaaacagccttccaaactcattctgggcattatgagtacaaggtgatgtcctttggccttactggggccccagctactttccttaatgccatgaatgacacattgtcccctgtcctaaggaaatttgtcttggtcttttttgatgacattttgatttatagtcccacattggaatcacatctgctccacatcagaacagttttacaattactctctgctagtcagtggaaggtcaaactaagtaagtgttcctttgctcaacaagagatatcttatttaggacacgtgataggagttcaaagagtatctactgacccacgaaagattcaagatgtagttaattggacccaaccaactactatcaagaagttgaggggctttctgggcttagcaggttattatagaaaatttgttaagaatttcggtgtgatcagccgacccctgactcaattactcaaaaagggaataccattcaagtggactgaggaaactgaaactgcttttcaacaacttaaacaagcattatgctctgctcctgtactcgcattgccagatttttctaaatcattcactgtagaaactgatgccagtgaacttgggattggagctgttctttctcaagacaagcatcccattgctttccttagcagagctcttggtcctaaaactaaacgcttgtccacctatgaaaaggaatacatggctatattgctggctgtagaacattggagaccatacctgcagcatggggaatttactatcctcactgatcatcatagtttgatgcatttaactgatcaacggttgcatactccttggcaacagaaggctttcactaagctcttgggtcttcagtataagatctgctatcgaaagggttcttctaatgctgctgccgatgctctttcaagaagggagccatttaccagtgagatacacgctgtgtctgaatgtgtaccgctatggatgcaagacctgattcaaggttatgatcaggatcctcacaccaagcagatcatttcggagctaattgtcaatggtagcagcagaccccactatcaattgtgcaatggagtattgaagtacaagggcagaatttgggtgggagacaatcctgcattgcagcacaggatcatcactgaggttcactctactcctttcggtgatcactcaggttttcctgtaacctatagaaaagctaaaggcatgtttgcttggactggaatgaagaaaatgattaagactcatctgcagtcctgtcaagtttgcttgcaagccaagccagacagggctaaatatcctggactactgcagccgttgccagttccagctggagcatggcaagtgatttcgcttgattttatagaagggttgccacgttcatctcattataattgtgtgttggtggaatggcataatgagcggaagctgatgcaacagttattacagcagcatcttcatcgagctcaacaacagatgaaacatcaagctgataagaaatgcagtttcaggcagtttaaagtaggggattgggtgtacttaaaactacagccttatgtacagacgtcggtagctcaacgtgcttgtcacaaattggctttccgctactttggcccatttcagattcttgacagggtgggatctgttgcttatcgcttacagctaccagctggcagttccattcatccagtgtttcatgtgtcccaattacgagctgctgtggggttttctaaaccagtgcaagaggaattaccatcttccttgggagcatttcagattcccctccaattcttggataaacgtctgactaaaaaagaggattccacttgggaggatatggaggatttatgcaatcgctttccgcgagcattggcttggggacaagccaattttcaagaatgggggattgtcaggccaagccttggaaggactcaggctccaggagggagggctgacgacaagtctgaagaatctgaagaactgaagatggacggcaaggcagatgacgcgctacagggcgacagggaggaggcacctatcctgggccgggggcgtcgtcataagaagcccagtgtgcgtgttgtcgggccagagtgggccaagtaa

SEQ ID NO: 36343 - DNA, 220 bp, Oryza sativa
  Clone ID: PAT_MRT4530_40179C.1
aggcggcggcggctctcaccccagagatgcggcggcggaggaggaggcggaggcggcggcgaggacgacgagctcgagacgacagcgagatatggcggcgtcggcgcggggatttgccctaggcagtggcagcgaaggagagaggctgagagagatcgatcggccgaaaacgttaagtgttggtggagaagacgagggcgcgcatcaggaatatatatag

SEQ ID NO: 36344 - DNA, 460 bp, Oryza sativa
  Clone ID: PAT_MRT4530_4017C.1
gtggattactcatgcaacacctgccagtttccattattcttttatacttttttattgaaaaaaaaggaattttcttacttctgtcaataaatataatactatggacaagcacttttgtttgattgtattaaaagaaatactaacaaatgttaatgagatataaagagaatcctcctatccagtttactccttttgttggtgctatttgattgtgacttaaacggaccgatgatgtaaattcatttgttatacacttactctactctgcacaataggtctctgattaaatgccgctgagggagggtttgttctggttgatgaattttcaagcaaatctgttaatgatctttacaaggtttctatgtgtttttatgtgttttctgtgagatctttacaaggtctcggtttggggtacaaattcacattcgatctgcatatcattttggttttcaagtgaagc

SEQ ID NO: 36345 - DNA, 392 bp, Oryza sativa
  unsure (1)..(392): unsure at all n locations
  Clone ID: PAT_MRT4530_40180C.1
gggatttccagcataaaaaaacactaaatggagtaaacataaacatgtctcttaaatattttggctctttctttgcagttgtttagaaataagtaggaaacatcaagtagtatcttggccagtccaatctctgcagccctatttgctagattggagcctacagtgatcatgatgatttaatattaaattaaaataaccatatttctccctcttgaaggaaagtacctggaaaaaaccatcatgcgtcttcctttcgtctttttatgaaatatcagtgtttgcatcaaaacaatttcactgtgtggtaaaagaaacacaaaattactttttcatactaaattggttttttttttttttttttggggggggggggcaggccagctaattggnga

SEQ ID NO: 36346 - DNA, 537 bp, Oryza sativa
  Clone ID: PAT_MRT4530_40181C.1
gttcaaagaagcacatcaattgaattctttttttctgaacttctacctaaatatgttcgctgttgaacaaacccttttttctctgtatatttttgacagaacagacatcttcagactaagactaaggtctaaattttactgaaatgattaacttctaatttttgcaggcatcagcatctacagtgtgcactcttgcaggtggatgcacatcttgatggtatggtggaaactagaaaagaacatgagaagattatgccagtggtgatggtgccactggaatggcatcctcgacatgtccttcgtcaacgttcgtcgccggcagccaacacaaagggtcagcccaggacgaccacaccacaattgatgacaggcttcggtggcaggcgatgcgatgccctctggattgtgctttttttttgggtaccgggtgtatatgtgtttgtaacgatgatggcacgatcaattgtaaaaacaaagtccattataaaaaaaaaaatgcagtaaaatatttactaccttataaaaaaaaaaaaacaa

SEQ ID NO: 36347 - DNA, 239 bp, Oryza sativa
  unsure (1)..(239): unsure at all n locations
  Clone ID: PAT_MRT4530_40182C.1
acctaatcccgcagacgcgatagccgccgccatctcgnggggcactcttcacacccgcagagggggtcttaacacctacatccgagccttcccccttcccctcccccggcggctgtggtcatggccacccgacgggccctcacctccgtactccgctccgccttccgcctatcatccttcttcccttacccgtgccctcgccgtgcgctgctccacccccaccgtcgaccgttcccctt

SEQ ID NO: 36348 - DNA, 321 bp, Oryza sativa
  Clone ID: PAT_MRT4530_40183C.1
atggcaatttcccccacggggccgagtcacctgcggggacccgaccctacgagggcgagggcggaggcggcgctaggggcaagggcacacgagcacacggcgcacttctctggatctcgccggcaccggtcgccctctcccctcccctccagccttccgagtcctgtcctctccaatatccctctccggctctccctcaggtctgccgacgaggcgacgaagcacaggcgcacgggcgcggtgagggcaccgtcgagtggcgagggcacgccggtcggcgagggtgtggcgcacaggcgtggcagccggcgaggggactga

SEQ ID NO: 36349 - DNA, 615 bp, Oryza sativa
  Clone ID: PAT_MRT4530_40184C.1
atggcgaagctcatcggcgcgcggcgtggatgggactccggcggcggattgctacggaggaggggtggacgggacgacccgcacgacggcttgggaaagaacttcagggcttgtgaattttggcccaattgtccattcattgataagtttgattctcgacatcgtccaattgatcgatcacctgttttgatgtcgtttctccttcattttatgtacattctctgcaaaaggttcgcagcaggcggtgacgggaggagaggcggcagcggcgggcggccctctgctagatccggtgggaggggaggcagtggcagcggcggcggcccacgggcgacgtcggcgggctcacgtcttccagatccagcaacctctccgaccgcctctcctcctatcgcctacctcctccttcatccgatttttggatgtttatatcggctcggctcaaatcgtatacgtcaattgctggcacctttgagtgttcttactagtgccgtcttcgtggtgccagttgggaaaaccgacatctttgtggtattcctaacaagcaccagtaaccctatctgggatagtgtattatgccaatttttgtttcgttggctcacaaaagtttattag

SEQ ID NO: 36350 - DNA, 213 bp, Oryza sativa
  Clone ID: PAT_MRT4530_40185C.1
atggaagagggattggatgtgcttgacttctgcaagatgggatgtacttcgtctgtgtgcagcaccatgaacacttgtgctggcaatgaagaagggaatcatgtcgtcgatcgttgcaacgatgcatcactggtggagaaaccctttgtagtaccggttcgtaacccccctttagtcccggtttccaaaccgggagtaccaaaccgggactaa

SEQ ID NO: 36351 - DNA, 371 bp, Oryza sativa
  Clone ID: PAT_MRT4530_40186C.1
ccacgcgtccgatataaatagggtttcaactgttctttcaatttcaaagtcagaagcatgtgttcttcttcgtaattataactggagtgtcagtaaggtgcatgatgaatggtttgctgatgaagaacatgttcgtaaggttgttggttttccggaaaagctcatcgaaatgccaaatgacagagaattgacatgtggaatttgtttcgaaaattgtcctcgtacgtcaatgagtgctgctgcatgtggccatccgttctgtagtgcatgttggagaggttatattagcacttctataaatgatggtccaggatgcttgatgttaagatgtcctgatccgtcctgcacagctgctgttggtcaagatatga

SEQ ID NO: 36352 - DNA, 368 bp, Oryza sativa
  unsure (1)..(368): unsure at all n locations
  Clone ID: PAT_MRT4530_40187C.1
acgcaatctatcctttctgtaagagtttgtgtcggttatatgtataaagtcggttacaatttagaacttgnagttgtaataggtattaggactaaatggtatcaaagcatgcgggagatccatggtagaggtacgagtgaggtgctccatgctgcgacaactacacagggtgtcaagaaacggacatggacgctaggtggaacatggtggcgatcaacggaatttgatcgatggaatcggatacttcagacggcagtctgaacagtttgatggttgctttcaacaaggaggggatcctctagagtcgacctgcagggaggcaatcttacncattcatagggcgctaaacacagggaatcatacccgct

SEQ ID NO: 36353 - DNA, 1203 bp, Oryza sativa
  Clone ID: PAT_MRT4530_40188C.1
atgtcagtccaactcactcctcttcttcctcctctctccccttctcccctctcttcgtctctctatcctctcctctctccaggctacagagaggcagcgccgcagcggcatgcagcggcccattggattcgccatagcgtcgtcgccgcaccaagtagtagctcctccccaagcccaaaccggcgcttcgcccgcgtgcgcgtcttctaccacgccgtcctcgaccgtggctacttcctcgccgacgccgccgatcatctcttcacccccaccaagcgcctccgctacctcgccaggttcctcctcgtcgcgcttctactcaccaggcgcgccgacactgtccctcgcctcgccacccacatctgcacgctcctcgacggctccaagaagaccctccaagaagccgaatataaggagtggaagcatgtcgtccaagaaatggagaagatgcggccggcgacgacgacggcggcggaaatggagaagagcggccatcggccatctatctcttgcgtgcgctcgccggtaggccagggaactcgtctagcccttctccccgatggccgtcgttcgccgcccttctccccgatggccgccggcgggagaagagggagcggcgcgcgatggcgtcggcgggagaggagggagcggcgcgcggcagcgtcggcaggagaggagggggcgacgcgtggcggcgccggcagggagaagctcctctccgtcgcctggagagaggagaggagaggagagagagatgaagagagggaagatggggggagaggaggaagaagagggattagaggaattgcagaacaagaatggctgagtcacccaaccaaaaatttcatcacagcatttttcagaaatctcatgcttgttacaacttccaagaccattttcatggactcatcagacatcatcagtgctaatagcttactaaggcctccttcaatgagagtcagagactacagatcagaacaacaacagggggcagccagatctacaagctgttgtgcaatgaacagaaccttcatctccaacaatggaaggaatggtttgcagcttcagatctacatctacatctaccacaatgccaaggcaaagcttgaatttttctccacatttcagaacagcaagccaacacacaatgattcaaaaccaagaacagcaggagtgaaccaagcaggaagaggcaatatttga

SEQ ID NO: 36354 - DNA, 857 bp, Oryza sativa
  Clone ID: PAT_MRT4530_40189C.1
tttttcccaacccccccagaccggagcgggagatgtacgatccgtcgccgccgggagccttcatgctgtcgcccccaccgccgccgtggtagccgccggacttgcctgcgccaccgccgccaccagcgtgcccgccgctgtatccgccgccgtacttgcctgaacctccttcgccacctccctttcctcctcctcctcctccgccaccgccgctcctgcccccacctccgctgccgcctccacctcctttgccgcctccacctcctccaccaccacccttgccgcctccgcctccgccgccacccttgccgcccatgtctccaccgggtgcgcccgcgggtacacctccgacagcgtgctctcctccgccgtgatgttgtactgcaggtacctcatgttcatgtcgcgcggcggcacgccgtactcgtccatggcgagcccctccatcctccccagcggcaccacctggatcaccaccgcgttcatggggaggaacaccaggttggtcagccccgacccgtgcaccgccaccatcgcgtcgtacgagttcaccgccgacgccgccgccgggatgtgggcgtccagctccgccgccgccacctcgaacccgaccccctccgccgccgccacgatctcgtccaggttcacgaaccggcggcgggagcgccggttgatcaccagcagccgcggcttcttgctcttgtcctcctcctccatccggatcgcgtgctcccgcggcagcgccgcccgtcgcgttcacgccgccgccgccgccggagatggaggcgaggctcggcgccaccaggaacacctccgacgtgcggccgaggatgcggatggcgccctccatctcgcac

SEQ ID NO: 36355 - DNA, 747 bp, Oryza sativa
  Clone ID: PAT_MRT4530_4018C.1
atgggtaggatcaggagagaaaagataagcaaggatggatgcggcgttcgagtcatcgttcccggcagcggtggcgtccaagtcattgttcccggtggcggcggcgtccatccaggcggcgactggaggaggaccacaaagtcgcgccgcaatcgatttcgcttcagcgcaaggcccgagattaaagtcgcggcactggaggaggaacacggcagcggggaggaggaggaacacggcggcgggaggggaggagagaaacacggtggcagcacagaagaggatgtaaaatgcgagaaaattggttccgtccgtctattcctcccatctattgcacgcgaagttacatttttgcccttccacgtctctgctatgcgagtttttaggggggtgtattctataattgcgcatggattccagatagggttggcccatctaattgtacgtccacagcgccgcgccgccgcacgcctccttcttcttcctctcgtcgccgctcgccagtgccgctcgcccccgccttcttcttcctctcgtcgccactcccggcgcctcctgcccattcctacctaccgctcccgcatccgcgccgctgaagttgccaacgcccccgagggcatccacaagtgctgggaaggggtggagaagacgaccggggttgggcagggtgggacgcggctatacgcgacggtggacctcggcaaggcgcggctcggctggtcgcggcagcattttttgccctcttcgtga

SEQ ID NO: 36356 - DNA, 1599 bp, Oryza sativa
  Clone ID: PAT_MRT4530_40190C.1
gcccgagcggcccgacttccgccccatagcatcgccaacagaaggaagcaagagatagttcgagtcgagttgagttgcatccgtacgtactggggtagaggagagtaggagtgtgctagtgtgtgaggtctactgaaatggacagctccagctgcctggtggatgataccaacagcggcggctcgtccacggacaagctgagggcgttggccgccgcggcggcggagacggcgccgctggagcgcatggggagcggggcgagcgcggtggtggacgcggccgagcctggcgcggaggcggactccgggtccgggggacgtgtgtgcggcggcggcggcggcggtgccggcggtgcgggagggaagctgccgtcgtccaagttcaagggcgtcgtgccgcagcccaacgggaggtggggcgcgcagatctacgagcggcaccagcgggtgtggctcggcacgttcgccggggaggacgacgccgcgcgcgcctacgacgtcgccgcgcagcgcttccgcggccgcgacgccgtcaccaacttccgcccgctcgccgaggccgacccggacgccgccgccgagcttcgcttcctcgccacgcgctccaaggccgaggtcgtcgacatgctccgcaagcacacctacttcgacgagctcgcgcagagcaagcgcaccttcgccgcctccacgccgtcggccgcgaccaccaccgcctccctctccaacggccacctctcgtcgccccgctcccccttcgcgcccgccgcggcgcgcgaccacctgttcgacaagacggtcaccccgagcgacgtgggcaagctgaacaggctcgtcataccgaagcagcacgccgagaagcacttcccgctacagctcccgtccgccggcggcgagagcaagggtgtcctcctcaacttcgaggacgccgccggcaaggtgtggcggttccggtactcgtactggaacagcagccagagctacgtgctaaccaagggctggagccgcttcgtcaaggagaagggtctccacgccggcgacgtcgtcggcttctaccgctccgccgccagtgccggcgacgacggcaagctcttcatcgactgcaagttagtacggtcgaccggcgccgccctcgcgtcgcccgctgatcagccagcgccgtcgccggtgaaggccgtcaggctcttcggcgtggacctgctcacggcgccggcgccggtcgaacagatggccgggtgcaagagagccagggacttggcggcgacgacgcctccacaagcggcggcgttcaagaagcaatgcatagagctggcactagtatagagttagcactattagctcgatcttctctagctagtgtcttttttgctcccatgcatcataattcaggtggtagctagcttagtcccttgttgatcctatctactaatctcacttggttttttttgttaatttattcgcccatgttcttgcttgctttgctgtaaatcttttcatcccaagtgtacactaatgaagcatagccctagaaggctagaccaactgacacacaagaagaagaagaaacatttgaaattatccatcaaaaaaaaaaaaaaaaaaa

SEQ ID NO: 36357 - DNA, 1507 bp, Oryza sativa
  Clone ID: PAT_MRT4530_40191C.1
gctgtttcagagatgaaggcagctgtgaggagcaagaagagcaagggctctttctgccaccctcctctgctcctgctcatcgtggcaatccagttcttggtgatttactcaccaacccttgatcagtacatggtgatgctaaccacaggcaagcctggtttcccatcaatgttgattgatggtaggaggagcttcaaacaagtagatgagttcatcccggagcctcacctgcgatgcgacttcagagacaatagatccgacgtgtgcgagatggagggcgccatccgcatcctcggccgcacgtcggaggtgttcctggtggcgccgagcctcgcctccatctccggcggcggcggcggcgtgaacgcgacgggcgtggacgcgaacgcgacgaggtggaagatccagccgtacacccgcaagggcgagtcccgcgtgatgcccggcatcacggaggtgacggtgcggctggtgaccgccgacgaggcgccgccgtgcgacgagtggcacgacgtcccggcgatcgtgtactccaacggcggctactgcggcaactactaccacgacttcaacgacaacatcatcccgctgttcatcacgtcgcgccacctcgccggcgaggtccagctgctggtgacgcagaagcagcggtggtggttcggcaagtacagggagatcgtggagggcctgaccaagtacgagcccgtcgacctcgacgccgagcagcgcgtccgctgctaccgccgcgccaccgtcgggctccacagccacaaggacctcagcatcgacccgcggcgagctccgaacaactactccatggtggacttcaagcggttcttgatgtggcggtacgcgctgccgcgggagcacgcgatccggatggaggaggaggacaagagcaagaagccgcggctgctggtgatcaaccggcgctcccgccgccggttcgtgaacctggacgagatcgtggcggcggcggagggggtcgggttcgaggtggcggcggcggagctggacgcccacatcccggcggcggcgtcggcggtgaactcgtacgacgcgatggtggcggtgcacgggtcggggctgaccaacctggtgttcctccccatgaacgcggtggtgatccaggtggtgccgctggggaggatggaggggctcgccatggacgagtacggcgtgccgccgcgcgacatgaacatgaggtacctgcagtacaacatcacggcggaggagagcacgctgtcggaggtgtacccgcgggcgcacccggtgttcctcgacccgctccccatccacaagcagagctggtcgctcgtcaaggacatctacctcgggcagcaggacgtccgcctcgacgtccgccgcttccgccccgtcctcctcaaggccctccacctcctccggtgatcgccggcgatcgatatatatatactccggtgaggcgatcatgcatacagaacacacgtacacaggattaattacagcagaagatggagttcattaa

SEQ ID NO: 36358 - DNA, 243 bp, Oryza sativa
  Clone ID: PAT_MRT4530_40192C.1
cttgagaagactgatggagtgattgttggagaacggagatgctccaacccatcaggaaaaaagcagcaagaggtcgtgttcggagctcatcggcccagcagatggcaccaatcaggcccaaacctcttgggtcacctaaaaggtgtcaccatgggcttgcaggcgtggtcaggcctggacgctggggaggctttcgaacagaggaagagttcccgcctctccgacgggatgatggagccctga

SEQ ID NO: 36359 - DNA, 615 bp, Oryza sativa
  Clone ID: PAT_MRT4530_40193C.1
ccaagagtactctacttctgcaagcttattcttcgactgatcaagcaaggtagagacatgggcggcaagggtggcggcggaggcggaggcggcaagggtggtggtggaggaggtggaggcggcaaaggaggtggaggcggcagcggaggtgggggcaggagcggcggtggcggaggaggaggaggaggaaagggaggtggcgaaggaggttcaggcaagtacggcggcggatacagcggcgggcacgctggtggcggcggtggcgcaggcaagtccggcggctaccacggcggcggtgggggcgacagcatgaaggctcccggcggcgacggatcgtacatctcccgctccggcttcgagtccaacccgcagggctacttccagggcctccatggcgatggcaagtagaggttttggagcgctccaaaagttaggctgctaatcgatcagaattcgcgattatggcccatgaatggtggcttctaaataatgtattatcgagtctgtaaggcagtctactttctccaaatctctgttatgtatcggattatcgtggaaatctaagtgaatgcgttcgataattttatgtcttttaggtaaaaaaaaaaaaaaaaa

SEQ ID NO: 36360 - DNA, 1034 bp, Oryza sativa
  Clone ID: PAT_MRT4530_40194C.1
gagctatagccttagcttagttaatctggctgcctttctggagaggcagctggaaggcggaggaggaggcggtggcggaggaaggagaagacgcgagcgccacgaccaagtcgacgaatgctccgacgatgaagccatgggtcttcttgccgttggccctcaggtaccagccgagcatctcctccagccacccccagtcatggcccccgccactcatgtggctcatcaccatctcctccatcgaccgccggaagtctccgtacgggtcggccgagtcgatggacatcgccgtcgccccgtcgaacgccgccgcgtcggcgtcgacggcgcgtcccttgacgacgatggagctcgtcgactcgggctcgaagaagaggcggcggttcgacgaccggagcccgcggatgatcacctcgtcgtcgtcgtcgacgacgtcgttgacggcggaggcggcggaggagtaggagcggcaggtggagtggtcgtcgaggaagaaggccgggttcatcacgctcgtcttgtagacgcagtagtcgtcttcctcctcctcctgctgccgccgccgcttgctgtcgtcgtcgtctgcgcttgctggggcgtcgtgcctggcgaaggagagcgtcctcgcctgcgtgcacgaaggccattgccacgacgacgccgtgctcgacgacgacgacaggctacaggcatcattgccgccgccgccgccgccgccgccgccgaggaagagagaggcaacaagcttccgaaccatggctagctaactcctagctagcttacgtgcagctagctgtgtgagagtgatcgatcaatggatgaagcttaagctaggctatgtcggatgtcgctgtaaactgagttggccttttggtcggagcgagtgcgcttagctgtgcttttaaagaggctgctgcggcgtgtgcaagtagctatcaaagatgcgagcgagcgaaagcctgtcttcttcttctcttgcattgcatgttgtttaattaattagcagctacctgcacttaaaaaaaaaaaaaaaa

SEQ ID NO: 36361 - DNA, 387 bp, Oryza sativa
  Clone ID: PAT_MRT4530_40195C.1
gcacgaggctccacccacacccccatggcatccattccactcctgcggctgctgctcctgctgctccctctcccccttcaggagcacctctggccaagccaccacaggccaaacgatgccggcgtcggcgccggcgagctccacccgatcttcgttgtacctggggctagctgcagcaacctggaggcgtggctcactgatgcataccagccatcggggtggttcgggctgtgggagaacagctcggacctctcggcgcaccactacaacgaatgcttcaaggagcagatgagcctcgtctacgaccccgtcgcgaacgactatcggaacttccccggcatcgagactcgcgtggccaacttcggcattgtgagagggttccgctag

SEQ ID NO: 36362 - DNA, 240 bp, Oryza sativa
  Clone ID: PAT_MRT4530_40196C.1
atggcgatagctagggtgaacttggcaatcctatgcctatccctcattgctctccttgtcctcaccaccgtcccggaggccgccggtgggcaacccggcggctacatcaactacggcgccatgagcaaaaaccgcagccacggatctccacagtacaaccatcagggcagctccgccaaccattacacgcgtggctgtgagaagcagttgcattgcaggggtaaaaggagagggttctga

SEQ ID NO: 36363 - DNA, 348 bp, Oryza sativa
  unsure (1)..(348): unsure at all n locations
  Clone ID: PAT_MRT4530_40197C.1
atccccaaatctntcgcccccacccatggatcaccaccaccaccacctgccgccgccgccgccgcgntcgccgatggagaactccgcgtnctccaagccgcccacccnggngtccaccccgtcgtcgcgcctcgccgccgcgncgtcctnccgcgtctnctccgcggcgccgnacccctccncgtcctcctccgcgnccacgtcggcntngnggacggtntacagcgaccgnttcatncccagcngagacggatncaanctagnggtnttngaanttgnnccgtnggcgttncaatangaaggatgacgncgnnggcggattntnaggagnggagggnantannganc

SEQ ID NO: 36364 - DNA, 165 bp, Oryza sativa
  Clone ID: PAT_MRT4530_40198C.1
atgggaggtgacgacgcggggtcatcggagtcaagaaagaaggaggcgactagcatcgccgaggttgtgaggaggaatgggtggcatggtacggcgggtcttactggcaccggatactacaccattgaggaggatggtaggaagaaaaatctattatattattaa

SEQ ID NO: 36365 - DNA, 1632 bp, Oryza sativa
  Clone ID: PAT_MRT4530_40199C.1
gagcagagcagacacagccaaacacacacactcctctcctcatcttctctctctctctctctccgtgcagcactagattccacttggtctcctcctcttcttcctccagagatttgctctgcttgttcgtccgtgtcgtcgtgcggcggcggaggggggggatcaagaacaggagaggtgtccagtggcggaggcaaatcaatcacgtcgccgtacctagctagctacctagctggtctacgagcttgagctagatcctgaggcggggtagtattccggccaagaaggagaaggatgggggagaaggtgagtgaggcggcggcgggagtggaggatcaggacggcggcgtcgcggcggcggggatggatggcattcagtactgcagcgagcatccctaccggcctggggcggcggcggcggcggtcgccggtggagggatatgcgccttctgcctgcaggagaagctggggaggctggtgtcgtcgtccaagtccagccccttcttccccctcggcggccaccctccgccgtccgcctcgccgtcgtcgccgccgtccttccgccgcgccgcggcggtggtggcggagcccccgccgccgctccgctcctcctcgggcgcctcccgcaagctgatcccgttcggcaggaggaaggcgtcgtcgtcgagctcctcctcgtcctcctccgcgtcggtggcgctggccggcggcgggctgaagcggagcaagtcggtggcgccgcggcccgaggagcactactcgtcgtcggcgtcgtccgtgacggcggagagcccgcggaagaagagcttctggtccttcctctacctctcctcgtcgccttacacgcaccaggccgtcacctccacgtcgtacggcgccaacggtggcgccgccgccgccgcgaggaggaagtcggtgtccgtggcgtcggcggcgtgggcgtcgaggggtggctccgctgccggcgcgcatgagcagcagcagccacgggcggcggcgacctcttcggtgtcggggcggaggctggaggccatcggcgagccggagagcccgagccaggtgtcgtcgtcgtcgtccttcgggcggaaggtggcgcggtcgcgctccgtcgggtgcggcagccgcagcttctccggcgacttcctggagcgcatctccaacggcttcggcgactgcacgctccggcgcgtcgagtcccagcgcgagcccaagcccaacaagatgcgcgcgctcggccacctgggcggcggcggtggcggcggcgccgacgatgacgacgacgacgacgacgtgtaccagcaccagcaccggatcaagtgcgcggggttcttcggcggcatgggccccactccctcctactggctctccgcggcagagggcgctgccaccgccggcggcgtcggcggcgcgaggaagttgggcggccggagccaccggagctgggcgtggacggcgctggccagcccgatgagggcgctgaggccgacgagctccaccaccaccaccaccacgaagaccatcacggccgtgcattccagccacgtcgtcgcgcacagcaacggcagcacgccggcggcggcattgtccatatcatcccctgtgccagcatcgtcgacggcggcgacggattga

SEQ ID NO: 36366 - DNA, 1287 bp, Oryza sativa
  Clone ID: PAT_MRT4530_4019C.1
atgcccaccgataaagcctcagagccagatggcttcacagggatcttcttcaaagtatgctgggaaatcatcaaagaagacattcttctggttttcgattcaatctataacctcagatgcgcacacctgaacctgctcaactctgcgaacattgttctaatacctaaaaaagaaggggctgagggggtcacggactataggccaatcagcctcatccacagaatcgccaagatcttctccaagatgcttgcgctgcggctaaggccgcacatgcatttgttgatttcagtcaatcagagcgccttcataaaaagaagaagcatccatgacaacttccttttcgtgagaaacatggccagaagataccaccgcctgcggcgggcaatgctgctcttcaaactagacataacgaaggcctttgactcagtccgctgggactaccttctagccttgttgcagcgaaggggtttcccaacaagatggacatattggcttggggctatcctgtcaacttcaacatctcaagcaatagagctcggcgcaatctcgaagttgcgagggagaacaacccacctaaggatctcgatgtatgcagacgacgccgtcatcttcatcaaccccacacggggcgatgtcacggcttttgcagacatcctacatcgcttcggcactgccactggactcgtcaccaaccttcagaaatcccaagtggcggccatcagatgtgacggcatcgagttggcagaggttcttgagggcgtcccgacggtaagggcaaacttccccataaagtatttgggcctccccttggtattaggtagactacggaaggtggatttgcagcctgtcttcgacaaaatctcaggaaggataacaaactggacggggaaaaacatggcagcagctggaagaaccacgctcatcaaatcaatgctcacggcacagcctatttatctcctgactgccttgaaaactacgaaggaatccctcgagcagctagacaagcagcgccgtcgctttctatgggccggcacaggagacatcaccggagggaaatgtaaagtcaactggacaaagacgtgcttgccaaccagtcagggaggattgggagtcctaaatttggagaaattcacgagggccttgcggctgcgatggttatggcacgaatggaaggacccgaccaagccttgggtgggactggaaacgccctgcgatgaaattgacaggagtctattcgccgcctcaacaaagatagcaattggagatgggaacacgactcgcttctga

SEQ ID NO: 36367 - DNA, 366 bp, Oryza sativa
  Clone ID: PAT_MRT4530_401C.1
atgggcggtcaagccggcgagctggcgctccggctagcgtccaaagcggcgacaggaggtgacgccggcgagaggggaaaaacggaggaaaggggaaaaggagggagagaaagggggctcgctcctttaccgaatcgggaaaaggaggagggagcggggcgacgcggcagagggaaaggagagctcggcctccgcctcttggcggcttgcgcgcggagtggcgggggccgggggatgacgacggcgatgacggtgggatggtttggagtggcgcgacgacacgggcgacaggcgcgggctggcgcggcagagggtgacggcggcggcgaccaggcggaagtgccacacatgatcctctcctactga

SEQ ID NO: 36368 - DNA, 879 bp, Oryza sativa
  Clone ID: PAT_MRT4530_40200C.1
atggacagcgacgagaaagagaaaaagaaaaacaagcagattatcaccgagaagatggagatcaataggttgaattcaaccaaaaccaatctaccaggactagtatctgaacgtgaaagtttgaagaataccaattggcagaacaaggaaactatgaagaaagagcaatcaggaataaaatcagatgggcaaaacaagaaggatatgaacttgcaaaacctagaaaatataaaaagaagaacaaaaatggcacaatcaggaataaaatcagatgggcaaaacaagaaggatatgaacttgcaaaacctagaaaatataaaaagaagaacaaaaatggcacaatcaaggctagtatctgatagtgaaagtttgaagaatgccaatttgcagaacaatgaaactatgaagaaagagcaatcaggtacaactgtaactcagggggctgatagaacaaagtctcaagtaacaggaaatagaactgaagaattaagaagaaagaagacagttgaaggatctcattacctgcaggattttgaaaaatgcaaaaagtcagggacaattggatcagagatgtgcgaaaataaagcacaactactttatgatcaatacacatttcttaatgaaaatgaaagactaggaggacaaatgagctacactaacctcatgcaacagataattcaaagtccacgtgtcagcttgcaagcaaatgaaaattccatgattttggcaacaagcaggttttctcctcaagagtcacatcaacatgatagattgtatgaagaacagatatcgacagaacactggagctatgaagaatttgataggttatacaacaacagcaacatggtgacatggactgaggtgatattttcaaactaa

SEQ ID NO: 36369 - DNA, 377 bp, Oryza sativa
  Clone ID: PAT_MRT4530_40201C.1
ggggggggacgggacaaaaaacaaaagggcccaaaaaaggcgaaaggggaagaccccaaaaacaaccttggaaaaaggcccatttaacgggggggcccttgaagcccaaaaaaaatccaaaagggggcccggtacccccacttgaaaacttgacccaaaacttacaaccccagggaaccgcccccccctagacgcagtctaggccgaaaaaaccttacgcaaaaaaacacggggcggcctgtacagaccccacgaccctaccggacaaatcccaaaaatctgggacaaggcccccccccccctgattagggaagtccgtaccttaaaaaaggggggccaagggccccccggggacaaccccggggggggacttaaag

SEQ ID NO: 36370 - DNA, 433 bp, Oryza sativa
  Clone ID: PAT_MRT4530_40202C.1
ctttctacgaactctcacgttaatcagaaagatctggccatctagccaggaaggagaagcacccgagccaggcggcacgccggcaacggccaacggcgtggcgatggtgcaacggagcacgggaagaggaaaaacggaaaagggaggaggtgacggttctcaccgagcagacgcggcggcgagaggtcggcggtgttgctggcggtgaggaagaaacggcgagaagcttcgggtcgtcgttgtcgtcatcgttcccgcggtcctcgtgctcgacggaggggaggacggggaagagaaggaagcggcgaagcagatggtggcgacgctgggctccaatgaggttccgaccaccggcgaggggcggccggagttgcgacggcggcggcacaagaagagagcggcgcggagagaggagagggagagggcggcggtg

SEQ ID NO: 36371 - DNA, 537 bp, Oryza sativa
  Clone ID: PAT_MRT4530_40203C.1
atggacagcgacgagaaagagaaaaagaaaaacaagcagattatcaccgagaagatggagatcaacaggttgaattcaaccaaaaccaatctaccagcacagtacctggaacacttgaacattcagcctcatgtttttgaactgatagcacagtacctggaaaatataaaaagaagaacaaaaatggcacaatcaggactagtatctgaacgtgaaagtttgaagaataccaattggcagaacaaggaaactatgaagaaagagcaatcaggaataaaatcagatgggcaaaccaagaaggatatgaacttgcaaaacctagaaaatataaaaagaagaacaaaaatggcacaatcaggactagtatctgaaagtgaaagtttgaagaataccaattggcagaacaaggaagctatgaagaaagagcaatcaggaataaaatcagatgggcaaaccaagaaggatatgaacttgcaaaacctagaaaatataaaaagaagaacaaaaatggcacaatcaagtatacatgctttctaa

SEQ ID NO: 36372 - DNA, 681 bp, Oryza sativa
  Clone ID: PAT_MRT4530_40204C.1
atgaggccgtcaagacggtcggcggccactgctgtagcgatggggatgagcaggttgtcggccactgccttcggaggaagaagacaaacgaaccagacagaggatgacatgtgggacccactattccattttatactacgagtacgtaccaaccgaacgtgctgccacgtcaacactacagctatcttgcggctccaattattgatgcttaggagaaatgtaagtaaaagaagatcaagcaaaactgacaaaaaatattttctatacttaataaaacaagaaatggaagatgaagcagaaattattccaggcactgactgcattcacaggagcaaagagaaggaaactaatcatcgtccccgaaacgtcccggtcaggaggcttgaaaacaagcattacaaccagcagcagcacaatccgctgtggcaaatgtcaaaagcaaatggaagtgggttctacatattacacaaggccagatgctccgagataagggaggcacaccaacgtggtttttcctgtccctgcaaaggagaggaggagacacttgaagagcttaccactgttgccgcggccccggcctcctcccagattccgccgaccatctgcaagagcaatcgagtgggggttagatgggggctcatgctcatctggcaaagccccctatcccaaactgaacggtaa

SEQ ID NO: 36373 - DNA, 2861 bp, Oryza sativa
  Clone ID: PAT_MRT4530_40205C.1
gttggggagggaggtgtagggattctgtcgtggagtagtcgtgcagcggacgtggttctctggggtggggtgttcgtttggctttgatcttaggtgtttggggattggtgttgtgcgtgtgtctgtgctggggtgtttcgtggtgcgagtgggtgggttggtcgtgggttgttgaggtgggggtgggctttctgcgcgtcttgagggcctatgaggagtggtttgcgaggtgatgtgatcgggtggggtacgggggggggaggtcagttgggaggggggtgcgtcttgagcacttgtggtatgtcgggggtcggcgcgctctttcgggggtactgtcgggcagcgtgcgcgcggtggggcttctatgctttttttttcttgtttttgttgttgaagcagaaattattccaggcactgactgcattcacaggagcaaagagaaggaaactaatcatcgtccccgaaacgtcccggtcaggaggcttgaaaacaagcattacaaccagcagcagcacaatccgctgtggcaaatgtcaaaagcaaatggaagtgggttctacatattacacaaggtaaaaaaagaagaaaaaataataaagggaagaagagagaaaaggtcgagctaacatgatggattggtggtggtcctgagcttgctcagaattgcacaacaggataagggcctcgtcggtatgaccaaacgggctaaaaggcgaaacggggggatgatggatgatgatcccaggccagatgctccgagataagggaggcacaccaacgtggtttttcctgtccctgcaaaggagaggaggagacacttgaagagcttaccactgttgccgcggccccggcctcctcccagattccgccgaccatcttatggaataagaggattccttgctactctcagctagctctataggattttaacaaaatttggtgcatcatccctcgccccagcagttgtgcggtacacatataatttctccactttaggcagatctccatggttttcctccatttcattgctaccatcccgctcatttatgacctcaacattgagcatcggcatctttgacgcaaggacttggcacccctttaacgtgacattgcaagatgacatccaaagggatcgcattgtctcgtacctagcaaaattccccaagagtgcagcatcaccaaacgggctatctcttatctccagtttccttaaattcttgcatccattcataacatgcatcatacccttatcactgtcaccagcaaatgctatagaaagcatctcaagttgttttgcatatttcccaatatacatgaaaactttgtctgtgagaagaccagatattgacaaacgttgtaatcccttgcactcacgaacaatagctccaaagccttcatctaatggttggcttgtcacaacatcaggcttccctggctcaagaatacaaagtctgaatcgtgtgaaatttggacagttcttggcgacagtaactagtgcagcattagtcatttggtgacagaagtacagtagtgagttcagttttggacagcccaaggatactgcaacaagtccctcctctgtcactgcagaataaccagctacgtagaaatctgatggaaataccctgagttcttgcaagtctttgcaactggaggccaccacttgcaagcctttgtccgagatacaatccagtacccaaaggcgttggagcttcacacagcggctaatcatttttgtaaggtcagaagcatcaagtgtgggggcatagctcaagttcaatcctgtcagttgagcacacagggggtagataaatgacaggcaaacaggagaagcatcccagaatccagacaaactcctcaacatcttgcatttctccagagcactggtaagcttaaagtaggactcagtttggaagtcatctgtcaaattccctgtccccaaatcctccaagttaggggtacgcagtagtatctttgcaagtgtatctaccgatacagatcgattcagcctcaaactccgcaggtttggggacctgctaacaagtctctccagtgaaccagcattaacctcccctttgatgcaggcaaaattcaatgagacaagtgatgtgcaggaatcagggaagcaggaaagccacctaggccctcgatcctccacttcattttcctgcaaatccaactccctcagaagcttgcaatggctcgcgacggcggctagcccgtcagtgctgaacccctcgcagctgataagaacaagagccctgaaccgcgggaacgagcgagccagcagctcgaggctctcgtcggacaccaccatccgcttcatcctgagctcctccaggccgtggcatcccctcgcggccgcctcgatccacggccccgcgtagccgccccagtcggggggcacgaggttgaagtcggcgaagtggggcttccccttcaccgtgagcgcccgcacgttggggaaccgcgcggcgacgcggccggcgcgcacggcgtagcagttgcccacgaagacgccgcggcggctcagcctctcgatctcgtaccacaccttgcagacgagcgagaccgtgttgcggtcgcgctgcgccggcaggaagctgaagatgtgctccaccacctcctccgggaagtacgtcatggctccgccgccgccaccgccttcttcttcctcttccccaccaccaccgcagccgccgccgcgggagctacacgataggatctgcttcctcctccacggctccaggtttattcagagaaaaaaatctctcacaaacaggaaacacactctccccctcttcactttcacctcatcatccaccaatccaagaacacgcaatgctctatctcaaagtagc

SEQ ID NO: 36374 - DNA, 610 bp, Oryza sativa
  Clone ID: PAT_MRT4530_40206C.1
atgaaaaagatcaaaaaatttctaaaaaatacccaaggtgctgtcttaatagaattttgatttatttttctttatgtatttcgtcattcttattttcttgattgacgttgctattctacaggctaccgtcggtaaattacagcgcactttttattcattaaccaatgttatcaaggaaagacatatagagcgtgctggagatgaagatataaaagaagaagaactgaaacaaataacaaaattagccgctaacttaatgggagaaaaaaaagatcagattgctgttactatctataaatatggcttcaaagatattaattcatcaaagcttgatgaaaataaaaattaccaacctaggccagacataacactggatacctcaaaagaaaaaatatatccaactaacgcacaaaattgtcaatcaattaaaattgatgatattaaaaaagcctctccattaccggagaatttacgtggtaccaatcgttatgcgaccctttatcaggtaacagtttgtaaaaaaatggataatttatttaaaggcttaacattaaatagaaaagattattctaataattggttacgtgcttcttcattaggcgtcgctcga

SEQ ID NO: 36375 - DNA, 504 bp, Oryza sativa
  Clone ID: PAT_MRT4530_40207C.1
acaacaacattttttttcaccaggagggggtccccccccttttaaaaaaagccctttgctttagctcacaagcaggagtttcaaggaacaaaaaaaaaaaagctcatcaccctatttgctcagttaaggggggggcctcctttatgccggggacaaactcctccgagggttccttggggacccagttggggaacatccccgggccgtcgagggggagggggcccttgggggtgaccacgggggggaaaaaatctttgttgacaagcgggccggggaacttgggggggccgaagccgtagtccacctgggggaacccgagcttgctccagtggggaacgtaaatggacccgtagttgaacgtcttttggaaaggggcctgctccgtctcctccttggggaacgggaaaaactccaccggcattcttttctttggcgggcggataatgtccaccaccttcattaccgacaaaaaaaggaccgtttcggtgggggctgaaattttta

SEQ ID NO: 36376 - DNA, 303 bp, Oryza sativa
  Clone ID: PAT_MRT4530_40208C.1
atgggcaacagcgttacgaggggtcgcgagttccgcatgccgctctcccacacgcgacgggagccggagccgcagccgcagccgcccactcggtcgcctgctcccacgacccacggccccgcaccccacgcgtctctcgtgcgtggtgtggacacggcgctgcctgcttcggcatggtgctcccgtccgttcccccgcgcggcgcgcggtcgcgcccggtacacgtccatattcgggcagcccagactgcacggccatctacttgcttccgcactgcacattctgaatggtataagatgctaa

SEQ ID NO: 36377 - DNA, 585 bp, Oryza sativa
  Clone ID: PAT_MRT4530_40209C.1
atgacaacgccctcaagaggggagtggcactcgaacgccaccgttgttggcccggccaaggtcgggctgcctcccactcgccgcaccggacagtcggcaagccgctaccaccaccagccgcgccttcttgcgccgtactggcttccgttgtcaccgaccacacctcctcgtgccgtgccgacctccactgccagtgtgcccgcctccttcctccagcacacgccggtctctactactagctgcatgcgccgcgcctcgccggtcgcgcctcgcctgcacacccacgccggcctcctccgctctattgcccgcccttgccgcgagccgctcgcctccgccgcgccgtctcctccggccgtcaaatccggccgcggcggcgtcggatccagccgtggagggccggatacggccgcaggcgatgcccgagacatgaccccaagccgcgccgctgcgcggcctgccccacgtgccagtccgcctcctcgcgccgagatggggcacagccgtggggggtgtggccctgctgccaccatcccggcgtgccgcgcggtttccggtggcagcggtgggggaaagaggggatag

SEQ ID NO: 36378 - DNA, 191 bp, Oryza sativa
  unsure (1)..(191): unsure at all n locations
  Clone ID: PAT_MRT4530_4020C.1
ttagtaccccaaagccagggttatggtgctgggtcaatttgagaatttagaatntctgctttctcataatcatatggagaccggagggagtagcatggtaacatacctcggtatgaatgcacttaattttccatgccaagttaatttcattttgtagctatggccctggttcgatgaaaatgtaaaaaaaa

SEQ ID NO: 36379 - DNA, 1263 bp, Oryza sativa
  Clone ID: PAT_MRT4530_40210C.1
atggtccgcgacttcgccaccgacgagtcccacggcgagcgcggcatgtccgtcctgaagctgcggctcgacggcgtgcgctctgcctacgacgcggccgcggcggagctcgagaccgcgaagcgcgcgcgggaggacgcggagcaggagctcggcgggaaccaggtgcaggtcgccatcgccgtggtgtccatccacgggctcgaggcgacgatctcgcacctccaggaggaaatatcgcaggtgcgctctgatctggacgcgcttaagggcaagggagacattgagagggatgagttcatcagccagatggatcagttaaacacaaagataaggaagttccagcagatggtttctgtagaattaaatggtaagaagtgctctgagctgtcatcaggagaaggccaacaggtcacggattggagtgaggtcattgagttagaaggtagtttcgaagagttgaatggaaatgtgagcaatgctgattctgagaggtctctctttgaagaacaatatgaaaaagacgatcatgataaggtgacaggcaaagaatgtcacagaaaaggctttaccttcctccgttccacaggcaagtttgagagcagcgatgaaggctctacttttagcgatgatgagaccattttagagttactgccgttaggaccatccacttcacgcattttggtggcatccacttctgtcaacaatggccaaaatatatatgcctctgaccagccactatctacattacctccacttcctgatttggagataccccaaagaaagggtcccttgtgtattgatggcgatgccaatgaaagtgacaatgatgatacagctacaaccagcagtcaggggtcctacattgagcttcataccattcaggatgagtatgtgataggaggtccttcttgggaagcaatgattgcgccaattactgggctcgctctagaggaggaggaggagttgatgatagagggtcaaatcttactggccaatgatcagaaagcgaaccgcctcatcactttgtttgatgaggaggaaagagccatggttcgaatgctagctgctcttggacagccattactgacaatggggacgtttccaacatcaaggagtttcctactcaaccttcccctgatatttgtttgcaaggagaaggacacagaatgctccatctgcaaaagcacgcttgctacaaaatatagatgtcatgtgcacgcctcccttgtcaacacgtattccatatgcaatgcatactga

SEQ ID NO: 36380 - DNA, 163 bp, Oryza sativa
  Clone ID: PAT_MRT4530_40211C.1
aaacagggaggaaccagctcaaaggagataaatgccaaaaagccccaaggaccatgcataccgaagaatgaggaggaagtgcccggccgcgccgtaccaaataaaaacaaagcggccagggggcaagcatataaaaaaacactcgcgcccgaaacgcgggggg

SEQ ID NO: 36381 - DNA, 524 bp, Oryza sativa
  Clone ID: PAT_MRT4530_40212C.1
gccccacgcgtccggtgcttcgtgcgccgctccggcccggcgtgggtaccttcacccacagctttttttttgtttccgtcttttgtctttctcttttttttgccgtgccgcggcaccagtcctttttttagtggtgggggacagggcctcccggtgtttttttttcggggcgtagggggctgccaaacccactttttatttttggcctccgcttaacagggggtatttggcctttttccccaaattcttttttccggaccttattggttttttctaaaccttcttcattcttaaattctctgggtccccccaggccgttttggggttttttcaacctttgggtggtccctggccgaaatcttggtttttgcccttgcctttccggcggccttgtttttagaaggctcctccgggctgggcttggtccttttggggtcgtgctttttggtcctggccttgccccgcgccgcctttgggggggctgcctttttgcgcccggggccttggttggggttcatttttgg

SEQ ID NO: 36382 - DNA, 450 bp, Oryza sativa
  Clone ID: PAT_MRT4530_40213C.1
acttccaaaaggtgccagattaccagcagtattacaaacaccacagcagacaagcaaatgttttggaagctaaaaccctttccagtacaacaatgaccaacatggtttctccctttccgtgaaaagcttacaaaggataacgaaaagataaaaaaaactccaaaatttgaatgttctaacagtctagaactataatggtttacgtgacgcatagcgccttgacaaaactatcaagtctatagcagtactgtagcactgtaactatggttcctccttgctaagtttactgagagctcgctgagcgaacaacttctcttctcgagctcgtttcttcgccaaggcctcctcatccaacacctgaataggcgaccattcggggagcgtaaaccagtctttgtctccagaaaaatgttctttcagggcatgccatttgccattaatttgaggact

SEQ ID NO: 36383 - DNA, 491 bp, Oryza sativa
  unsure (1)..(491): unsure at all n locations
  Clone ID: PAT_MRT4530_40214C.1
gggtcgaccttgcgtccgcccacgctttcggctttctccgtgaatgtgaggagataataatcagaagaaataaataagaagagttggattcaaaaaaaaaaaaaaaaaaaaaaaaaaaaaaaaaaaaaaaaaaaaaaaaaaaaaaaaaaaaaaaaaaaaaaaaaaaaaaaaaaaaaggaaaaaaaaattataaaaaaaaaaagaagaaaaaaaanngggcgccccctttaaaaaaaccaaatttaactaccccttccttcaaaataaaaattttttttatnnnccccccaaaataaaatcaacggcccgggtttaaaaaacttggaaatggaaaaaaccctgggttccccaaattaaatgccttgaaaaaaaatccccttttccacatggggttaaaaacaaaaaagcccccaacaaatccccttcccaaaaatttccccaccctaaatggaaaatggaccccccctttaacgggcctttaaacccggggg

SEQ ID NO: 36384 - DNA, 615 bp, Oryza sativa
  unsure (1)..(615): unsure at all n locations
  Clone ID: PAT_MRT4530_40215C.1
atggaggagctgcgcgcgtcctcctcctcctcgaacctgtcgccgccgtcgtcgtcgtcgtccgcgggcgccccaccccgctccgtgccgcgggtttcgtgcgccaccgccttgccggccctctccgcctgccgccgcctcggtgtcggttcccaaatcatggcgcaactgaggttcgcggtactggctgttccgtcgtcaatagcgagcctaacaaggtggcggcgttgccggttggaggacgaactctggttggagggcaccatcagatgcgggccgcttcggctcgatgaggcgctctggagcagattatctatcttgtcggtaatctagtggctgcatctgattgcatcgactgttcaatctgattacttcgtacacagcccttctcatatggatcaataggcaacatgactacatgaatcaaccatccctttaaaaaagtactgcatgagtgaagtcacatatcgctgctttcgagttggagaacaaatctcgccgtcgccgacgcgtacacctcccggctcatgatcacccatgacgtcnacggcggcggaggaggaggaggcgccattcgagctcgctcagacgacgccgtacggctgcttggtgcgt

SEQ ID NO: 36385 - DNA, 720 bp, Oryza sativa
  Clone ID: PAT_MRT4530_40216C.1
ctccgatctctcatccttcccatggtggggacgacggaggtggagggcatcgaggcgctcgtccgccgcctcaggctgtaccagccgcctccctccccgtacgacggcgcctcgaccacggcggccggcggcggcggcgagctgttccggccgcggagggccgccgtgctggtctgcctcttccgccgccgcggaggcgacggcgagctccgcgtcatcctcaccaagcgatcctcctccctctccacccactccggcgaggttgcattgccaggagggaaggctgaggaaggtgatgctgatgatgcagcaacagcactgagagaggcaaaggaggagattgggcttgatccttctttggtcactgttgttgcctctttagagcatttcttgtcaaagcatcttctggtggttgttcctattgttggcatcctctcagatatagaagcatttaagcctgttcttaatgtcgatgaggtagatgacatttttgatgtaccgctggagatgttcctcaaggatgaaaataggacatctgaggagcgcgaaaagatggggcagacattcacaattcattacttcaattatgagaaagagaaccaaaagtacttaatctggggcctgactgcacgcatcttaattcatgctgcttcagttgtataccagcgcccaccagactttcccgagcgaagagtacatttcaacctgccaaagttctga

SEQ ID NO: 36386 - DNA, 315 bp, Oryza sativa
  Clone ID: PAT_MRT4530_40217C.1
gtaactgcatgtcacatactactttagtgacgtcgcaatgaccacatcgcgtgttatttgtaccattacactggcactatcatataaggacctgttatatctatttatgacacgccggccatcacattaacctggccatacgtgcgattctttggattgaacctgcatatgatcatgtacagacagatgtgccgaagttcctgactttaccacctgcatgtgatgcgatatagcccatcttgatcatggggtcctacaactgttttgaaaaggtttgggtgttggcccaactcttggtgacggactctgctgatg

SEQ ID NO: 36387 - DNA, 363 bp, Oryza sativa
  unsure (1)..(363): unsure at all n locations
  Clone ID: PAT_MRT4530_40218C.1
atcnnccangattgtgtatgtcaatatganccanatatggagctncctgtttngtgtaanaaaanncngcnccaggcnaaggcntcatccgacgacacctcntcctccnccncgaccggcgaagaactcatcaaagaccnctaaaccnnngngggnnnccgntnanaacaantcccccgtcctcnnctntaccngnggcgccnncgncgccctctggctgtcntncggnaaaanccgcgccgtcnnntcngttcctcngcttcccaaattcnccccagctcntcgggnncgggtncacaagaangnttgtgtaagtttcctcctcttcaaggaanncccgaaaagaatnggacgaccactcaa

SEQ ID NO: 36388 - DNA, 447 bp, Oryza sativa
  unsure (1)..(447): unsure at all n locations
  Clone ID: PAT_MRT4530_40219C.1
gttgatctagttgatttggccaaataataaggactttaaaatgttgtagcatggcatatagtggtgctgaatatttaaaattcatgtggccgaagtagtttgttggtaggtttgaaatttttgataattttgtttgtaggtttgaaaatccagatactaatgatgttagtgatttgttatagatggctgtggcctgtgaaagtatgaaaactttcagaaaatagtagatagctgtttaatttgctttattatttaatttatttttgtgcncggtttttgtacntgcatagcagatccttgaaatttttgaaattgtaatgatttccntacatgccactatgagtnattgtgccacctgtcaggtattntccagatgaagtgactgcnacgccattgactgaattggaggnatgcagctagtgctncctatgcactgtctggcataaa

SEQ ID NO: 36389 - DNA, 1844 bp, Oryza sativa
  Clone ID: PAT_MRT4530_4021C.1
ttttttttttttttttttttggcacagcaaagacattagaagggttttattcaaccaaacttacacttggttctttattttttttttttttttaggagagaagcagacagtatattgctttcttcagtaatttgattagcaggcaatattctcagattcttgcaagagtacaaaaatgaaaataagagcaggaaaatttggtttacacattacacagattacaaatattctatttgtgatccaagcttgtgcgttgaagcatcactcttttgacgctggcatgagtcgaagcctatcctcgctaggagggtttcctggatctttctcctctgacaaaagggcctgcaggtcactcccatttgccaggctgttgaactccaccgattttgagggcagagcaggataacgtcgctggcaaagggtcataagcctcttgattgactgaaggtacttgcgagtggtctcatcgttcataatgtgcgccacactgtttgtgtagatcttttctcgggccgaacgctcgtggataccaaccatagtgacaccaataggccatggtgcattgccaatggccagcttgatgtattggtccattgctgctaaataatcacgcttcatgcagcattcaacaataacgagcaatgcttgacggatgtcatcaggaagaacctgcttcctgcaaaactcaaacagggggctgagataccgcgcacattgcttgaaggttgcgaccatcgacttgccctttgctgtcctcttctccagctccggcatctcatcaagctcctggttccactcaatgagtagcttcttgaagaacaccaagatcttgtcctcatcacacagctcctcaaacttggtcttcatccgtttcgagtccttgtccgcatcagcatcatccccactcctccggccgtccccatccccatcatcagcattatccccgccagcgccaccctcgccgccatcaccgccgcccgctcgtttgcccttgcccttgacataggtgtcccggccagccctctgccgcttgcggagctcgaccatgtcacggaggaagtcgttcgtctgcccctctgtcatgtcaaggtcgtcgatgtcgtcaatcacgccggacttgagcacgaacttgaggcgggcgagccggtcggcgtcgtcctccccgaacagcgtgacgggctcgcgcaggatgcggaggcgccgcaccacctcatgccgcgggaggtcgagctcgtcgatccggcgctcctcggagaggagcgcctcatcctgcgcggtcttcttccccgcgaggcccggcgggacggacgcggcggcggcggacgaggaggagttagggttagggtttgcggcggaggactgggccgggtcggcgttggggttgctggggtcggagcccgcggcggaggcggaggaggtcgccggcggggccttggagaggagctggcggtgctcctcgtggcgccgcttctggagctgcttctgctccagctccgaccgccgcacgaagctcttcccgccgaagtcggccgtcgccgccttccgcttcttctccagctccctcttcagaagatccatcgctccggcgacgcgacgggccaaccccgaactctctctctcctccgcgttctcgccgccgcttcccggagagaggcggcgccggcgaggctaagcggctcacttttttttttacacgaaccgattcgctatttgggacgccgccgatagggaaagccgcgtcctgaagtcgcgaatccgcaaccgtaaaatttgaccacatcttttggattggtacagtaactgtgatttacccctcctatccggactgagatgctccctcgtgc

SEQ ID NO: 36390 - DNA, 165 bp, Oryza sativa
  Clone ID: PAT_MRT4530_40220C.1
atggcggctgccatggtcgaagtcacccatgattcggcagcggcaatccatgctgtgtggttgaagccgcccgaggctgagcggcggcggatccgcacgcccaaggcccgacggtggcggattgggccgcccgaggccaacgatggcggatacagctcaccctag

SEQ ID NO: 36391 - DNA, 608 bp, Oryza sativa
  Clone ID: PAT_MRT4530_40221C.1
gtcatgtggatcaatttgggctatccaatgagtctcagcgtaaaaaggaaagaaacttcaaacaacgtatatatcgtgcaaatctggaggctaagaagaaatgtagtacaagtcctatgcaaacaacgcatgtgtcagagtatgaagaatgtgatagtgccgaggtcaatgttgctgaaattgccacctcaacaaagagggaaaaaaataacagctatctacgtgagtggcgtgcaagaaatagagcaaagtcgagtgttgttaatagcactgtaacatccgtcaatccaactcaagcaacaactacatctgaaataaaccagagtgaagggggtgtggtagggacaagtgaactttctgcaaagaaaaagagagaggatacaaacaagtatcttcgtgaatggcgtgcaagaaagaaggccaaatcaacagatggatgcaatactgtatcttctggcacgccaatgcagtcaactattatgacccccgaagaacacaatgaagatggtgctgttcagcgatcttcaatctaccctatagttaaacaaatactttcactcattctttcattcatcactcaacgtccagattatccccaagagatctaa

SEQ ID NO: 36392 - DNA, 948 bp, Oryza sativa
  Clone ID: PAT_MRT4530_40222C.1
atggcggatcacttcgcgctgatggctggtcggctgctcacggagtcgacgctgcagtcagccgtgcaggaggctctcgctgtcgcctccgtgaagatagttcatgatcagcctgatcttcccgttcatgaagatgttcaggatggaaaggcgaagagcggtgtcatggtggaatgcagaatctgccaggaggaaggtgacgagtcctacatggagaccccttgctgctgcaagggcagcctcaaggcaaggacatttggggtttcatcccttatggtgaatgctgataacttgagttttccaatagatgtgttatttctgcctgccattcttacccaacagatttccctgctgtccgaatatttacttgaattagtttgtcactgtctgcagtacgcacaccacgcatgcatccaaaggtggtgcaatgagaagggagacacagtatgcgagatatgcttacagcaattcacgccaaactacactgcccctttaaagttgtttcggcatggaaggaacctaattagtttcaggagatctggagaaagatcagataatattgatactgatcgcagtcaagaacactttgcgcaaacctcagatcaagctgccggtacatccagttttgactctcagaattccagcccaaaaggtgtcttctattgccgtgtagtcgcaatatctctgatggccttgttggtgctccgtgatgcgatctcacttatcctcggcgatcctgaggtctactcgatagcactgttcactcttttgatgattagaacagctggaattgtcataccaatatacatcatcttggtatcagttaccacattgcttcatcgatacaggcaacatcaggcagtgcacgaggcaacggattcagaacctggaggaggagagggcttgcggccgatgccacctccacagcatgttatcagcatccagtag

SEQ ID NO: 36393 - DNA, 2158 bp, Oryza sativa
  Clone ID: PAT_MRT4530_40223C.1
ttttttttttttttttttttacgtgaatacaaacttattatcattattcggcagattcttggtgaagtacaacagagaatcagatcaataagtacaacacatacattacattacatactcaacacatcaacaaatggcacacccaaaattctggagtacataaatagatgaggcgacgcctttattccaaaagatgaagcaaatgaccctactacctgaatggatcgatcttggtaagcctcaccaacttatgggagcaaaggaactttaacagtcggtccggttttgattcgagtcagtggcattagatcttcggatcgcgcaagaggagccggtatatctcgttgttctgctccgacatgtactcgtacccaagattgtcagcacggctcttgaattcgtcaaactcctccggcggcacttgtatgccaaccaaaacattcgctccggtttcaccctgtgcacggtaatggaaaaggctgatattccagcgggggctgaatgcatccaaaaatttcataagtgcaccaggcctttctgggaaaatgaaccggtaaacaagttcatctgttacttctgacctgccaccaataaagtatcttagatgatcctttgccaaatcattgtcagtaagatcaacagttctcaattttgaagattccatacgttccaccattgctttaagttcatcgtcagtgtagatgccaacactgtaaaggacaagggcatcttttgcattgcaatcgtatctgtatttgaattcagtaatattcatccggccaaccagctctgcaaactttttgaagcttccctgctcctctggcaaaaatgtggcaagaactgcttctcgttttcgaccaacatcagccagctcagttactaatctgagccgatcaaagttcatatttgctccactagttattgcaacaacattttcccctttcaagccatagtatttgcagtaagcttcagctcctgccagcgcaagggcaccagcaggttcaagtatgcttcttttctcctcaaacatatcctttattgaagcacaaatagcatctcgactgacaagaacaataccatctacaagttcccggcacaagcgaaatgtttcctcccctacaactttgacagccacaccatcagcaaacccaccaacttgctccagcatgaccctttgaccatgacacaaggacaatgccattgcatttgcatctgatggctccactccaattattttcacctgtagaagagctgctgtaaaatatacagaacattccatcccaacctctgggcgaaccctttttacataggcagcgatcccagcaattaatccacctcctcctacaggtacaaatatggcatgaagtgggccttgcaactgccgaacaatttccatgccaatcgttccttgtccacttataacatcaggatggtcaaaaggaggtatgaatgtgcggccttcctgctcgcatctttgttttgcatatgattgagcttcatcatatgagtcccctttgagtacaactgttgcacccaatctctccaccgatcgccacttgatttcaggcgttgtcacaggcatgacaataacagcatcgcaaccgagtctttgagcggaaagggccactccctgggcatggttcccagcagaggagcagatgacacccctctccaactgttcacgcgagagctttgccatcatattgtatgctcctctcaacttgaatgagaatacgggctgcaggtcctcgcgcttgatccacaagttgacgccgaggcgctcggagagcttggtggcgagctggagcggcgactcgatggcgacgtcgtacaccttggacgagagcacgctggtcaggtactccatcgcgccgagccctcccgccgcgtcccctcccaccgcctccgcctccccctccccaatcccctcctccccgcggccccgcacgaggtacccgctctgccgctgcagcgtctcgggcgccacccgcatcatcggcaacggcggcgccgccgccgccatcgccgcctccggtgacgacgccgtcgccgccgccgccgccgccacgcgcgttggatgcctgcgcccgcgcgcgcgcggcacggcggcggtgaaggtggaggtggccgcggccgcggcggtggcggcggccgccat

SEQ ID NO: 36394 - DNA, 1816 bp, Oryza sativa
  unsure (1)..(1816): unsure at all n locations
  Clone ID: PAT_MRT4530_40224C.1
aaatcaactccacctccagaagagaagtccccaccatcacatactccggagagctcatccccaccatctnaggagtcagaaccaccaccgtcatccccaccacgacccacgcgtccgctcaacgaggagtacgttcctccatctccggcgaaatcaactccacctccagaaaagccactaccaccacacacaccaacaataaatagttctccaccatcggaagaagagtacatgcctccatctccagtgaaatcaagtccaccaccagccgagaagtcccagccaccgccatctccagttgagtcagtacttccaccagtgaagtcttcaccaccacacgcaccggttatctcagaaccaccaccaacaaagtcttcaccgccgcaagtgccagtgacctcggaaccaccgccagcaaagtcttcacctccacatgaaccaattagcccgccagaaacaccagagaagtcttacccgccatcaactcctgaggaatcatctcctccctcagtccccaaggcttcatctccaccaactgagaagtctcttcctccaccggctacagtgagcttgccgcctccaacagttaagcctttgcccccaccggttcctgtgagctcaccgccacctccggagaagtctccacccccgccagctccggtgatcttgccgcctcctccaattaaatctcctcccccaccggctccagtcatctcgccacctcctccagttaagtccccaccaccaccagcaccagttatcttgccacctcctcctgtgaagtctccaccaccaccagcaccggtcatctcgccacccccacctgtgaagtctccacctcctcccgcaccagtcatcttgccacccccacctgtgaagtctccacctccacctgcaccggtcatctcgccaccacctccagagaagtcaccaccaccagcagcacctgtgatcttgtcaccaccagcggtgaagtctcttcccccaccggcaccggtcagcctaccaccaccaccggtgaagtcgcttcccccaccagcaccggtcagcctaccaccacccgtcgtgaagtcacttcccccaccagcaccagtcagcctaccaccaccagcggtgaagcctcttcccccaccagcaccagtcagcctaccaccaccagcggtgaagcctcttcccccaccagttccgcaggtctccctccccccaccgaaacaggagtcattgccgccaccagcaaaggaagctgaagctccacctgcaaaggaatctaaacctccaccagcaatggaagctgaagctccaccggcgttcgacactactgtactcttaccgccggtgatggcgcaccagtacgcctcacctccaccacctcagttccaaggatactaagctccatggagagattaacgacgacgacgacgtcgtcatcaatgagaagtgatccataaagctaaagaatctggcatgcatgtatgtaaacacttctctagcggctaaagtgcatgcgcattgcgattaatccccttcaatttttttttgtatgcatccaatatatactttcttggttcttctagatagttacatatgtatgtgctgatgtgcacatgagcaaactgtacgacaaggtcatattcatgattcatgccttgtggtagcaatatccataaatatatatcccttttgttcaacagaagaaatgtaattctgtctctttgcatgagatcgaagaaacaaagttgtttgatgtggtctgcttccaaaaaaaaaaaaaaaaaaaaaaaaaaaaaaaaaaaaaaaagggcggccgctcatgagg

SEQ ID NO: 36395 - DNA, 741 bp, Oryza sativa
  Clone ID: PAT_MRT4530_40225C.1
gcaggattcggcacgagcgacaccaaacccaaaagagaggcgcggcgcggcgcgtcgttgtcgtcgcgtcgatcgatcgcatcaacccaaccctaccaaatataaatcgatcgatccatcgccgccctctacacgtacgcgccaatggcggcgtcgtcttcggtgctcgtcgtcgtcgccgcctgcctcgcggccgccctcgtctgcctcgccgccaacgtcgcgccggcgtcgtgcgcgcgcgccaccgccgccctgccgcacgccagcatcgcggagacttgcagcttcgtcgacgaccacaagctgtgcgaggagtcgctgtcgtcgctgccgctgacggcgagggcggcggcggacgcgcgcgtgctggcgcgcgccgcggtgctgctggcgaggcagaacgcgacggcgacggcggcgtacctgtcccacctccacgccgccgccgccgcggcagccgacgacggcgacgacgcggatcaccggtgcgtgggcgactgcacggtcaggtacgacagggcggtggcgtacctcggcgacgcggcggcggcgctggacgccggcgagttcgacgaggcggagctgctggtcggcgccgggcggacggaggcggagctgtgccagaaggggtgcgagcacgcgcggctgccggcgctgctcgccgcgcgcaacggagccgtcgagcgcctctgcaacgtcgccatggacatcaccaggctgcttcatcagcagcactga

SEQ ID NO: 36396 - DNA, 382 bp, Oryza sativa
  unsure (1)..(382): unsure at all n locations
  Clone ID: PAT_MRT4530_40226C.1
ttccttctctctctcgccatgcaggtggcgcggccgacgaagaggggctgggagcgggcgccgccgccgccacggcctctgggagcgggagtgggcgccgggacgacctcgccaccgacttcgcagccgcgggcgtccacgcctcctccctcgccgccgcgggcgaccatgccgacgtcgacggcgacgttgacggcgggagcggcagtggctggctcgggagagaccgggacactcggatccggccgtgagcgggcgccgccgccgccatggcctctgggagcgggagcgggcgcggggacaacctcgccgccgnggacgacgccgcgggcgttctcggcgccgncttcgcagccgtggggcgtacacgcctcctccctcg

SEQ ID NO: 36397 - DNA, 1488 bp, Oryza sativa
  Clone ID: PAT_MRT4530_40227C.1
tgatatgctttgtttctgaacttctatagtcaattctgtcatttgtctccggctttctttttcttttaagatcctcatttggtacgtacctcctaactgaatcaggtgtgatcgcatactatggctgggaaagggtatcaagcaactatcatattggagctcaggtttgaacttctcagatcatcgacctgtcagctccactcttcatcgttgaagtcgaggtgttcaatcagagaaaactccaacggcttctgaatttcacaaatactatttgctcttaagaagcttaagatagtggtagtacgtactctagatattatatggcgattccctgaatttcaggctatagtgctgagccacatttgattgctgcagatttatctatgcaaggcaaatgtactatacagcgggatctgaatatctgatatttatgttaacgcatgatgggtaatatacatttacttcatgaattcctgatgtagattgaaatctcacctatactcctacatgacatacatacgtgcgcttctattgactcggtttgatttatctgatctattagtaaatgtatgtgtgcatccctcctttcaaacctcactcatattgcatctcaaccattcaaccttaatgctggccatctgtgaagtacacatgtaaattcacactgctaagggcctctttcaaaagtctttccaggtacaaaggatcagaaccaaagaagagtcactatccttctgtacaaatcccattaagcccatcgtcccagtaaatcagatttcgggctcaaaattggcctgcccgaatgtctctatcgatgcgctccgcgttaagcgttcctggtagctcccggaagtcttcattaaatatggagtatgcactgacatcaccttgctgtcgtcttccaagattacaaagaatgaccaagaagcctgtaccaagtataaataaaggtccaacgtcgtacatttgagcaataggtgcaaaaaggaaccacatagcgataagaacccatgctttgatacccagagaaaatagcaccatcaacaagatatcaggtaatctcaatttgtctcgaagaaatataaaaaattttctcttccaccaggtggttgtttctggtattttgaacttcagctcttcctcttcatcatcgtcatcgtcaccatcaccgtcacggagatgattagcaggtggcttaggtgccacggccactataagactatccccgtggcggaggttgacatgggcgtcgtcttggcacgggagattccttcctcgcaggaccaggcggaggcggtcttgtgggagatgtcggtcgtgagcgatgtggcggcgcagatcggcaaccgagataaacggagggaggcgaagggtggtgggacgggacgggccgacggcgcgcagcgtcacctcgaccatctccgcctcgtcgccggcggcagccatggccatgcctgactctgatctgtccccgtctgtctactcccc

SEQ ID NO: 36398 - DNA, 348 bp, Oryza sativa
  unsure (1)..(348): unsure at all n locations
  Clone ID: PAT_MRT4530_40228C.1
aactactacctctctagtagtagtagaagtagcagtagcaagctagaagagttctcctcagcagcagcagcagagcaaagaaagcagagagtagcccctacttcgtccccgagaacgaaaagatcagggcaaaagagtcgcaagcagaagagctcagcaagatcctagagtagcaagaagcaaaccaagaccccagcagcttagaagcactaagagcccacctcatccagagagaagagttccagatcagcttcaaaagaagtttaagagtttctagcagcaagactaggatagccagaagncagntctcatctcatatnggaaaaaaggtagaaacaaaggcagtct

SEQ ID NO: 36399 - DNA, 1098 bp, Oryza sativa
  Clone ID: PAT_MRT4530_40229C.1
gacgtgggacagatcagagtcaggcatggccatggctgccgccggcgacgaggcggagatggtcgaggtgacgctgcgcgccgtcggcccgtcccgtcccaccacccttcgcctccctccgtttatctcggttgccgatctgcgccgccacatcgctcacgaccgacatctcccacaagaccgcctccgcctggtcctgcgaggaaggaatctcccgtgccaagacgacgcccatgtcaacctccgccacgggggtatagtatactagtattctttttctttctcttcacatacatcttatgtggaagacaggactattctaggatggatggttaattcgttgtctcttcaagaccctactttttttcttcttcttctgcacttgatacatcttgtggaatacagttaaatacttccttccttctgcaatttctttagatagtcttatagtggccgtggcacctaagccacctgctaatcatctccgtgacggtgatggtgacgatgacgatgatgaagaggaagagctgaagttcaaaataccagaaacaaccacctggtggaagagaaaattttttatatttcttcgagacaaattgagattacctgatatcttgttgatggtgctattttctctgggtatcaaagcatgggttcttatcgctatgtggttcctttttgcacctattgctcaaatgtacgacgttggacctttatttggtggtggagagcatcagctcagagcctaagagaactgtattgtactgaggacatgtccttgccctacaaaaggcaatggcctatggccaacttgtccatcctatgaagaaaatgagaggatggagatagtcggtacagagagaagctttggacaggacagagtagaaccatttacactttgcatgcacttctttttttcctgtgattatgtccaatcaaggggaaatgaattgagaaggaaacattgcacacaactcaaaacaaaatgagcagtgtgctcatcatgacactgagatacttggtacaggcttcttggtcattctttgtaatcttggaagacgacagcaaggtgatgtcagtgcatactccatatttaat

SEQ ID NO: 36400 - DNA, 606 bp, Oryza sativa
  Clone ID: PAT_MRT4530_4022C.1
atgagctggcgggccagaagcgcggcgtctccacctcctcctccaccgccttcctccccatgcggatctggccggtgctccaccccacgcgcacaaatccagtggtggtgcgacggatctggcgcgggcaacggtgggaagcgtggtgacgagcgccgatcggaagcggctgagcgagcgggcgggcgggaagcgcggctccgtcagctcaccgagcgtcggcgacacgggcgcggcaacgtcgccgattttttatttggctgccattcgacgggggcttcgtacgcgccggcgaggcggcaattgttgttgcggtcatgtggtggtgtcactcttgggctattgtggcctgcagctgcagctgcagggagcaaaaggcaggcatctcgtgagctgtggagtctggagatggtcgcgcatgcatacggacggagaagtggtacacggggaaaaagatggacgggagaggcgtcagtggcaaattggcagctgctgcatgctaaagttgctaatcctgttctagtgtggttctggtgcttgaaaggtaacatgggagcaatgaggaccatgagcaattctacggtccttcaggaggactcatgttaa

SEQ ID NO: 36401 - DNA, 173 bp, Oryza sativa
  Clone ID: PAT_MRT4530_40230C.1
tttttggagacaatttaccaactctatagaaggtctagatacaatagctacactacgcattaatctgatacacttttactgcgtgagtagactagctgaacaattcagcatgacattcttatacacgaatctgtacctaaaggtacaaaaaaacatagaactctgtatacctg

SEQ ID NO: 36402 - DNA, 363 bp, Oryza sativa
  Clone ID: PAT_MRT4530_40231C.1
atggcgcggctcggcggtgcggccgcgagcccccatggcgcgggtaggcctcggcagccgggcagccagggtgccgctgcagtgccctcctcggccaggtgggctgtgcggcgcggccagatggggtgcggcgaccgggtgacggggcgccgtcaaggttgtagggtcccaggcgaaagcctagtctggtggtgcaccgggccagcagcggctacgtcttcgggcgtcgtaaccttcttggggcattgtcgagggataggcgatgacggcatcctggatgtcgtgaccaccgtggtggcatcgttttcggagtcttgtctctgtggtgttgccataggcctagcggcattcggccacgcttag

SEQ ID NO: 36403 - DNA, 372 bp, Oryza sativa
  Clone ID: PAT_MRT4530_40232C.1
atggcccggctgtcgggccgggccagcacgggcacgacccagtcgggctgtgccgtgcttgggtcgggctgtgggcctcgggccatatggccatctatacctccatttggtttgcttctcttcgaccctaccatcttcaactttccaaatatgactatcatcttcaacctcccgaagataatctcgtgcccgtgcccgtacgtttgccggagcaaatatccccatcaaatccagccgaatctttctcggttagccaaaattggtcgagggtttttgatcgatatcccctcgatgtactctttccgttttccccaaaatcagagcgtaaaactcgagataaaaatgaccggggaagattgccgtcatcattag

SEQ ID NO: 36404 - DNA, 455 bp, Oryza sativa
  Clone ID: PAT_MRT4530_40233C.1
aaataggggattttattcaaaatgggatgacatcaacattcaactgacacgcatgatgatacataactttatttttaacattagaaccattctactattacaattcgaccccagacaccaccaacggtgggaatgctcctcagagcaatgtagtagttatgatagataccacatatcgatggcaagcttaaggccaacaaagatcgatcttgatcttgattatgatcaaagcacacaacaccgacctgctacagttgtaagttctgcacaatctactgaacgctactaatggactgttagagagattcatgcgctaccaacctgagctgtttataacactgttgctgcatgactaggatgtctatcaattgaaacgtagctggttaacaaactggagttgccactatcatatgctgtagtcttacgaactcactgtatgacctgatcacttgttg

SEQ ID NO: 36405 - DNA, 282 bp, Oryza sativa
  Clone ID: PAT_MRT4530_40234C.1
atgggcacggcgacggagccgtcgctcgtggcggtgccaacgacggatggattcggcaggacaacggattctgcagcggcagtgttcggcatgagtggatccggcgtcagccagtcaacacgttgcgcggaccaagccgaaggcgctaaggcatgggggctcgatatggcagcaccagggtcggacgggaccgacgttgctgtcagccacaagcgctccgatgtgaggctccacattgctctgcgtcgtgtcctcatccgtgccatccatgccgccacctaa

SEQ ID NO: 36406 - DNA, 462 bp, Oryza sativa
  Clone ID: PAT_MRT4530_40235C.1
atggctaagcatttcctaaaccaacatctaatcattttgatacccagggctgacgtcagcgaaggggggggcggcgccgacaggtgggccccgcttgtcagcgcacaaggggagggagagggggctcgggcaagtgggccccactggcagcggcacaaggtggccggtctaccatggaccgggaccacacgggtggtccaccgccggtccacgggactgacggtccggatcggcctcaaagacgatcggacggcgcggggaaggcggctaggcacggctcggctcggcttcaaagccgaccggcagccatggcggccggtggcgacacgcgcggtcaccggcggtgaccggcggcggcgcgcgagagccggcaatggcaggcgacggtgcgggaggcggcggcggacgacgcacaggccggcggcggcggacgaaggcgatggcgagcgcagggagcggtag

SEQ ID NO: 36407 - DNA, 189 bp, Oryza sativa
  unsure (1)..(189): unsure at all n locations
  Clone ID: PAT_MRT4530_40236C.1
gggtactcggcgtacacggcgactaacggcgcggtggaggcgatgacgantatcattgggaagggggtggcngcnaagggggggacggctaacntntttgctcctgggcctgtgaggaccgatctgttcatggcggggaangaccaggcgttcgtgaagaangtggaggagatgtcnatggggcggatc

SEQ ID NO: 36408 - DNA, 680 bp, Oryza sativa
  Clone ID: PAT_MRT4530_40237C.1
tttttttttttttttttaacaacagagaggtatatatgtatattctcttatttttgtcaatacacacaacaggataacgagtacagagctaaacaagcacaattaaactggcacagcaacggaatcaagcacctaaaaatatataatagctgaactcaaactgaacttaattaataatcaactcaaattaatcctattcatcatcgtcatcctcctcctccctagcaacactagcagctgccttcttctccttgttgctgcctttcttggccttcggattcgtcgtcgtcgtcgccctcttgctctccttcatgtctcgctcttcccctgcagcctcgccgtcgccgtcgccgtcgaccagctggtcgtcgtcgtcgtggtggtggcggcgacagcggcggcggcggcggcgcatggggcagcagctgtcgccgtcgcggcggaggctggtgagcgcggcgccgaagccggtgccggccaagaaggcgaagccgtacttgtagaacgccatggatgatacgatcttgatcgcacacggctctacggcagctaagctagttattagtgaaatttgtctgatgaaatcagcttgatttgcactgtaagtgatggagttcttgtgaattgttgatgatgaatcgatcggttagatcgagcgcacgcgtggtcgaacgcgtggg

SEQ ID NO: 36409 - DNA, 395 bp, Oryza sativa
  Clone ID: PAT_MRT4530_40238C.1
attcattacagggctacggggcccaaacaaatacaacatgaagggcagccatataatgcaatagaacccccgactgatgtaccctacaaaaaagagaaccgtccaaaaagaccaaggggattaactatagctaaccaaaatgtttaaggcccgactatataccaaacacggaagcacctaggaggccttgaaggagcggacaaccaaacaaacacatagcataggggacccccctgacattggggccagtacccctcccgggaaccgggggagcaaatgacctgttccagcgcacaccctgggacctgccaacgggcaggtaaccttaggccatggtgggggtgaaaatggccaagccagcctagaatttggcataaaccaaaaaacccaaaccg

SEQ ID NO: 36410 - DNA, 606 bp, Oryza sativa
  Clone ID: PAT_MRT4530_40239C.1
atgcacctcgccggagagaggtctagggagggcggcgaggttgatctccgcctgcacggtgatgggtggacggtgatgcagcgacgaaggggaagagcggggaagtggccaacggcgaccccacgctctccggcctctgatgtcggcagcgcaagcacgcgaggaggcaggacaaagggtagggcgagcggtgaagagggagaaaatggcagcgcattgttgagctacacaacatggtctttcttgagactcccaatttcccacgacggctgggatgacaacaacctgtatggcgcggtggccgtggatgattcgagcagcagccactccgtcctcctgcacttcatctcaaccccacgcgcgtaccccggctactgcagcgcctggccccgcgtgacaaccgcgaccccgttccctctccgtggaggccatcttcgcgcgtgcagtccttcaagtgcctccccggccgttgccgtcgctgcggcctccgcttcccttagttgtcacctcaagagacctcttgctgctgtggtcgagctcgagtcgagctgtggtactggtccgaccatctccacctcattgggattcgaggttcatcgtggctga

SEQ ID NO: 36411 - DNA, 541 bp, Oryza sativa
  unsure (1)..(541): unsure at all n locations
  Clone ID: PAT_MRT4530_4023C.1
ggctgcaggattcggcacgagctacnctcnnatggcgtccgccaacgccatctccaccgnctccctcctccgctctttctcctcccaggggaagggtgaggagggccaacaatgggcgggcgcagcngctnatggtgcaggcngacgccaaggacatcnncttcttttttttatcccgggcggcgctccaagccggcgtcaaaaaactcgccaacgccgttggcgtcancctcngcctcacnacgganaaacctaatgcttgatgagtacgcnttcccaaagtgntacantnatggantcaccatcgccccggctattnagctatatnatccangnaaaatgntggtgccccattcatccgtnaggttnctnccaagaccaaacattctgcnggtgatggactanaaccccccccnnccagccccncnaaatcctcaaaattcggccnnttngantttnaantcctccnnctnnaccctcntttcccntttacganccnngattnacnacnaaanctcctcccantcgttccttcatncca

SEQ ID NO: 36412 - DNA, 3129 bp, Oryza sativa
  Clone ID: PAT_MRT4530_40240C.1
ctagcccgacaaggccggggcgatctccctggcggccgcctcgagcacctccttcgccctgtgcgccagcttctcgcagatgttcctcgcgatcctcttctggaacttgctcctcttcacccactcgatccccaccagtatctcgcaccggctcccgctgctcgccgccgcctccgacgacgcggcctccacgctccatatgttgtgcctcaaatgcaaccggaagaagtcgccgaaggggacgttgcgcagcgtgatgacgtcgtagacggtccagccgtcgccgtcgtcggaggggagcctgagctgggtgctgacgacctcgccgccgaagatggacatgtagcggttgaacttgtagctggcgtgccgctccaggacgccgggccgggcgtcctgccacggggtggcggcgtagtcgaggcaacccgccctgctcatcgccttcgcctccagggggcccccgtcgaacacccccatcagcagatccgccctcgagggatgaaaattcacatccatgtttacacaagtactgtataacttatctagcctcttccaatcgataggcagttccaaagtatactcctttgacagtggcacatctccaatgctcaatacagattgaacatcattaagatcgacatagttttcatcttcttgatcttcttctagtttagccctctgttcaatagctgatgatttggttttccatagtccaattattgtcctgccttccttatcttgggactttgcaccattcttggcatcgagtccccggccgctcttcaagacaaacaacaaagatggagtacctactgttgtgaaagatggagttaactcttcgatttcctcgacatcttcccacagaaagaagaatttcgttttatgtccaaacagattggcatagaaaccaactattctggctgacagaaacagtcttccctgcaacggcaacttccgtttcaaggagcacgcataaactgctataaggaattcttcgtgtggtaaaccaaaaagcttctggaacgttgcatttctgtgaggtgactgaacatgtaacttcttaccaacttccttctccatcttacttaagtactctctcattgatgtctcaggtccttttgtgttctccagaaatattctcaaatgtaacctactctgacaagtctgagctaatttaccttccagtggcacccatatatctgctagttctgctgacgtgtgtttaaggaagttaatttcagcatgtcccagagaaactgccagatcaaatggtccatcaaaattgaaaacctcaacatccaacgtagcaggtggttcttccatggcatcaaactccattatctcggtcctgtgagggtcatgagtctgaagttgcacagagcttgttcgtgttatgccgttacagctgaacacaacataaggatctacggaaccgctagagacaggcggcaagcttgtggcctctagcagagctacagttaacaaccaaccatctccatttgctttaatcccgtgatcacttcctcgctgtacccttacctctacaaaacgagatatcatactcagtaaacgttctagctgaagaactagtatgccagatatgatcagctctccaaacgtgtcaggtaaatcaagacctttgaactcaagacccataagagggcctggtcttgacagaaagatgtgtacaagaacatacagtgccattatcactgtagagatgactgtgaaattgcaaaaatacttgtaagcaagtctgatatctgactgatgatcagtctggagcggtgccaataatcgctctttatccatcccagcagaatcagcaatttttacatgccgagacaaaatttctgcgtaactttcaaaattttctttcagtccatcccgaacacttccctcaatcatacttttcatcatggtactctgaaggaactctacattgtatgatacagtcagatgtgacattccttcacttgacgacaactcagggtagtgaattattttgtacagcataacaacctcaaaacaatttccaaatggaacctcgggagtacgaacacgagtcataattacataactcttgccatctgctttaagatatgtttgctcttcaatagttttgacggctttcataaattttgttgcacctttggtgtattgacatgtcctggttaagctaggaggattattattgttccatgtccatggctgttcctcatagtccatagttccttgcaactcgcgcaactctttggagaactgagaatcaggcccaaagataagagagttcaaattcttcgagtccacaaggtaagtgtgatcgaacatgacaccaccattaagatcttctggcatgtcagggatgcttttagacttcatgatttccatagcttcttcaaagcttgcatctggaaccattggttcgatgtcacttgtgccctttgctgttgctgcactaggctctgttagatcatcatcttcagagttggaattggaatttgcttgggctgaacggtcagaattttctaaagaagatcgttctattgcaaaactcctgggagaatcaaccgtcccactgttggaacttgaatgttcccaataagttgatctctcaaattcaatgtcagtgtcgctcctagagctcgaacaaggtgatgagtggataacagtattgtcgctgttttctccatgcagtgaaaaggtgagaagaattttcccgcaatccgccgcctccgccgcgcccttcttccagcggcggtggtgcttgggctgcagcgtgaaccacgtcggcggcacggtcgtccttctcctcctccccgcggggacggcggcggcgggcaccggcagcttcaccctgcccaccacctccctcccgccgcgcccgccgccctcccgccgccgcgccaccccgacctccaccgcctcgcccccgtccacctcgagcaccagctcctcgttccactccgccgccgcccccgacgccccgccgccgcgcgcctccacctcccgcgtccgcgccctctgcttccccaccttcgccctcgcgtagtacggccctccgcccccatcgccgccgtgctccgggaggccccgcgcctcgatcacgtacaggtagagccgcat

SEQ ID NO: 36413 - DNA, 336 bp, Oryza sativa
  Clone ID: PAT_MRT4530_40241C.1
aagttgagacaaaacagttgtttctaaaaaaaagtatttataaaagggatttataggaaacttaggattcctcaagagtggtcttgtgccatccatttcatctagaaattcaagcattaaccaagaagaaacaaaatgaaagaatgttgaaagcatggtagtaggccaaagaaatcaatgtgtctgttgtttgttgatctgattggattggaccgttgtatcctccttggctagatgttactaccacagtagtagtactgacaaattgaaagcagtgtgggggtatactatactatactactcctataccacaagtatactgaaacatggatctgt

SEQ ID NO: 36414 - DNA, 1056 bp, Oryza sativa
  unsure (1)..(1056): unsure at all n locations
  Clone ID: PAT_MRT4530_40242C.1
tcgagcacctccttcgccctgtgcgccagcttctcgcagatgttcctcgcgatcctcttctggaacttgctcctcttcacccactcgatccccaccagtatctcgcaccggctcccgctgctcgccgccgcctccgacgacgcggcctccacgctccatatgttgtgcctcaaatgcaaccggaagaagtcgccgaaggggacgttgcgcagcgtgatgacgtcgtagacggtccagccgtcgccgtcgtcggaggggagcctgagctgggtgctgacgacctcgccgccgaagatggacatgtagcggttgaacttgtagctggcgtgccgctccaggacgccgggccgggcgtcctgccacggggtggcggcgtagtcgaggcaacccgccctgctcatcgccttcgcctccagggggcccccgtcgaacacccccatcagcagatccgcatcgataggcagttccaaagtatactcctttgacagtggcacatctccaatgctcaatacagattgaacatcattaagatcgacatagttttcatcttcttgatcttcttctagtttagccctctgttcaatagctgatgatttggttttccatagtccaattattgtcctgctagccttgctaaatgaagcaaacgaatggaactgaaacttcaacctgccttccttatcttgggactttgcaccattcttggcatcgagtccccggccgctcttcaagacaaacaacaaagatggagtacctactgttgtgaaagatggagttaactcttcgatttcctcgacatcttcccacagaaagaagaatttcgttttatgtccaaacagattggcatagaaaccaactattctggctgacagaaacagtcttccctgcaacggcaacttccgtttcaaggagcacgcataaactgctataaggaattcttcgtgtggtaaaccaaaaagcttctggaacgttgcatttntgtgaggtgactgaacatgtaacttcttaccaacttcttnctccatcttacttaagtacccnccggacgctgggcga

SEQ ID NO: 36415 - DNA, 920 bp, Oryza sativa
  Clone ID: PAT_MRT4530_40243C.1
gtgtaaaaatcttttttctataaatttaagcaaacttgaaaaagtttgacttacagacaaccctaaaacatcttaacacagggagcaaagtataggaatgtcatgacttgttaaacggcattcggaacaaaaccaaagagttttttaagcccggaaacggaaggatatctgtttcatatcatgccacatcttcataattcagagcatctgaacgttttggatggattactactacattccttcaaactcttccaaatggtgtagtttcatcatatgaaatgcttaatggatgcaagtactgtttgacaatctcatcatgaagacatcatagaagcaaaagcagtcttgttcaagggtgaatggtggtaagtgaagtgctctagcaacctgacgacaaagcagcttggagcagcttcttgtccaaacgggtcttgaaactgatctggagttcatactgagcaccaagcaggcgcaggcgcttcaaccagaacagcttcttctgcagctcgtgcgtctccgccttctgtaccagaaattgtttcttgacatgcatcgagaactgctccctcgacttcttgtctatgtgaggcgatcgtagcacggtatacaaggatcgtgattcaggcaatccaaccttctgcgcgtatggaataaccccttcaactttgttagcttggctcataaaagatttcatcactatgcgtatcttggcggccatggctccacagctgaggaacttttgtcactgattgcaaatgcccaaggatggatgcggcggaagcactcgctcgcggcgcgggatggatggggatcggcgccggcggcggtggcggaggacgagcgacggcgccggcggcggtggcggaggacgagtaggatcctcagataccagcgtgcagtcaagtgtaattcccggccgg

SEQ ID NO: 36416 - DNA, 1169 bp, Oryza sativa
  Clone ID: PAT_MRT4530_40244C.1
cggcacgagggagcggcggcgaacccagctcggtgagtcgtcgtcggcggcggcggcgacggcgacggctaggaccacgtgacgcggatcagctcggaggcagcgacgacccatctctgatctctcctcacgttcagaggcgcgaccaagcgtcgagggggagcgctcgacggcgagagtcatgcagggggcgcgtgttaatctgaaggggtggcaacaggctgctgttgcattcggttctgcatttggggccttgcttgaccctagaagagctgatctgatagctgctcttggggagactactgggaagccagcatttcagcgtgtgcttcagcggatgaggaacagtgctgaaggcagggatgttctcctggagcgtcctcgagttatatccacacaagtttctcatgcctgggacatgcctcagaacacatttggtgcagcatatgctcagttcatgggatcaaggaacttctcaccggatgaccgcccacctgtccgtttcatggatacagatgagcttgcgtatgttgcgacccgcgcccgtgaagtccatgacttttggcatgtgctgttcggccttcctacgaacctgattggagagactgcccttaaggtcattgagtttgaacagatgttccttccaatgtgcatgctttcagtcgttgggggctctgcgaggttcaatgagaaacaaaggacactgttttttcagcattatttcccatgggcttcaaaagcaggtcttaagtgcacagatcttatgtctgtgtactatgagaagcattttcatgaagatttggatgaagtgaggaggaactggggaattataccatgccctgatcccaaaaggagcagtgtttagacttttagatcggtacattttgcatgaaagatgtctgaacttggttttcactttgtctacgttagtattagctcttccctttcaagaataatagcaagagttatgctattgatacctaaaaaaactagtaattctctttaacttagcatagcaactaagcttgcaatgttgatgttccctttaacaatagtgtagatgagttaattacatttttatgtgtaatactagctgaatgccggtacttcgctatggacagaagaaaacatatcataatattgtctgaaataaataaaattatattttc

SEQ ID NO: 36417 - DNA, 564 bp, Oryza sativa
  Clone ID: PAT_MRT4530_40245C.1
atgaattggatttcgtcgatcttcactccaccagaagctccagatcccatcaatctcatctcccatcgttgttgttcccccggctccatcgctttcatcaagggctggccgacctcttccgcaatcgacgcctctttcgccacggggtgcggctggccgcaacttgtggtgaccaactctgagatagtacgtgacaaggcttccattgaagatgaagccatggataatggcgcaagagcactcatcgagttgtcacagggcactccagggagcttttgtaaggtgcctaagatcatcctttgtgatggttgtgatgagggataccacctctattgcttgatcccaccattgacattagtgcctgaaggggaatggcactgctcgtcctgcatagtacaagaggaaaaggagacgaagaggaggctccatgggaaggacattgccaccaatgtttccatgctcgagacagatggctttgctgaacttgaagctgccaatgtgctcatgctattgaagaattcgagcaccgatggagagattgtggtgtcacctgtgtctcagtag

SEQ ID NO: 36418 - DNA, 431 bp, Oryza sativa
  Clone ID: PAT_MRT4530_40246C.1
cctatcctaatccccgacgctcgcattgggtggtcagattcacgtggcagcagcgccgcgggagctcgatggcggtggcagagcaggagctcgggctcgggggtggtggcgtggtgcaacagtttcgtggcggctcgccggcgaccgggcgacgcaagctcagattcacggaggcagtggtgccatgtgcaagaagctccatctggaaggtcctcctcttctgaacctcgcactgtccatcttaatagcattgttgaaccaaccattgaggtgcgctacatttttttttactcctctgcatttaatcagaaggaggcatggaatatatcggaaataattctagattgctggcacgttttgctctatttgattatttttctctgttcacaagtatgtgaatactgtcaaataatatgactaagtcatcagat

SEQ ID NO: 36419 - DNA, 4054 bp, Oryza sativa
  Clone ID: PAT_MRT4530_40247C.1
gcgcacgaggcgtacgccctcgcgcagctctcactctctccaccgccgccgccttcgccttcgccttcgccttcgccgccgcaactctccctccgccggagtcggcgtcggcgtccgccgcaagcaagctgagcgatcatgtcttctatggaatcatcgtacctccctgcaaccactgagtcaatagcgaaggctcaggaagctaaagatgcttcggagtccatttcaatcctttaccgtgttctacaagacccgtcatcttctgcagaggctctgagaaccaaggaacttgcaattacaaatcttaccaactacctcactaaagagaaccgggctgaggagctgcgaaaccttctaacccagctcaggccttttttctcgttgattcccaaggcaaagactgcaaaaattgtccgtggaatcatcgatgctgttgccaagataccaggaacatctgaacttcagatctcactctgcaaggagatggttgaatggacccgtgctgagaagcggacattcctcaggcagcgtgtggaggcaaggctagcagcccttctgttagagaatcaggagtacactgaagcgcttactctccttactggtcttatcaaggaagtcaggaggcttgatgacaagttgcttcttgtggacattgaccttctggagagtaaactccacttttctctgagaaacctgccaaaggccaaagcttcattgactgctgctagaacagcagcgaatgccatttatgttccaccagcacagcagggtactattgatctgcagagtggaatccttcatgctgaagaaaaggactacaagactgcatacagctacttttttgaagcatttgaagcattcagtgccctagaagacccaaaggcgatcttcagcttgaagtacatgctcctgtgcaagattatggttaaccaagctgatgatgtcgcaggaataatctcatctaaggctggtttgaagtatctgggtcctgatgttgatgctatgaaagctgttgctgatgcctactcaaaaagatctctcaagtactttgaaactgcccttcgtgattacaagtctcaactggaggaggaccctattgtgcacaggcatctttcatctctgtatgataccctcctggagcagaacctgtgcaggctgattgagccctactcaagggtggagattgcacatattgcggagatgattgagttgccagttgatcatgttgagaagaagctgtcgcagatgatccttgacaagaagtttgcaggaactctggatcaaggtgctggctgcctcattatctttgaggatcccaagaccgaggcaatcttccctgctacacttgaaactatttcaaatgttgggaaggtcgtcgacagtctttacatgaggtctgccaagatcatggcttaaatgccaaaatgtctttacagtcatgtgctagttatgttggctattatttcatattgcttcagttcccgttggtctccacagacatttaatcctgcatattgacattttgttctgcatgttggtctctcctagctaaaaaaggtaccctgtcttgaatgcgaacaaatacaatttgctgtttctttaaaaaaaaaaaaaaaaagcccggggtgcctccgtgctggccccttgaagacaacctgtcccctgggttatttttttttttaaacctttaatcccacatctcatcagattattgtaggcaccaactgtatacctgggctcactccacattaactaacaaaaatgacaaaagaacgcaccgaaaaaaatgtggaggatcaacaacccagtagtactgttcaacattgctaaatctacgagctactacaactaaattcggatgctgacacagttgatccatcttacaacagcaggacatgccaatcctagagatagtacacagcaaggcaagaatgtacagaaaaagttttaacatggctaattgatacagatcttacaaaccaaatggcatgcatatcttggagcttacagctttacctagtgttgctcagtagtgcaattgctggaaaaaatacactgagcaggattccattcagttcagatcaccctgattatctagaagcttcacagtagctactgcatctgagcaacatccattcatcaccctcgtctagtttgctacaataagctcatcaagcttttcggcttcagcattctgcggctgcatcgtcaattcatcgtctgcagcgctaaaatggtatttctctccaatagctctcattagctggtaaacctcaaacattgtcggtctttcctttggagcggaaagcacacaagagcatgcaaccttcatgaattgaagcagctcagcatcatgatcctttccaatcaaggacttatcaactgcatcctgaaggatagaattgtttgacaggtatgttatccaatccaccaaacttcctttgaagttttccggggcatttttcacctgtgtgggctcttcaccagtgacaagttcaagcaacacaactccaaagctataaacatccccttttggagtggccacgagggtacgtgcatactcaggagctacataccccaagtctccaaattcaccgttgacaaatgtgctcaggtgggtgtcgatggggttcataagccttgccaacccaaaatcagaaattttagggtcatagtcatcatcgagtaatatgcacttcgaactaatgttccggtgaaggatgcggggattgcaactgtggtgaagccatgccaaacctttagcagacccaatggcaattttgagcctcaatggccactccaatgcctttttctcactagtctgttggtgtagctgatcatagagtgaacccttgggcatatacttgtataccaagagcctctctttcttagcaatacaatagcctaaaagaggaagtaagttgcgctgccttacacttcccaatgttgacatctcagatgcaaattgactctcggaatgttgagtatcctgtagcctcttgatagcaaggaatgaaccatctgggagtgtagctttgtacatagttcctgatcgaccagatccaataatattatccttagtaaaatcacctgttgccttcatcagatcatttaacttcatctttgcaactgatttctcaaacatggataccttcgctccttttgcactcttgatattctttgcccacttattctcttccaaatccttttccttcttcttggcaggcattttccgcaagaaaatgaacaggataacaccaactattataaacattataactgcaccaccaacagcagaaccaataatgacccctgtacggctgcttgaagtggcagtgcaatcattgctcagaggtctcccacagaggtcttgatttgcaaaattggatgacgcgaatttgccgaaagatgaaggtatcggccctgacagttgattgttggcaacattaaactggcttaggcgagatagaataccaagctgccctgggattgctccagttaatttgttattttgcaaattgacaatatttagataagtacaattagctagggattctggaatctcccctgagaaactattataagatagatcaaggtttgtaatgaatggcagctgttttgagatgtcagctgggattggaccggaaaggctgttgctcgagagatccagtgaagtcatgctactacaattctcaagcccatcagggaaatggcccttaagacccatgctgccaagatgaagagaaagaatcttgttttcattaggatgccagcactccacgccattgaatccgcatatagatccctcagtagtgttagtaaatgtccattccaatttattgtttgggtcaactgattccttcagtctctttaggcattggatgtcacttaatgtgccatagcatggctgacaaagcatatagcagaagagaagttggatgataatagtaatggaacacttgacagacatcctggtgtgctctacttcctgaaccccttcaacatccaaacttgagaatgaagctcttggatgcacattgatactgtggctcat

SEQ ID NO: 36420 - DNA, 348 bp, Oryza sativa
  Clone ID: PAT_MRT4530_40248C.1
atgaacggcaaatcaaattggccccccgccctcccgatcaaaaaggccaaaataccaaaccgaggcagagaatcaagagcacggggaggacgaggaaaaatatactacctcgaaaagggatttcagacgagtccaaaccggagttgtttggcgtgtccgcgtgtgggaggtgtgggggatgggatgggatgttgccgcgacgacgcctcctcctcctcctcctcggctcctcccggttgttacgtcggcgtcgccgtgggcctcgggcgcggcaagtggagtcgcgtctcattggcgtggattggattggcttggcttggcttgggcgacctcacgtcacgcgcttga

SEQ ID NO: 36421 - DNA, 974 bp, Oryza sativa
  Clone ID: PAT_MRT4530_40249C.1
ccggccgggattcttttttatttattctttcttttttcccttcctccctcctcctcctcctcctccggtggatgcgatccgcgagggcaatcgatctccgcagcgtctgaggcaaggggcgtaggaggagggcgaagatgctggacatccagaagcgacgcgtccagctgctgctgttcatcgtgggcgtcctcgcgctcagcatgaccgctgagaagttcagggaacttgtcgggaaggaggaagcatcaaagagtggacagtttacgttcatgaactgttttgatatgggctcaggcagccttgcgtgcgcagtgaaggagggcatcaagttgtatgtctacaacctccaaactgcacatacggaaagggtgaggcaccgggccattgagaaagcattggctgatgctgtgacagaaggcctgtctgccgctgaggcagcaaagcaagctcagaaggttggtgcgaaagccgcaaaagtggcagctcgtcaagccaagaggatattggggccgataatttcttctggttgggacttctttgaagccatgtacttcggtggaagcatgactgaaggttttctccgaggtaccggcaccctatttggaacctatgtaggtgggttccatggtgaggagaggctggggagagacctaaaaatcatgtcttccctcaccatcctcctccagagggcgtgcctccgcttcgctctgctcccagtcccgcctctgcgtgctcctcttcgtcctcctcgccgccctctcggcctgcctcgccggagcgccatgtcctcctccgcggcgtcaaggctgtcccacatcgtcgccgccgccggtggtgcggccggggagtccagcgagccgccggcggcggcggctgcagcgtccgtgagtggaatcgcggggaggctgtgggttgagcggattttgagtggttttgatggagacgagattggagcactagtctttggttag

SEQ ID NO: 36422 - DNA, 577 bp, Oryza sativa
  Clone ID: PAT_MRT4530_4024C.1
tttcttttctttggaaaagagggccttaacttccatgttgcgattggcatgatccttgctgttattggcatgatttggtatgggaatgcttcatcgaaaccaggaggcaaagagcgccaggtttactcagcacccagcgagaaaacacagaaacccaatatactgtcatcacagtctgagcttgaccagaaggtctgaaatacaatgttgatgactagtgttttattgaacatcttgaggaccatgatctgatttattctttttacacgttttttagatgcttctatagaatttgtaggctatagcagaaagagggtacctgggcaaactgtcctggctatacttttgcggcgtatatgtcaacaaaaagtaactagatgttaatttgaattttaatatttctttaactgcaagagcagtgctgtgtaacttgtgttcctaaagtttttatgtgcaccacctgcatggggtaaaagtacaaatgactctcccccttgtgttgtcttggttgttttgacaataaattgtgtcattcattcaaaaaaaaaaaaaaaaaaaaaaaaaaaaaaaaaaaaaa

SEQ ID NO: 36423 - DNA, 1239 bp, Oryza sativa
  Clone ID: PAT_MRT4530_40250C.1
tgatcggcagcaacagatcgctcgcctccccgtctcctcgcccgccgccttcgccgatctccatccggcgagcatccctcccgccgccgtcctgctgctgcttccgccgccggaggggagggatatgtgcctgtgaaaaatcggaggaaagggggtataaatctttgaccataatggctgtagcttctgccagtgcactgttttccgccaagaatcttccgcataaaccctgggaggacccgtcattctttaggtggagaaagcgggaggctcatgtgccgttgcgctcacatgacacacctgaaggagccctcaagtattggcatgaacggaggaatgtgaactatcttaattctgactctgctgtttggaatgatgacgcggttcgtggtgccctggaaagtgctgcgttttggtccaagggcttgccatatgtccagactctaagtggatactggaagttccttttggcttcctcgccagaatctgttccagagaaattctatgatgcctacttcaatgattcagattgggaggctttgccagttccctcaaactggcaaatgcatgggtttgaccgtccaatctacacaaatgtcacttatcctttcaccatgaacccgccatttgtgccaaatgataatcctactggctgttataggacggtttttcgcatcccaaaagagtggaaaggtcgaagaatcttgttgcactttgaagctgttgattcagcgttttttgcttgggtaaacggcgttcctgttggatatagccaggacagcaggcttcctgctgagtttgagatcacagatttctgccatccttgtgactcagaaaaggaaaatgttcttgctgttcaagtgatgaggtggagtgacggttcctatcttgaagaccaggaccattggtggctatctggtattcacagggatgttctactagtatcaaagccacagatctttattacagattattttttcaaagcaaccttggatgaaggcttccgtgtagctgatattgaggtaattgtgctagctatgcgtgcagggttgtgcacttctgcagcatgatagtgcaaatacaggaatagtgtacaaggttgcaaaccttttttttgcttgccgtttcctatccattcttttgggtcagaatattaatgtaagcttcaagattatttattataataatgttattaattattaatagcaaaaaaaaaaaaaaaaaaaaaaaaaaaaaaaa

SEQ ID NO: 36424 - DNA, 735 bp, Oryza sativa
  Clone ID: PAT_MRT4530_40251C.1
atggcagttatattccagctgggtacagggtaccgaatagagatagaatatcttcacgaggactcggtaatgccaccaggagcagcacctgtgcccccagaaactgtcagctctgaaccaataatgtcaccaggagcagcagtgcccccagaaaaagttgaacttgacgaaattgaatttgcgaaaggtgttggccccagaaggtataattacagggaacttgctgctgcgacgggtaactttgctgaggagaagaagctaggaagagggggttttggtcatgtttaccacggatgcctgaaaattgatgatcaggaaaggcttgtggccatcaaaaagttctcaccagactcatctgctcaggggaggaaggagtttgaggctgagatcaagatcataagactcctaatcaactgtttatattttcagcaagagtgggagcagtgcgtcgtccacggcgacatcaagccaagcaacatcatactcggctcgtcctacaacaccaaggctgtgttcgtttggacgttttcccagcgcgctacacgcgctggaaaacgtccaaacgaacacagcccaagcttggggacttcggcctggcgagcgaggctcgtcgacaatggcgccaagtcacggacaaccaaagtcgtgctcgggaccgccgggtacatcgacccggagctcgtcaacacgcgcaggccgagcaccgagtccgacgtcccatgctgcgccgaataa

SEQ ID NO: 36425 - DNA, 546 bp, Oryza sativa
  Clone ID: PAT_MRT4530_40252C.1
aaacaattgtgtggtgcatgggttagtatcctcgggatgagcaaatcgattgcgctcaagaagttggagctacagttactgagacaaaattgtaaagtcatgaatactctgaagggccaaatttacttgcctgtccaaatgatggcatatctggaagagtggtccttactggagaacaagtatgctaattcgctgtcaggaacagtggaagctctgaatgctaccgttcttcgccttcctgtctctgatggagcagtggcagattttcagtctgtcaaaaatgctgttggctctgcagttgatgtcatgcagacaatgagaaactcaatgagttatctactgcctaagctagccaggacaaatgtgttggtgtctcagctgtccataattaccagacaagaacaggttctaatggcgcagtgcagagagttgctgtccacactagcactgatgcacgtgaagtacagtagcctacaagggcaaatgattcagctgagcgacctaaagagggctaaaagcgtttctagttcagagtatccatactga

SEQ ID NO: 36426 - DNA, 2067 bp, Oryza sativa
  Clone ID: PAT_MRT4530_40253C.1
atggcagcaatgagctctcatcgccttctattcacacagcttcacctctgcaactcgctgttgctcatccatgttcaccatgctacctcactcaacttcagatttgacttctccgagcctggttcgtactgtacccctggttcagagatcgcctgtgctggcgatgcctacccctacgcccatacgatcgagctgacaaagaccgacatcagcgaccgaaacctccgcagcatcggccgcgtgtggtatgcacggccggtgccgctctggaacaacaccaccggtgaggtggccagcttcaggaccaccttctccttccaaatcaagccggccaacctggacgtcagtgctgacggtatggccttcttcctcggccattacccgtcaggcatccctcatcgcagctatggcggaaacctcggcctcttcaatggcagcaacaacaagaacgcaacgggcaccgctaggatcgtggcggtcgagtttgacacctacatgaacaaggaatgggagaaggatggcaaccatgtcgggatcgatgttaactccatcgtctctgtcgcggcaacctcaccggacaagaacttagcaagcggcaccaccatgactgccgatatcagctacgacagcagtgcagagatactggcagtcaccttctggatcaacggaacctcctaccatgtcagtgccagcgttgatatgagaagatgcttgcctgaggtggtcgctgttggtttctctgcttctaccggaagctccattgaagtacaccgggtgctgtcatggtcattcaactccaccctaacatggatgaattcttcagtaatgccaccaggagcagcacctgtgcccccagaaactatcagctctgaaccaataatgtcaccaggagcagcacctgtgcgcacagaaactttgagctcccaatcacaaggtaaattacatggtataatagctatttcagttgcagtatcctttgtgctggaacttgatgaaattaagtttgcaaaaggtgttggccccaaaaggtatcattacagtgaactagctgctgcgacgggtaactttgcagaggagaagaagctaggaagagggggttttggtcatgtttaccagggcttcctgaaaactgatgatcaggaacggcttgtggccataaaaaagttctcaccagactcatctgctcaggggaggaaggagtttgaggctgagatcaaaatcataagtcggctgaggcatcggaaccttgtccaattaataggatggtgtgacagttgcatgggactcctgattgtttatgagctcgtatcagaaggtagtcttgacaagcatatatataaaaatgcgaggttgctaacatgggccgaaaggtacaagatcatcattggccttggctctgcactccactaccttcaccaagagtgggagcagtgcgtcgtccacggcgacatcaagccaagcaacatcatgctcgactcctcctacaacaccaagcttggggactttggcctggcgaggctcgtcgaccatggcgccaagtcacggacaaccaaggtcgtgctcgggaccgccgggtacatcgacccagagctcgtcaacacgcgcaggccaagcactgagtccgacgtctacagcttcggcatcgtcctcctcgagatcgtctccggccgtcgccccgtggaggaaccggacgacagcgacgagctcttcgtgctgtcgagatgggtgtgggacctctacagcaagaacgccgtcgtggaggcggtggacgagaggctcaggtgcagcgacgatggcgacgacgagctgcagatggagcgcgtgctcgccgtcgggctgtggtgcgcgcaccctgaccggagcgaacggccgtccatggcgcaggctatgcacgccctgcagtcggaggaggcaaggttgccggctcttcggccgcagatgtacaagggtgtgccatttcttgccatgggagaacataggtacagcgatctttcaattggcaccactaccagctccagtgccagtggaaccggctgcactgcacattcagagccaactaaactgtaa

SEQ ID NO: 36427 - DNA, 798 bp, Oryza sativa
  Clone ID: PAT_MRT4530_40254C.1
atggctggcggcgtccgggaggggagggagattgagatggcgccacgccgggcgacgattttgctggggcggatagggatggaggagccaagtcttgaggtgaaaatgcctgaagctgatctgaaggccgtcaaattcagcctcatgaccagttcagacatggaaaagttaagtagtgcgagtattattgaaatgtgtgatgtgactaatgccaagttgggattaccaaatggtgcaccacagtgtgcaacctgtggatcgcaaagcgtacgtgactgtgatggtcatttcggtgttattaagctggcagcaaccgtgcataatccatgttttattgaggaagttgtccagttgctgaatcagatatgtccaggctgtctcactctgaagcaaaatggggacacaaagaagactgatgggacaacaattcagacaacttgcaagtattgctcaaaggatggagcaaaactttaccctagtgtaatctttaagatgctaacaagtccaagagtaacactatccaggagtaaacttcaccgtaacactagtgtgatggacaaaatttcaattatcgcagaagttgctggtggggtgacacataattccaagaacaaagctccccatgaaacccttccccaagatttctgggatttcgtacctgatgataaccaaccacctcaatccaatgtggctaagaaaatattgtcaccataccaagtctttcacatgctaaaaaaccttgaccctgaacttatcaatcagagatgcaatatggacattcagatggcccccggttag

SEQ ID NO: 36428 - DNA, 624 bp, Oryza sativa
  Clone ID: PAT_MRT4530_40255C.1
atgagaagatgcttgcctgaggtggtcgctgttggtttctctgcttctaccggaagctccattgaggtacaccgggtgctgtcatggtcattcaactccaccctaacatggatggatttttcagtaatgccaccaggagcagcacctgtgcccccagaaactgtcagctctgaaccaataatgtcaccaggagcagcagtgcccccagaaaaagtgagctcccccagatcacaagtatcctttgtgctggtatgtcctttcatgggttttcttctaagacgtcgattagcatggaagagatcaaatggaatctctgatggaaattgtcaggttgaacttgacgaaattgaatttgcgaaaggtgttggccccagaaggtataattacagggaacttgctgctgcgacgggtaactttgctgaggagaagaagctaggaagagggggttttggtcatgtttaccacggatgcctgaaaattgatgatcaggaaaggcttgtggccatcaaaaagttctcaccagactcatctgctcaggggaggaaggagtttgaggctgagatcaagatcataagtcggttgaggcatcgaaaccttgtccaattaattggttggtgtgactag

SEQ ID NO: 36429 - DNA, 580 bp, Oryza sativa
  unsure (1)..(580): unsure at all n locations
  Clone ID: PAT_MRT4530_40256C.1
ggcagaaatctcttgccctggcatcaagtctgaaaacaatggtaagcgggattatatggggactgaaactggtcaagccttgcataagcaagatagcaaagtactgacgaaaaagaccataaagttggatgctccaccatgttcgaaaaggccaaagctagagccagtacaaatcactagagagactgaatcaaagagccatgatttctgtgttgcagaaaaatgtgcctgaattgatgcaatgcacaccatccgaaaaatctcgtctgctgaagcagaagcgcatttatgatccaaagagaattgataagaagaattttaggtctggtgccaggtcttaaatatgattgtttcacatcaagggccagtttagggaaattttgatccttgcttgggaaacaacacgcttngggactcatggtcttaggatccgatatccgtgacatcacaaatcacattgaggaacctctcattgggtgaacttctcaatggaacttacaaatattccagcttaggaagagaaaaaggaaagaaagttttgcgcacaaaagatgaacttctagtctctgtcagaaaagct

SEQ ID NO: 36430 - DNA, 377 bp, Oryza sativa
  unsure (1)..(377): unsure at all n locations
  Clone ID: PAT_MRT4530_40257C.1
ccttttcctccaaaaccgncaacatttgatcaattttttggtgattttttaaatacattgccggattaccacccttttattataatagttaatataagcagccaaaacatccaggcaggaaaaaaaaaaggagataaatctcatatatgaacccaatagggcaataacacatttatcaaaactactacacgctgatgaaaaacgcatgtgccccccccgatgacttttaacctcgtacagaagcaccacctgcaataagagattctttgttaggggggaaaaaaacggacttccgagagcaaagacaccatcaataattaccaccaggcggggaccaaccccccctggggatcatacaattgaccttaccgataaac

SEQ ID NO: 36431 - DNA, 1924 bp, Oryza sativa
  Clone ID: PAT_MRT4530_40258C.1
aacttggatctttaaaacgggcggccctttttttttcaatataaattgggcataactgcatttcatatacacatggtccccttttattaatgggactcaaattataaatctaatctcctcacgtacatgcgaaccacacgtactacctaacaagaaaatccagtgcacaatgataaaaaagagacaagaggagtagacacaccgtacagccatcaaggaggtgcatatatatggccaagtgtattttgtcaagatgccacctacttctcccctcctgtccacttgtccaccacctcatcgagcgctgacgtggcggcgccaccgtctcggaggccatccgtcgccatcttctgtagctcagctaccttagcacgcaccgccgcgcccctcccttcccctaccatcatctccctgacgaccgccgcgatcttctccttccccttggactcgggcacccgtatcgcggccccggcgccctccgtcagcatgacggcgttctgccgctgctcggcgaagagcggccaggccaccatgggcaccccgtgcacgaggctctcgagcaccgagttccacccgcagtgcgtcaggaaccctcccgtggcccggtgggccagcaccttcgtctgcggggcccacgagggcaccagcaggcccacctccttcgtcctctcgacgaacccctcggggaggtagccgaaggggttcttcttcgtctcagcgtcatagtagttggcgctcacctcgccctcgtcgctcgggctccgcaccacccacaggaatcgctgcccgctgagctccagcccgagcgcaagctcgcgcatgtgctccgtcggcagcgcgccgccggagccgaaggagacgaagatgaccgacctgtccggctgccggtcgagccagtcgaggcacgcggcgcgcggcgagggaggcgccgcggcgtcgtcgtcgccggcgcagtgcgtctgtatcagcgggccgatggggaacaccggcgggacgccgggcttcgggtggcggagcaccctggcggcgtcgggctcgacggcgtcgaacgagttgacgaggatggcgtcggcgtcgcggtagcgcgtgccgtggtgcaccatccacccgtagcacgccctggacttgtcctggagcggcatgaggatgtccttccccgggatgggcacgcagccggggagcctgacgggctcgtcgaggtcgcggaactcgccggggatggagacgtcgaggtcggggaggtggaggagcagcgtgagcgcgtggaggttggtggggaagaagaggtacctcctgggcacgccggcgtcgcgcgcggcgtcgaactagtccgcgccgaacaggtcggcgacgaacggcagcagccgccgcctctccctgatcccggacaggatcgccgtgagcgccgggaccagccggacgcactcctccgacatgagcgtctcgatggccggcgtcggcggggaggtcggagaggtcgacggggggcagcgacaccgactcgatcgccggcgcggcggggaggtcggagaggtcgacggggggcagcacaccgctcgatgcgcggcagcgacgccaggaactccccggctgcgtcgccgacgccgtggaggcgaacgtgagcagcgtcgacgtcacgccgtgcctcgccgccagccgcttcgccagctcggccagcgggatcaggtgccccatccccggcgtcaccagcatcgccacgtgcatcgccgccgccgccgcaccgttgcacttggtggtcgacgacccgttgcacttgccgttctccatgtagcgacggcgtacggtggttttgggcgatttggaggggatttcggggcgttttttgggcgtgtggcgggcgggtggtggaggaggcgatgcggttgggttgtgttgcgttgtgtttgtgttttgtgcgccccga

SEQ ID NO: 36432 - DNA, 248 bp, Oryza sativa
  Clone ID: PAT_MRT4530_40259C.1
atgggcgtgggatgcgatggccccgcagtacgtggtggaacaggtgagtgggaggcggacgtggcgatgatgaagccgcatgtttgtagcaggtggtggcctagtattggcaatgggggaaaagcgaaacaactagttagaaggagatcgtcggtggtggcggatttggagctcgaaatcaacagagatagggaagatggcaggaacggggcaccttaccaccgctgtcttgagagggaggagagggg

SEQ ID NO: 36433 - DNA, 1624 bp, Oryza sativa
  unsure (1)..(1624): unsure at all n locations
  Clone ID: PAT_MRT4530_4025C.1
aaacttcacctctactctctctctctctctctctctctctctctccctccttccggcggagctacggcgagccttctcccccgcgccgccgcgcggccggcgagcaggttcggaggagtcgcggctcctcctcctcctcgccttccctagccttctccggcctcgcgctcgctcgctcgagccgaatttggagtcggagattgtgatactccaaaatccaaattggattagattctacatgacaagagaacatggcacctggaagcaaggcagagagaaaagcagcattagatgctggagcttggatgttcaacattgtgacatctgttggtatcatcatggtcaacaaggccttaatggctacacatggttttagttttgctacaacattgactggactgcattttgcaaccacgactttgatgacattagtaatgaaatggctgggatatattcaaccgtcctacttaccagtgccagaactaataaaatttgtcttttttgcaaacctatcaattgttgggatgaatgttagtttgatgtggaactctgttggattctaccagattgccaagttatgcatcattccagttttgtgctttctggaaatcctgtttgataaagtccgatactcaagagatacaaagttcagtataatggttgttctagtaggtgttgccgtgtgtactgtgactgatgttagtgtgaattcacaagggctcatagctgccataatagcggtttggagcactgcactacaacagcattatgttcatcaccttcaaaggaagtactcgcttggctcattcaacctcttgggtcatactgctccagctcaggcagcatctttactagtactggggcctttcgtggacttctggctgaccaacaaaagagttgatactttcaattacacagcaatagttacgttcttcatcatactgtcgtgcataattgctgttgggaccaaccttagccaattcatatgcatcggaagatttacagcagtctcgttccaagttctaggccacatgaagacggttcttgtgttgaccttgggctttcttttctttggaaaagagggccttaacttccatgttgcgattggcatgatccttgctgttattggcatgatttggtatgggaatgcttcatcgaaaccaggaggcaaagagcgccaggtttactcagcacccagcgagaaaacacagaaacacaatatactgtcatcacagtctgagcttgaccagaagacccttctgtcgatacaaagacaagccgtctgcacatcagcagcacatcatcaccttaccccattcaactggagtgcatttcttgcagcattcaacgtcactctaattgatactaaatagaggggtaccctggggcaaaacttgttcctggctaataactttttgcggcgnntaatatgtcaacaaannaaagtaactagatgttnnaattttgaatttttaantatttcttttaactgcaagagcaaagtgcntgtgtaacttgtgttcctaaagtttttatgtgcaccacctgcatggggtaaaagtacaaatgactctcccccttgtgttgtcttggttgttttgacaataaattgtgtcattcattc

SEQ ID NO: 36434 - DNA, 563 bp, Oryza sativa
  Clone ID: PAT_MRT4530_40260C.1
gcacgaggcacaccactactccatcagcagcagccagcgagcccgcgccgcaggcacccgcgcgcgcgcgcgcggccggtgaggtgtgtgagatagatcgtcgagcgcgcgtacgtcgatcgtcgaggctggccgccgccgcgaggataccggcgccggtgcgcgtggtgatggcagtggtggcggaagatggtgtcgtcttcccggcgcagccgcgcgtggcccgccgtctccacccgcagtccgcgcccagcaagtccaggcagtggaggcagcatactgaagcttcacgaggatgtgcaaacctgtggatacaaggacgtgcaggtgatgttcgagattctgaaatccgagctggaggaatcacgcgccccgacgaagcagcgaaagccgccggcgtggagcccgccgtcggcgtggtccagccggtcgtcgtcgatcccccccgcgcgagggtcccggcgtccgcccgcgcgcgggcgcccgcattgccagacaccggctaataataagaagttaagaacaccaactttagtactacgtgatagctattagtttcgtac

SEQ ID NO: 36435 - DNA, 1551 bp, Oryza sativa
  Clone ID: PAT_MRT4530_40261C.1
ctacaggaaagcggcggcggccgccttggcgcccaccgtgcgcaggaggtggaagtagagcttggggttcgccaggaacgccgcgcgggagatgacgtagccggcggcgcccggcgcgttcatgatggcgccgccgactgccgccgtgggccagaggaagtaggcggccacggcggccccgccgacggccagcgccgacttccccacgccctgctccttcacgaagccgacccccgcggcgaggcccggcttggccgccgccgccacggtggaggccacggccgccaccgcgctcttggcggagttgagcaggccgccgacgaactcgctcacgccaaccatattggcgaaggcggcggcggcggcgacgcggccggcggtgtggaggaggtggtagtagagctgcgggttggcctcgaaggccatgcgggagatgaggaggccggcgccgcccggcgccttcatcatcaccacgggcgccaccgccggccaaagcaggctcaccgccgcgccgacggccacggaggcgatggctcccacgatgtatcccacggcaaccatggcgatccccgatccctctgcactggctcggcctcggcttctgttgcttaccacttggaagttggaagagatgaggcgcgcgcgatatcggcgaccaagatggatacgtatgtactccatatataatccctccgtccttattgtcaccttctcccgatgcagtacgtcgaaggcgagggttccggagacgatggtgggtaggcgaggtttggccggggcggcgggaggacgagggcggaggcagaacggacgcgaccaacggcacgcggaggagcggcagcgcggctggacgacgacggacttctcgccggcggcggcgccgccgcagcagcagcagcaggcgaggcggaggcagtggagcgcgagggcgccgagcacggcggggggcacacgaccagtctcggcttcctcggcggccgcggagaggagcaggccggccaggaagacgacgagctccgtggtcctcgccatgacgagctcccacaggcggccgaagctgtggtcggcgccggcgccggcggccacggctgcagcgccgcctggtaggagcctctcctcgccgcggtctccgggaacgccattgctcgccgacgctgaacccaagctggcggcggcgcggaccagcgtggcacggcgaggcggcacggatcggctgccgccgaggagccaggtggtggcaagggagctgagctgggcgtggatcgtcggcgtaggatccggctgcggcgctgtgaccggaggagcggcggcggcggcgtcgacgacaggggtcgccagagctcgaagggaggaaggagacggctgctgcagctgcagcagaggcagcgacggcagaggaagccgacgtggtggaagtgctgagggcaccgggcgtgcacttgctggctgagttgcggcaggaggcccgtgcggtaggaaggagagagaaaaggagaagtaggagaaggagaggaaatctgcagctgaggatttggtgctgttgctgcgcat

SEQ ID NO: 36436 - DNA, 254 bp, Oryza sativa
  unsure (1)..(254): unsure at all n locations
  Clone ID: PAT_MRT4530_40262C.1
gggtgcaggattcgncacgngggtgnatcantcganggtccagtgggcatngccaagacnattctcgttccatncccaggtaaaggtgcccaanccccatccatanccagtccacaagatcntccatgttcccanagccatacatggttccagttaaagtcccagtctacaangaaatcattgttnaagaaaccagttcnaattccaattncaatttanattnaaaaaaaancnntnnnntctccnncttcctt

SEQ ID NO: 36437 - DNA, 376 bp, Oryza sativa
  unsure (1)..(376): unsure at all n locations
  Clone ID: PAT_MRT4530_40263C.1
aaatnaaaactcccgaaccattttttttttaaaacttattacaagacacccccaaggggggtaatggtactgggtgcaccataatacctagggtaaataccatatttaaatggcacgttaaaagccaacaaagtttgagcttgagccaaatttcgatcaaagtagaaatcaccaaactggtggagttttaacttctgccctatggcctgaacaatgttaatggcctgatagggaaaatgttgccccaccaacgcgagctgttgccaaaattggtttttttttaattgaaacccattttattgcaaaaaggggcttgcccatatgccatactgtttccttacaaaatcattatttgggctaaacaccttttgtttta

SEQ ID NO: 36438 - DNA, 645 bp, Oryza sativa
  Clone ID: PAT_MRT4530_40264C.1
atgccgaccattaaggcatacggctttagcctccgcaccaatcacaatcaccccaagcgctcctgcacaatccccgtggtacctgagcaagtcttcgacaagggcgacaagtcagatatctgcctagggcggcggcggcggatcaaggcgcggcggcggatcaagcggtggcggcggcggcggatcaagcgcgcggcggcggatcatgcggtggcggcggcgcatcgaggcgcagtagcggcggatcaagtgcgcagcggcggatcaaggccgtggcggcggcgcatcgagtggctcggcgacgatccgacggatcaaggcggtgcccattggatcgagcagcggcggcggtggatcgagcacgcgacagcagatcgaggccgcggggcggtggcggcggcggtggcaaatcgaggcgggggcggcggatcgaggcggcggcggtggcagatcgaggcggcggcggcagatcgagccacggcggcgccgggatccatcttcttctctgtctacctcctcggctccttgccatcttcgcgcgggaggtcattgcagcaacggcgcggggcgatggcttggggcgaggcatctccccaacgcagctcctcgcacgtgcctcgcccaaaagctgcccaaaccacgtga

SEQ ID NO: 36439 - DNA, 782 bp, Oryza sativa
  Clone ID: PAT_MRT4530_40265C.1
tttttaaaaatggaagagaaaaaataacagcggccattgattttgttttattattttggttggtggtgccgtgtagagggggaggcgacgagacgagacgagaggaaggagacgagacgatacgcggagatccgggcggcgacccgcggaggaggaggagcccgcggcgccatggattccgaccactggatctcccgcctcatggccgccaagcgccagtacgcgctgcagcgcgcccagaatcaccaccacgccaccgccaccgccaccgccaccgccgcgtcgcactcccacctcgatcggtatgggtacgatgatgttgagccagaggacgaggtacggccagacttcccatgtccttactgctatgaagatcatgacattacatctctttgtgcccatttagaggatgagcacccctttgagtctaaagttgtggtaagtatctctgctttctactctctttctgtattttcttatatgcttcttttatctgaagtcagtcaaatgtgtgagaaatcatatccactccttttgtttctttcattttggatagccatagattaaccttgtagaactcgagtaggttactaaatttcgttgtgaataatcagtgttttgttactacatggagatattgaattaatacataaatgatggagagagattgtgagaagaagctaaatggaaatactcatattttgcagttgttacacattggcttcatgaacctttaggtaaagtttactttgatgtgatttggaccgtctgatatgatgcct

SEQ ID NO: 36440 - DNA, 384 bp, Oryza sativa
  Clone ID: PAT_MRT4530_40266C.1
ttttgttttttttttttttttttttttttgagataatgtacaagaaggagccttgaggattgattttgggagctattgggttgaaaaggacctcccagaaagttgttattctcccaaaccccttataactaaatggaaggtgcggtcccactgaggacgacctgtcttttgagcataccctataggccggctggttaagaacaaactaaacagagcgtgcgaagacaaaaactatcattgacccggataatattgctcgcaaagaaactataatgaagggggtggggggatggtgcctaagatggtcgtttagaaccactaaatctcgttgaggcacccggtggcaggggccttgttattcttgcagacggccatggccttgaa

SEQ ID NO: 36441 - DNA, 261 bp, Oryza sativa
  Clone ID: PAT_MRT4530_40267C.1
atggtgcggtggcagcgcccttccctccaccagatcaggcggaaggggaggcggcaagctccccacctgacggtgacggtgtcggtggtgccctcctctccacctgatccggcggaaggtgaggcgcgggctccccaagcagagacggcggtgctctcccctccaacagatccaatgggaggggaggtggcggacttcccaagcagcagtggcggcggctatgacgccctcctcgacatcgggccattcttgtgctcttag

SEQ ID NO: 36442 - DNA, 430 bp, Oryza sativa
  Clone ID: PAT_MRT4530_40268C.1
atggccggcctcggaacaggctaccatgctccagttgcacgggccgccgtcactgacgccgaaaccagcgttccagtcagcgaggacgttggccgtgtcatgcggtgctgccttgacggccagcaacgcctccgctgcaaggcgcacgcgaatgcagcaagaaaaaccggcaccttcgccggcggcggctggggaagaaagaacctccggcggcgtgggcgccacaccggcagaggacaagtcggacaccacgaggctcaaaaccagcacggcgagcaagtaagcagcagaagcagcaactctctgctcgtccatggcgtcagcgtcggcgtcatgcgtgctctcgttcgtcggtacgcaggaggcaggccgaccaacgccgagggacgtgacccgatcgacggggcccgggggctcacgggcgacgcgc

SEQ ID NO: 36443 - DNA, 172 bp, Oryza sativa
  Clone ID: PAT_MRT4530_40269C.1
aatattctgttatggttcctttgtttgaggacagacttcatgatggagcattagttgctatgaaaaataatgggatgggatagcttctccagccttgatttcatgagattatgagagaaccgtaatcgttgtatactgtataggttgatttcatgaaaaaaaaaaaaaaaaa

SEQ ID NO: 36444 - DNA, 2687 bp, Oryza sativa
  Clone ID: PAT_MRT4530_4026C.1
atgacgatggacgccgacgaggatggacgatgccggcgcgggacggccgtttccgagttccgacgccgccgacccccttccacccctctcagctccagtttcatccagatctttctctattgtttcgtgaaaaaaaaacttcaccctttcatatttagaagattcatgtcagaacatgacggagacaaacaaactacgggaagtcttcagaccagttcttctcaaatggagaaacacgaggtggtgtgcggagataatgctagacttaaagaagaaggagcaactgtggataatatggatccttcccgtccttttctataccttgagaaattcgatcagaaaaagatggatgagtgggtaaaaattaaatctgtttgggccgccaagaacgtaaagaacgatatcatgacagatcctactcctcaggttgtgtttctatttcacttacagaattcagttgacagatcattctgttatattagttatttctttctaacctgcagcattttggtgtatctaagtagtccatgttgaagctaagtgttcttttacttaattataaagcgcatgccagtgaagcttgtttattatgttctgctttatcaactggaaaaataactggccttctttttcatttgtcaatggatcgatctagtgggtgcaaaataacttctattgtttaactcccgacttggaacacatcctgaaaaaggatagtacccggtgcttccgccgcttgtttgcaaactcttggatattggcatgggattttaccattacctctgaaaccttgacctacatggtcaggcggagaggcacagaagcagctggaggagaagggagcacgttttaattgttctttacagcttgttagtataatttctctggctggcgaagttcttgacaagtatattcaggcacattcagaggagcaggacccaccacattgccgcctgcttgtcctacagactcactgccagagggccgcccttatgactgaaagatttctgacagggaattacatttcaaagaatgtgccattgttacctttattacatggttatgtagattcaaccaaggcagttacagagatgtcttccatgcactctgtagaggaaaagcttactgatttacttgccttgtcatgttgcttaagtaaggctgtgagaaagggagcacttataggatgggatccaacatacacaaggagaagttttctcccctactggagatctgcattagggccccggggtccatctcaggaagcagtagaggtcaagtccatagtggagagcggacaatattggggtagttcaatgatccctgggtacaatcgtaagatctggttaatggacaaaattccacaaatacaaagtagaagacggtcaagaaggctcgaggaggagcctgcacttagtttagaacccgaaattgaccatgctgttgaatccgtttttgttgttgcgccggatggggtagtggagccagttccagctggtggttttgccccagctagttccgatattgattgggatagcctagagattcttgctcgagatgatgatgaagggaggcttgatatcgttggggatgaaacattctacgagctattgggtttgagggctgaagatcaggctgcagaggaggctagacaagctgctacgcaaggtggagctcctgagggtggtgctgatgctggtggtgttgctcctggtgcagcagctgctggtggtgtagctgctgctcgtgctactgatgatatagctggggcagcaattcctgtgcatgatgaagtaccaagagagagggtcatggcctatgaccctaataaaccttccatgaaggctggcacagtgtaccctaacatgaaggaatttagattggccatgagacagtatgctataaatgctgagtttgagttgaagttggtgaaaactgaccctgagagatacataggtggttgcaaagttgaagattgcccatggcatattgttgggcataaactacctaaccagaagacagtgatggttacagtgttaacagacttgcatacatgcacttcaagcagcaggagaaggactaccacagcaacagctaaatgggtggcaagcaaggcagttcctcttctgagaaagaatccaggtagagaaaaggctatggttgagctatatgggacctgtgaagaaagttttcatatgctttatagatggagagcagaggttctaagaacttcaccagggagtgtgatagagatagatactgtggagagagaatgcttctggcatttgatgaagaactttgtgaagagatttggtggtgatgtgcactcacacatgtacccagcagcaagggcatacagggtagagatttggcaaaggcacatgaaagaagttattcaagcttgcagtgatgtgcttccttggcttgaaacctatcatccattgaagtggatgaggagtggtttcaatccagcaataaagtgtgattacattactaacaatcttgcagagagtttcaacaattggatcaaggattacaaggcatcaaaagttggaagaggaagccaaggaggaacactaccaaatatgggaatacttcagaaattcctagtcccaaaagaccagctgtgcagacaatactggaagaaagcccaggaagaatcacaagaagccgactatcaacattga

SEQ ID NO: 36445 - DNA, 516 bp, Oryza sativa
  Clone ID: PAT_MRT4530_40270C.1
ctgcagtaagcagaatcaaagcagattaaccctcatctacttctggccctctaagagttctccactaagcaagcgaaaacagccatgctgcaccaccattaccatggcgaggtggccagcctgcactgcctctcacctgcaagcctaccattcagttcccactaccacagcaacatgatcaccatggcaccctcgcccttccacttcccagcagctacctgtgaacctatccaggaattgctccctgtggtagcgggcaatcgtccagccggctctggcagcacagatgacgcctaccagatggcagcggaggaggagcggaggcggcggaggatgatctccaaccgggagtcggcacggcggtcgcgcatgcgcaagcagcggcagctcatcgagctgagggggcaggttgtccacctccgtgacgccaaccggcgccttcttgatgagctcaaccaagcaatgaggggctgcagtgatgtccactgcgagaacactctgctcatgaaggagagg

SEQ ID NO: 36446 - DNA, 133 bp, Oryza sativa
  unsure (1)..(133): unsure at all n locations
  Clone ID: PAT_MRT4530_40271C.1
cagcaacagcctcnagaacagnannntatcccncagagttcanaccagngtggtcaaaatncngcncnnatgactngtgtgcaggntnntgccnctgaaaatgcagatgtgacatnaacataattntntcagc

SEQ ID NO: 36447 - DNA, 190 bp, Oryza sativa
  Clone ID: PAT_MRT4530_40272C.1
agacagcaaaaagatgatccaggttccacatcgtcatagacgataaaaaagtttagacagcgactagatgtgaggaaaacagcttcgacaaagggaaagaaatcacacaaagagttttagataacaactagaacatgtagggaaggacacacagcgggcaaaaattaagttgtctaaacgaagggagcat

SEQ ID NO: 36448 - DNA, 992 bp, Oryza sativa
  Clone ID: PAT_MRT4530_40273C.1
ggccaagcttgctgcatgtgttagaccttcgtatattacagatagcatttcagcggcagatgtcaggcgaactcgaaacatgtcatatttccggcgtgttaattccaatggcattcctaaaatcacttacttacacctttatgagggtgaggctttctcgatcggcatcttttgtttgcctccaaggggtgtcattcctctccataatcaccccaacatgactgtgttcagtaagcttctttttggtgagctgcgtgtgaagtcctatgattgggctgatgcctcacaagattcaactgatgctcagttgcaaggagcccgcttagcaaaggtgaaggttgatggcaccttgaatgcaccttgtgcaacatcggtactatatccggaagatggtggcaacctgcactgcttcaccgcacatactgcttgtgctgttcttgatgtccttggcccaccatatgacgatggcagtgggaggcactgccagcactacaacgtctcttcctctgcaccttctgctggagattcaaagccccttcctggagacgatggatacgcatggctggaggagtgtgaaccaccagacaattttcatcttgtcgggtcaacttatatgggtccaagaattgtggacaattgaacttacgaggattccttggtttcttgcagcgcatgatgtaactttcatttggtgtaaatacatcgctggagaaaataggtcctcctttggtcataactagaccacgttcatcatcacttaaactggaggacctaaattgcttagtaataaaaacatgctcggtaattgaggttgtgtaggcctttgctgtatttttttttcttgttcatttctgtgttttcttgtgtctctagtctgtaccagttagcagtgtagcattggattgcctgattcatcatgttcccaagtaatgtttggacttgctaaaaaaatcagaaatcttttccttttcctgacaaaaaaaaaaaaaaaa

SEQ ID NO: 36449 - DNA, 423 bp, Oryza sativa
  Clone ID: PAT_MRT4530_40274C.1
atggagatcgttgccagcgtgatggagagccttcttctaggagatccctccatggagcggctgcgcctcttcatgctcggtgctacccactctcagcgccacacctcgatgtcgtcaaggcgagggggcgaatccgacggcggcgattctcctcgccggcgggaggaggccaagagcacgactcctcggctgcagccgggcgcagccggcgggcgcagtgtggcgccctccgctgagatgtcatcgaggggatggggtgaatctggcggcgacgattcgcttcggctgcagggggattccagctcgcgcaaaatggctaaaagccggccggacaacatcgctgcagccaggctcagccagcgagcatgttgcggcgtcctccgccgccgccgtggagacaggcttggagttcagcaaggttga

SEQ ID NO: 36450 - DNA, 4844 bp, Oryza sativa
  Clone ID: PAT_MRT4530_40275C.1
ctactgtttctttttcttgggagagtttttcttcttgggtgctgcacttctcttcctcaatgtggccctgccttgtttggttgatgtggttagtggtggttgaaccccttctctcctattagtagcaatgaaagcagactctggcactgctcctggatgcaccctttcttgatggttgctagcagcctgagtgatgacaggttcccgagtgatgacaagctcttctgaatcaacaattgatgaagtcgccatttgctgcataggttgcttctgaagttttaagtcagccttcctctgtttacaactagttttgttgtgaccaccatttttgcagtagctacaatgcatctctactccatgctttgaaattttagtcccatcctctagttcttggggctgttttctcctagttttctttggcctccccactttcttctcatatactggtggcttcacctctataccctgcatcttctcccagtggatactatctcttagtggcattatgttgtagctataagcttgttcatagcacctggttgagtagcaaaatgacactacatcctccggcttgatcctttcatgtcttagacaggaaatggcatggttacaaggaatcccagtgagctgccacctcctacaatcacatctctttatattaagttcaacaatgtattgagatcctctgtcgctaacctgaaatgctcccatcccagcaggcaaagcatagcatgtattagccatctctgtatttttctcgaccttccgttttatttttgggcagatgccacatggccaattcctttctagttctttttgcttggtgtacaacctgttcatgatctgatttctaatcctctcaagcatagacaaaataggcatctccctggcatcaagaatgtacttgttaaacacttctgagttattgttaagaaggatatcacacttcggaaagtcactgaaaaaggctcgacaccattggtttggaggaatttcttcaaggtacttataagcttcactacttaatgccttcatcttttccatattggcattccactcgggcacagtgctagatcttgcaatagcccaaagttggttctttagtgtctcccctttatgtaacacttgaaaattttgatatagatgcctcacacagaatctttgttcagcatcagaaaactcccttctcacagctagaacaagccccttctgcctatcagttatcactgtccatgcagatgtattctcaatgccaaggtctttttttagagtgtcaagaaaccaactccagcttttcaagctctcaacttcaactactgcaattgcaatggaaaaaatgcagtcatttgggtccataccaacagcagttaggatatggccaccaaattttgttttaatatggcatccatcaagacaaatgataggtctacacctagacataaaccctctcttgcaagcatcgaatgacatatacaaagtatggaagcaaccaaaatgtatgttcaggtagaatgagctccctgggttagaggttctcaattcttgtccatagtcccataattggttgtactgagatatttcatctccatatatggccctcatagccatccttctagctctacctagcttgtgcctagatggtgttaagtggagttccttctgaattttcttagcaaagctcatcagtgtcattttgtcattatctctaaattcctcaatgtacctttttgcaagatacttagctgtgacggccttgatctcccactgtttagagcaggtgtgcttctctatatattcccttaccactaagcatttgactctattatccatagatgcagacaacatccatggacaaccttcagcacacttagcttcaattcttgttttggtattccgtgtcttcttaatagcaacttggttctttatagtatattgatctattgctttcctaagctctacagcatctgcaaacatcatgctaaccttgaactcaggtgtctccatgtctacatcagccctaaaactcttaaaactgaacttgatttcttcttcttcttcttcttcagaaatatttggcatcatcaacctttcatcttcagatgaaccatagtctgaaccctcctctttattatgcgctaactcaatttgcccttcaacacaattatcaaacaagtcatcatccccatgatcaatctcataatcactatcaacaaaatctggatcttcagttcttgactcctcttcatcatcaattttagcgtcggtagcacatttatctacaatcaactccccaccatcattcttagccctaattattttacttggtttcacagcagtacgcaaaggatctgaaccaataattgccacatcatctaagtcaatagcgtcgactatgtcttgatgatctgcatacaaaacaaatgatcggaccctaggtacaagagcgacgatactgttagtgtctgcatcacacttaaccctcctcaacccatcacttaattgtttgccaggaagcaaccagtaaattttggtgttatcagatttctcatatcctagttcttcaatgaaatcatcaacccacaacagtgaccaagaatctgactcacaatggtcaaaccagcttactctaccatcaacataagcccggtttacaccatttcccataaaaaaagcctccgtggtgcatctcaatgctgaattcttcatcttcggaatcgtcggtggcgacggcgtcgcggcgacggccggccgttccaggacgccggcgtgggagagcagcgcccacagctgcgtcatgaactcgccgccggcgccgagcacctcggcgtggatgtccacgttgtccgacggcgcgaggaacaggatgaactccgcccagaactcggccagcacctgccaccgccgcgcctcgtccacggccgccctcagctgcccgccgagcagcgccgccttctcgatgacggtggcgctgcccgccctctcgcgcacggcgccgcgccgctcctcgtcctcgatctcctgcagcctctggagcacggcgctctccgtcctgcagccgcccaggtggtccctcgcctgctgcaccgccgtgtcgaacatctgctccgcgttgtagctcgggtccggcagcatctccggcacgaacgcgaccaggtaggcgcagtagttcgacagcttcgtcgccacgaccctgttcacgtcgccgccgttgtcgcggcggcggctccggccatggccgccgccgctcgtccagtctaagcgggtggtgacgacgtgccacaccaggatctggtcggtgagcttggggaacgcgcacgcccactccagctgcggcgtcaggccgtgcctccgcagcgtggagacgccattggtgaggtggccgtagctcgccttgagcgacacgagcaccgctcgccggacctcctgcggcaggcgcttcctccggccgcgcttctgcccctgccgccgcggctccaccaggtagagcgtcagccacgacaggatgttccatggccggtggccgaaccgcttgaggagcacgtactggccgaccttgtcgtcccagtacctcgtcgccggcggcgtgatgctctccttccaccagaggtggccgtgccgcctgttcgtccacggctggtcgtcgcgcacgcagcggtacaccgtcttgacgtacctccagttgctggagaagccggccaccgcctggcagagctcgaggccggcggtgatcacgacgatcagcaccgtgacggagcggtcgaggccgcgcacgccgatgcggaggcggtggtagcccgggccgagcgtgccgaagaacgccgtccacatggtgatcccggccacggcggcggcgatgcagacgtaggtcctggcgccgacgagcacgacgttgcgggtgtagaactcgtcgtagaggaacgcgagctccgcctcgacgacgcggaacgcggcgtcgggccccgtgacggccggccggatgaggccgccgcagacgaggtcccgcgccctcggcgagccggcctccgccgggacgaagccgtagaaccgccgcttcagcagcttgaacagcgcgaacgcgaggcagaagtccctcgccatgtccttctccacgccgctgtacccgggctcgtcgtcgatccaccggtacacgcggtcgatggtgaccaccgacttgccgtcgctctgcctcaccatgtcgtcgcgggtcgccggcaccatggtgtcctcgccgtggaagatgtacctgtagcccttcatcgtcgtcgggtccggcggctcgccgtcgccgacaccggcgagcgactcctcgacgtccatgtagtcggcgatcagcttgacggactggtcggggatgctggccttgatcatctcgacgatcttggccaccgtcttgaggacgttgaggcaccagaacgcccagatcgcggcccggtagctggcgttccggccggtggcgttggcgatgagccagagcacgagcgcggtctggaggacgtgctgcagcagcagcttctcccgctggctgaactcgcggcggctgtgcaccggcgccgcgtacgcgctcgcctggatcagcagcagcgccgccgcccacagcacgaacgtctcgccgcggaacggcccgtcctggatcagccccacggcgtaggacaccaccacgtaggacagcgagtaggccatccacatcacgccgcggaggagcttgtcgctgctccggcggcgggtggcgccgtacagcaccagcgccgccaggacgacggcgctggcgaggacgaccacctccagccgcagcagccgcccttccaccgtgctcagcctctccacgaacccgcgcgccggcgcca

SEQ ID NO: 36451 - DNA, 281 bp, Oryza sativa
  Clone ID: PAT_MRT4530_40276C.1
ttcttcttgctcctcctcctctcctctgccgccatcaccttcctcctcctccgtcactggctctccgggctccggcgccgccaccgtgcttgctgccgccgccgacgtcgacgccgaggccgcagaatgcggggcgggagcacgacagctgatgcctgcgtgttctcctcctcctcagcaagagctgccgttgttgcgtgccggcggcgaagttggtgccgtcgacgaaggaggagggggagccttggaagctgacgtggcgggaggtggaggcgctcacc

SEQ ID NO: 36452 - DNA, 2697 bp, Oryza sativa
  Clone ID: PAT_MRT4530_40277C.1
ctactgtttctttttcttgggagagtttttcttcttgggtgctgcacttctcttcctcaatgtggccctgccttgtttggttgatgtggttagtggtagttgaaccccttctctcctattagtagcaatgaaagcagactctggcactgctcctggattcaccctttcttgatggttgctagcagcctgagtgatgacaggttcccgagtgatgacaagctcttctgaatcaacaattgatgaagtcgccatttgctgcataggttgcttctgaagttttaagtcagccttcctctgtttacaactagttttgttgtgaccaccatttttgcagtagctacaatgcatctctactccatgctttgaaattttagtcccaccctctagttcttggggctgttttctcctagttttctttggcctccccactttcttctcatatactggtggcttcacctctataccctgcatcttctcccagtggatactatctctcagtggcattatgttgtagctataagcttgttcatagcacctggttgaatagcaaaatgacactacatcctctggcttgattctttcatgtcttagacaggaaatggcatggttacaaggaatcccagtgagctgccacctcctgcaatcacatctctttacattaagttcaacaatgtattgagatcctctgtcgctaacctgaaatgctcccatcccagcaggcaaaacatagcatgtattagctatctctgtatttttctcgaccttccgttttatttttgggcagaggccacatggccaattcctttctagttctttttgcttggtgtacaacctgttcatgatctgatttctaatcctctcaagcatagacaaaataggcatctccctggcatcaagaatgtacttgttaaacacttctaagttattgttaagaaggatatcacacttcggaaagtcactgaaaaaggctcgacaccattggtttggaggaatttcttcaaggtacttataagcttcactacttaatgccttcatacagaatctttgttcagcatgagaaaactcccttctcacagctggaacaagccccttctgcctatcagtcatcactgtccatgcagatgtattctcaatgccaaggtctttttttagagtgtcaagaaaccaactccagcttttcaagctctcaactacaactactgcaattgcaatgggaaaaatgcagtcatttgggtccataccaacagcagttaggatatggccaccaaattttgttttaatatggcatccatcaagacaaatgataggtctacacccagacataaaccctctcttgcaagcatcgaatgacatatacaaagtatggaagcaaccaaaatgtaggttcaggtagaatgagctccctaggttagaggttctcaattcttgtccatagtcccataattggttgtactgagatatttcatctccatatatggccctcatagccatccttctagctctacctagcttgtgcctagatggtgttaagtggagttccttctgaattttcttagcaaagctcatcggtgtcattttgtcattatctctaaattcctcaatgtacctttttgcaagatacttagctgtgacggccttgatctcccactgtttagagcaggtgtgcttctctatatattcccttaccactaagcatttgactctattatccatagatgcagacaacatccatggacaaccttcagcacacttagcttcaattcttgttttggtattccgtgtcttcttaatagcaactcggttctttatagtatattgatctattgctttcctaagctctacagcatctgcaaacatcatgctaaccttgaactcaggtgtctccatgtctacatcagccctaaaactcttaaaactgaacttgatttcttcttcttcttcttcagaaatatctggcatcatcaacctttcatcttcagatgaaccatagtctgaaccctcctctttattatgcgctaactcaatttgcccttcaacacaattatcaaacaagtcatcatcctcatgattaatctcataatcactatcaacaaaatatggatcttcagttcttgactcctcttcatcatcaattttagcgtcggtagcacgtttatctacaatcaactccccaccatcactcttagccctaattattttacttggtttcacagcagtacgcaaaggatctgaaccaataattgccacatcatctaagtcactagcgtcgactatgtcttgatgatctgcatacaaaacaaatgatcggaccctaggtacaagagcgaccatactattagtgtctgcatcacacttaaccctcctcaacccatcatttaattgtttgccaggaagcaaccagtaaattttggtgttatcagatttctcatatcctagttcttcaatgaaatcatcaacccacaacagtgaccaagaatctgactcacaatggtcaaaccagcttactctaccatcaacataagcccggtttacactatctcctgatttatctccttttgttgctaactcaattggcagtaggctatcgtgaaactgatctctagcatgggcatcatcgtggggcccccataacgtgtgtatgcgccaatgtggcatcctaatcacgagccaactcaataagattggtgatgaagtcat

SEQ ID NO: 36453 - DNA, 1023 bp, Oryza sativa
  Clone ID: PAT_MRT4530_40278C.1
atggcgggcgcgcacgggcggcgccgccgggtggcactgccgtggccggtgaggctcaggctctgcgttttcgaggccgccattgacgcgacgcagcgccgagacggcagcgtcaaccgtttcctcttctccctgttcgaccgccgggcgccggccgacccgcggccggacgccgccggcgtcagctcgacggacatcaccgtcgacgcttcgcgcggcctctgggcgcgcgttttcagcagcgccgtggaatccccgccgctccccgtcgtcgtctacttccacggcggcggcttcgcgctcctcaccgccgcctccagccagtacgacgccttgtgccgccggctctgccgcgagctccgcgccgtcgtcgtctccgtcaactaccgcctcgcccccgagcaccgctaccccgccgcctacgacgacggcgtggacgtgctccgccacctcgccaccgtcggcctccccgccgacgtagtagcggccgtccccgtcgacctcacccgctgcttcctcgtcggcgacagcgccggcggcaacatcgcccaccacgtcgcgcaccgatgggccgccgccaccacctcctcgagccgccgcgtccgcctcgccggcgtcgtcctgctgcagccgttcttcggcggcgaggagcggacggaggcggagctgaggctggacggcgtggggccggtggtgagcatggcgcgcgcggactggtgctggagggcgttcctgccggagggcgccgaccgcgaccacccggcggcgcacgtcaccggcgagaacgccgagctggcggaggagttcccgccggcgatggtggtggtcggagggtacgacacgctgcaggactggcagcggcggtacgccgggatgctgcggcggaatgggaaggcggtgcaggtggtggagtacccggcggcgatccactccttctacgtcttcccggagctcgccgactccggcgagctcgtcaaggagatgaaggcgttcatggagcgcaacgcgccgcccaaatcgaat

SEQ ID NO: 36454 - DNA, 2685 bp, Oryza sativa
  Clone ID: PAT_MRT4530_40279C.1
atggatacccttgatatgcagacgggggagatccagtacaacctcatggaacatgtagcacaaacgcaagaatggcaacaatctgctgatgctcagttcgccagcatcaacgacatgatgcagcaacagcatgatgaccttcaagcatattttatgtcaaaggatcatttcactgctacaacaacgaacgactgcatcgaggatgtgatgtattgcacagaagatgaagtgacacttgctcaaattgagatggttcacaacaacgagcagaccggttacgcgcagatgctccaatttccattggatagagatatctacccctttgctgttgtgatttccttgtgggattacaaaagtggtgttcgatgccccctaattggtgtttctggtccctttgaggatttttccttgattggttctaggttgtgttggttgcccacgatgatgcccatgctagagatcagtttcacgatagcctaccgccaattgagtttgcaacaaaaggagataaatcaggagattgatatttggatcaaggtggaaggccgcgaattggatccaggcgattccgaagatgaagaattcagcattgagatgcaccacggaggcttttttatgggaaatggtgtaaaccgggcttatgttgatggtagagtaagctggtttgaccattgtgagtcagattcttggtcactgttgtgggttgatgatttcattgaagaactaggatatgagaaatctgataacaccaaaatttactggttgcttcctggcaaacaattaaatgatgggttgaggagggttaagtgtgatgcagacactaatagtatggtcgctcttgtacctagggtccgatcatttgttttgtatgcagatcatcaagatatagtcgacgctattgacttagaagatgtggcaattattggttcagatcctttgcgtactgctgtgaaaccaagtaaaataattagggctaagagtgatggtggggagttgactgtagataaacgtgctaccgacgctaaaattgatgataaagaggagtcaagaactgaagatccagattttgttgatagtgattatgagattgatcatggggatgatgacttgtttgataattgtgttgaagggcaaattgagttagcgcataataaagtggagggttcagactatggttcatttgaagatgaaaggttgatgatgccagatatttctgaagaagaagaagaagaaatcaagttcagttttaagagttttagggctgatgtagacatggagacacctgagttcaaggttagcatgatgtttgtagatgctgtagagcttaggaaagcaatagatcaatatactataaagaaccgagttgctattaagaagacacggaataccaaaacaacaattgaagctaagtatgctgaaggttgtccatggatgttgtctgcatctatggataatagagtcaaatgcttagtggtaagggaatatatagagaagcacacctgcactaaacagtgggagatcaaggccgtcacagctaagtatcttgcaaaaaggtacattgaggaatttagagataatgataaaatgacactgatgagctttgctaagaaaattcagaaggaactccacttaacaccatctaggcacaagctaggtagagctagaaggatggctatgagggccatatatggagatgaaatatctcagtacaaccaattatgcgattatggacaagaattgagaacctctaacccagggagctcattctacctgaacctacattttggttgcttccatactttgtatatgtcattcgatgcttgcaagagagggtttatgtctgggtgtagacctatcatttgtcttgatggatgccatattaaaacaaaatttggtggccatatcctaactgctgttgaccttggcattgagaatacatctgcatggacagtgatgactgataggcagaaggggcttgttccagctgtgagaagggagttttctcatgctgaacaaagattctgtgtgaggcatctatatcaaaattttcaagtgttatataaaggggagacactaaagaaccaactttgggctattgcaagatctagcactgtgcccgagtggaatgccaatatggaaaagatgaaggcattaagtagtgaagcttataagtaccttgaagaaattcctccaaaccaatggtgtcgagcctttttcagtgactttccgaagtgtgatatccttcttaacaataactcagaagtgtttaacaagtacattcttgatgccagggagatgcctattttgtctatgcttgagaggattagaaatcagatcatgaacaggttgtacaccaagcaaaaagaactagaaaggaattggccatgtggcctctgcccaaaaataaaacggaaggtcgagaaaaatacagagatggctaatacatgctatgttttgcctactgggatgggagcatttcaggaacctgtcatcactcaggctgctagcaaccatcaagaaagggtgaatccaggagcagtgccagagactgctttcattgctactaataggagagaaggggttcaaccaccactaaccacatcaaccaaacaaggcagggccacattgaggaagagaagtgcagcacccaagaagaaaaactctcccaagaaaaagaaacagtag

SEQ ID NO: 36455 - DNA, 255 bp, Oryza sativa
  Clone ID: PAT_MRT4530_4027C.1
atgcatatggtagtggtacggtatagtacagcgatccgttctaggatcatttgcacgctgtccgattttgtggtggaaggtttttgttcgtggcatggcactaaagatcagttgatacgacaatctggagttcgccagagcggtaggggagagaaggaagaaacaaagaaaaatgtcatcggaccgcctgaagcctggactgaaaacccaagcactgtcatggaaaatgcagcccattgggtctaccaaaatcca

SEQ ID NO: 36456 - DNA, 855 bp, Oryza sativa
  Clone ID: PAT_MRT4530_40280C.1
atggtgcgggcgacccgcgacgacatggtgaggcagagcgacggcaagtcggtggtcaccatcgaccgcgtgtaccggtggatcgacgacgagcccgggtacagcggcgtggagaaggacatggcgagggacttctgcctcgcgttcgcgctgttcaagctgctgaagcggcggttctacggcttcgtcccggcgaaggccggctcgccgagggcgcgggacctcgtctgcggcggcctcatccggccggccgtcacggggcccgacgccgcgttccgcgtcgtcgaggcggagctcgcgttcctctacgacgagttctacacccgcaacgtcgtgctcgtcggcgccaggacctacgtctgcatcgccgccgccgtggccgggatcaccatgtggacggcgttcttcggcacgctcggcccgggctaccaccgcctccgcatcggcgtgcgcggcctcgaccgctccgtcacggtgctgatcgtcgtgatcaccgccggcctcgagctctgccaggcggtggccggcttctccagcaactggaagtacgtcaagacggtgtacccctgcgtgcgcgacgaccaaccgtggacggacaagcggcccggccaccttttgtggaaagagagcatcacgccgccgacgacgaggtactggtacgacaagccgcggcgccaggggcataagcgcggccggagaaagcgcctgccgcaggaggtccgacgaccggtgctcgtgtcgctcaaggcgagctacggccacttcaccaatggcgtctccacgctgcggaggcacggcctgacgccgcagctggagtgggcgtgcgcgttccccaagctcaccgaccagatcctg

SEQ ID NO: 36457 - DNA, 4101 bp, Oryza sativa
  unsure (1)..(4101): unsure at all n locations
  Clone ID: PAT_MRT4530_40281C.1
ctactgtttctttttcttgggagagtttttcttcttgggtgctgcacttctcttcctcaatgtggccctcccttgtttggttgatgtggttagtggtggttgaaccccttctctcctattagtagcaatgaaagcagactctggcaccctttcttgatgtttgctagcagcctccttaataaaagcttccaccacagatgaactcagatagttagaatttttctggggtatgctgagcaggtgcatttcctgagtgatgacaggttcccaagtgatgacaagctcttcttcatcaacaattgatgaagtcgccatttgctgtataggttgcttctgaagttttaagtcagccttcctctttttacaactagttttgttgtgaccaccatttttgcagtagctacaatgcatctctactccatgctttgaaattttagtcccaccctctagttcttggggctgttttctcctagttttctttggcctccccactttcttctcatatactggtggcttcacctctataccctgcatcttctcccagtggatactatctctcagtggcattatgttgtagctataagcttgttcatagcacctggttgaatagcaaaatgacactacatcctctggcttgatcctttcatgtcttagacaggaaatggcatggttacaaggaatcccagtgagctgccacctcctacagtcacatctctttacattaagttcaacaatgtattgagatcctatgtcgctaacctgaaatgctcccatcccagcaggaaaaacatagcatgtattagccatctctgtatttttctcgaccttccgttttatttttgggcagatgccacatggccaattcctttctagttctttttgcttggtgtacaacctgttcatgatctgatttctaatcctctcaagcatagacaaaataggcatctctctggcatcaagaatgtacttgttaaacacttctgagttattgttaagaaggatatcacacttcggaaagtcactgaaaaaggctcgacaccattggtttggaggaatttcttcaaggtacttataagcttcactacttaatgccttcatcttttccatattggcattccactcgggcacagtgctagatcttgcaatagcccaaagttggttctttagtgtctcccctttatgtaacacttgaaaattttgatatagatgcctcacacagaatctttgttcagcatcagaaaactcccttctcacagctggaacaagccccttctgcctatcagtcatcactgtccatgcagatgtattctcaatgccaaggtccttttttagagtgtcaagaaaccaactccagcttttcaagctctcaacttcaactactgcaattgcaatgggaaaaatacagtcatttgggtccataccaacagcagttaggatatggccaccaaattttgttttaatatggcatccatcaagacaaatgataggtctacacccaaacataaaccctctcttgcaagcatcgaatgacatatacaaagtatggaagcaaccaaaatgtaggttcaggtagaatgagctccctgggttagaggttctcaattcttgtccatagtcccataattggttgtactgagatatttcatctccatatatggccctcatagccatccttctagctctacctagcttgtgcctagatggtgttaagtggagttccttctgaattttcttagcaaagctcatcagtgtcattttgtcattatctctaaattcttcaatgtacctttttgcaagatacttagctgtgacggccttgatctcccactgtttagagcaggtgtgcttctctatatattcccttaccactaagcatttgactctattatccatagatgcagacaacatccatggacaaccttcagcacacttagcttcaattcttgttttggtattccgtgtcttcttaatagcaacttggttctttatagtatattgatctattgctttcctaagctctacaacatctgcaaacattatgctaaccttaaactcaggtgtctccatgtctacattagccctaaaactcttaaaactgaacttgattttttcttcttcttcttcagaaatatctggcatcatcaacctttcatcttcagatgaaacatagtctgaaccctcctctttattatgcgctaactcaattttcccttcaacacaattatcaaacaagtcatcatccccatgatcaatctcataatcactatcaacaaaatttggatcttcagttcttgactcctcttcatcatcaattttagcgtcggtagcacgtttatctacaatcaactccccaccatcactcttagccctaattattttacttggtttcacaacagtacgcaaagaatctgaaccaataattgccacatcatataagtcaatagcgtcaactatgtcttgatgatctgcatacaaaacaaatgatcggaccctaggtacaagagcgaccatactattagtgtctgcatcacacttaacccttctcaacccatcacttaattgtttgccaggaagcaaccaataaattttggtgttatcagatttctcatatcctagttcttcaatgaaatcatcaacccacaacagtgaccaagaatctgactcacaatggtcaaaccagtttactctaccatcaacataagcccggtttacaccatttcccataaaaaagcctccgtggtgcatctcaatgctgaattcttcatcttcgtaattgtatacatgagatcgtgcaccttcacttcgcagccctggcaccatgttgcctcagcgccggcggcaacgtccttgatccatatatcaatctcctgatttatctccttttggtggtaactcaattggtggtaggctatcatgaaactgatctctagcatgggcatcatcgtgggcgtcggtggcgacggcgtcgcggcgacggccggccgttccaggacgccggcgtgggagagcagcgcccacagctgcgtcatgaactcgccgccggcgccgagcacctcggcgtggatgtccacgttgtccgacggcgcgaggaacaggatgaactccgcccagaactcggccagcacctgccaccgccgcgcctcgtccacggnccgcctcagctgcccgccgagcagcgccgccttctcgatgacggtggcgcttcccgccctctcgcgcacggcgccgcgccgctcctcgtcctcgatctcctgcagcctctggagcacggcgctctccgtcctgcagccgcccaggtggtccctcgcctgctgcaccgccgtgtcgaacatctgctccgcgttgtagctcgggtccggcagcatctccggcacgaacgcgaccaggtaggcgcagtagttcgacagcttcgtcgccacgaccctgttcacgtcgccgccgttgtcgcggcggcggctccggccatggccgccggcgctcgtccagtctaagcgggtggtgacgacgtgccacaccaggatctggtcggtgagcttggggaacgcgcacgcccactccagctgcggcgtcaggccgtgcctccgcagcgtggagacgccattggtgaggtggccgtagctcgccttgagcgacacgagcaccgctcgccggacctcctgcggcaggcgcttcctccggccgcgcttctgcccctgccgccgcggctccaccaggtagagcgtcagccacgacaggatgttccatggccggtggccgaaccgcttgaggagcacgtactggccgaccttgtcgtcccagtacctcgtcgccggcggcgtgatgctctccttccaccagaggtggccgtgccgcctgttcgtccacggctggtcgtcgcgcacgcagcggtacaccgtcttgacgtacctccagttgctggagaagccggccaccgcctggcagagctcgaggccggcggtgatcacgacgatcagcaccgtgacggagcggtcgaagccgcgcacgccgatgcggagggggtggtaggccgggccgagcgtgccgaagaacgccgtccacattgtgatccccggcacggcggcggcgatgcaaacgtaggtc

SEQ ID NO: 36458 - DNA, 2439 bp, Oryza sativa
  Clone ID: PAT_MRT4530_40282C.1
atggtaccagggctgcgaagtgaaggtgcacgatctcctgtatacaattctgaagatgaagaattcagcattgagatgcaccacagaggcttttttatgggaaatggtgtaaaccgggcttatgttgatggtagagtgagctggtttgaccattgtgagtcagattcttggtcactgttgtggattgatgatttcattgaagaactaggatatgacaaatctgagaacaccaaaatttactggttgcttcctggcaaagaattaagtgatgggttgaggagggttaagtgtgatgcagacactaatagtatggtcgctcttgtacctagggtcagatcatttgttttgtatgcagatcatcaagacattgtcgatggtattgacttagatgatgtggcaattattggttcagatactttgcgtgctgctgtgcaaccaattaaaataattagggctaagagtgatggtggggaaaagattgtagataaatgtgctacctactctaaaattgatgaggaagaggagtcaagaattgaagatccagattttgttgatagtgattatgagattgatcatggggatgatgacttgtttgataattgtgttgaagggcaaattgagttagcgcataataaagaggagggttcagactatggttcatctgaagatgaaaggttgatgatgccagatatttctgaagaagaagaagaagaagaagaaatcaagttcagttttaagagttttagggctgatgtagacatggagacacctgagttcaaggttagcatgatgtttgcagatgctgtagagcttaggaaagcaatagatcaatatactataaagaaccgagttgctattaagaagacacggaataccaaaacaagaattgaagctaagtgtgctgaaggttgtccatggatgttgtctgcatctatggataatagagtcaaatgcttagtggtaagggaatatatagagaagcacacccgctctaaacagtgggagatcaaggccgtcacagctaagtatcttacaaaaaggtacattgaggaatttagagataatgacaaaatgacactgatgagctttgctaagaaaattcagaaggaactccacttaacaccatctaggcacaagctaggtagagctagaaggatggctatgagggccatatatggagatgaaatatctcagtacaaccaattatgggactatggacaagaattgagaacctctaacccaaggagctcattctacctgaacctactttttggttgcttccatactttgtatatgtcattcgatgcttgcaagagagggtttttgtctgggtgtagacctatcatttgtcttgatggatgccatattaaaacaaaatttggtggccatatcctaactgctgttggtatggacccaaatgactgcatttttcccattgcaattgtagtagttgaagttgagagcttgaaaagctggagttggtttcttgacactctaaaaaaagaccttggcattgagaatacatctgcatggacagtgatgactgataggcagaaggggcttgttccagctgtgagaagggagttttctcatgctgaacaaagattttgtgtgaggcatctatatcaaaattttcaagtgttacataaaggggagacactaaagaaccaactttgggctattgcaagatctagcactgtgcccgagtggaatgccaatatggaaaagatgaaggcattaagtagtgaagcttataagtaccttgaagaaattcctccaaaccaatggtgtcgagcctttttcagtgactttccgaagtgtgatatccttcttaacaataactcagaagtgtttaacaagtacattcttgatgccagggagatgcctattttgtctatgcttgagaggattagaaatcagatcatgaacaggttgtacaccaagcaaaaagaactagaaaggaattggccatgtggcctctgcccaaaaataaaacggaaggtcgagaaaaatacagagatggctaatacatgctatgttttgcctgctgggatgggagcatttcagaggaaggctgacttaaaacttcagaagcaacctatgcagcaaatggcgacttcatcaattgttgattcagaagagcttgtcatcactcgggaacctgtcatcactcaggaaatgcacctgcttagcataccccaacaaaattctaactatctgagttcatctgtggtggaagcttttattaaggaggctgctagcaaccatcaagaaagggtgaatccaggagcagtgctagagtctgctttcattgctactaataggagagaaggggttcaaccaccactaaccacatcaaccaaacaaggcagggccacattgaggaagagaagtgcagcacccaagaagaaaaactctcccaagaaaaagaaacagtag

SEQ ID NO: 36459 - DNA, 101 bp, Oryza sativa
  Clone ID: PAT_MRT4530_40283C.1
gaccgacccacgcgtatatttactgtatagagtaagcctcggagagggagggcaggtatgtgtgctgccatgactgttccaagggaaccttgttcctatgt

SEQ ID NO: 36460 - DNA, 176 bp, Oryza sativa
  Clone ID: PAT_MRT4530_40284C.1
taaatctccatgggagcggtgcatgcgcccggtccacggaggcggtgggcgtggggtggataaggcggctggtcggcggtggctgaaaagtggggcccacagcgccgtggcggggcccgtttcttgcggctgctggtcagtggtggctggtgctcttgctctcctctcctcccccg

SEQ ID NO: 36461 - DNA, 4866 bp, Oryza sativa
  Clone ID: PAT_MRT4530_40285C.1
tcacctcctgctgcgccagccgccgcctccacgctggccagcctcgtcgtgccgcaccggcacctcggctatgcctccacgtaccgcggccacctcctccactaccggccgtgcctcaccggcctccgccgtcaccggctgcgcctccgcgggtgcgctgccactgtcggccggccagccaccatcgctcccgccggttgcccgctgccgccgtgtcgcgctaccgtgagctctcctgatctggccgggggaggggaggggagcagatccaccaccgagaggccggatctgcctccggtgtatccactccgccggacgctccagccgccgcctcctaccgagcgagcaccgcttctcctcccacgtcgaggagaggctccgccgccggcgcgttttccccgctgccaccttcccggccggctgcgcgattttcgacggcgggctccgacggtggcgaggaggctggggcgattgggggtgacggtgcgggcggctagggtttcgcccctgagccgccagcgtgagagcggcgcgagggagtaaattccttattcggctgttttcgcaattcccaactgacagaggtttagtgaatccatctgcaacttgatcattagtggaaacaaaatcaatttctagaagtttctgagttacccgttctctgacaaagtgatagtcaacttctatgtgtttcgttctggcatgaaacactggattagctgacaaatacttagctccaagattatcacaccatattttagcagcttttggacttttaatctctaactctgcaagtaaagtctgcacccacattatttctgcagtggcattggcaatagctttgtattctgactctgtgctagatctagacacagtggcttgttttctagtattccaggagaccagatttgaacccagaaatattgcaaatcctcctgttgatcttctgtcatctaaacagcctgcccagtctgcatcagagaagccactgactaaagtagatcctgacttatgaatttcaagtcctaaccgagtgcattgctttaagtacctaagaatccttttcacagcaatccaatgtacagttgtgggagcatgcaagaattggcaaactttattaacagagaaagctatgtcaggtctagtaagagtcaaatattgcaaagcaccaacaacactgcgatagtgacttgcatcttcaggccctaacaatgagccttcatgaagggagagtttctcacttactgaaagaggtgtattagcaggtttacaatctatcatgcccactttcttcaataaatcattggcatacttgtcttgattcagtacaatgccattctgaaccttgcttacctctattccgagaaaataatgcagctcaccaagatctttgagtgcaaattccccttttagatcctgaagtaaagctgcagtggccctctctgaagagctggctacaatgatatcatcaacatataccagaacaaacatagttatatcacctttattcagaaagaacagagacgtatcagcttttgaccctttaaaaccaaggtccatcaactttttacttagtctagagaaccaggctctaggtgcctgttttaacccatacagagctttatcaagtttacacacatgatgtggcttagtaggatcctcaaaacctggtggctgtagcatataaacttcttcgtctaggtacccatgcagaaaggcattttgaacatctagctgtctaagactccaacctttagacactgctaaagacaatattattctgatagtggcagctttaacaacagggctaaaggtatcttcataatcaataccatacctttgtttaaatccttttgctactaaccttgccttatacctatctagggtaccatcagctttccttttaattttatacaccaacttacagccaataatatttctccctctctgaggaggaacaagatgccaagttttattcttaactaaagcatcatactctgaatccattgctagtttccaatttttatcctttaaggcttctaaatcatttgtaggttcaccttttctttgcgaactccactttgcaacctggtgcgcggtcctgccggtgcctctgaacgctggtgaggactgctcctgctcctgcaccacctgcgactcctgctcctgcaccgcctgcgacactgagtcttctgctgtgtcctctgctagcgatgatgctgccccccgtggcacagaaccaggtgtgggacccggatgatggcctgatgacatggccgcaggggagtggtggacgacacggtctggttctggaccagaactggcatccagaggaggcgtcgccggcgaatcttctgcatcagcgggatgtactgcaccatctctatgtggttcattagcacgattagataaagcagcagaaacatcagcagataatggattagtcactggatgcatgcattgttcattcccaacagaccgtatgggtcctagcagttcaggagtgagaatatcaatctcagaacgaagacgggcaccagcattggcatgaagttcagtgaagggaaaaatattctcatcaaagacaacatcgcgagaaatatagatgcgtcctgtagagacctcaagacacttgaaccctttatgcatagtgctaaacccaagaaaaacacaacgcttagagcgaaattgtaatttgtggttattgtaggggcgaagattaggccaacaggcacaaccaaaaattctcaaggaggagtaatcgggtttttgtttgaacagtttttcaaggggactaatattatggataactctgctaggcacacggttaataagataagttgccgcctgaaaggcttcatcccaaaactttaatggcatggatgcatgagataggagagataaaccgatctcaactatatgacgatgttttctctcagccgacccattctgttggtgagtatgaggacaggaaacatgatgaacaatgccaatcttagaaaaaaaagagttaagggattgatattcgcctccccaatcagtttgcatggctagaatttttctatcaaattgacgttctaccatgacttgaaactcttgaaacttgtcaaacacttgagacttatgcgtggtaatggaaggatgaccaagacgatgatgccaccggtccaaagatagtttgatggcactgtaggcttgcttcaaggaggagtgtggtagaggatatagcctgcgccatgatcttcccttaaggagagttttcctggtgatttgatccttaagaaagaaataatcacgatgtaattcaagaaaggcagagttatcattaactaagcgatgtactgaaacaagatttttcttagcttgaggcacatataaaacatttctaaggtggatattacgactattgggattatgaacaatagcatgaccaatatgactaatatccatacctgcaccacttgctgtgtggatttgttcaccaccgttgtatttttccttcatagtgagcttgtccagctctcccgtgacatgatctgtagcaccagtgtcgatgtaccaatttgtgtcaactccataggagttaaccgctgcagctgcaacatgcttggcgtcaggaacgtaatcctcgtcgtacctataccaacaatctgctgccgtgtgcccccgtttgaaacacacttggcagattggtcttttatcaacgcctcctggtgtgcggcctcgaccacggacacctcctccgttgcggcgaccatggccgccgccgccgccgcgcgaacctccttggccaccattgctgttgccacgccccccgtggctgaagcctccacggttggcaacattgacggtgacctcctgtgcgccgcggtagatggcttggcgagcttcaaagttcaacacttgagagtacagatcactcacagagattggttcaacccgagcgcagacagccgacaccacctcgctgtagccctcgccaaggccggtgatgatatactgaatcagctcctcttcatcgatcgggcgacctccggcagtagccatctcatctcctaaggatttcatttttgcaaaatactcaggagttgacatgttacctttctttgtattggtgagagcaaaccgagtgttaatcgctcttgctcgtgtgtgggtggagtacatctctcttgtcagcgacgagagaaggtaccccagaacttgctggtcggtggcttcccagtcttcatgggctaggttcggctccttcttggtggcgccatcttttgtgacagcgatctctgccggcggccgcttggttgcgccggtgagatgcccctgaagccgcgctcctctgactgcggcgcttacttgcaccttccagagcgcatgatttgccttcccaagcttctctgagattgggtggccttggaacggatttgtggcagccatactggacgacgaggccatgagtattgatctcttagggaattgatcaacgctcatattggcatctctttcatgacaatttgagctctcaccctttgataatttcccctcaagcgatatgttattacaataataaaaaaagagttgttggccccacatgtcaatgggactttttctcctctttcccccatcacatgtctcctctttttcatctttgcctgctccacgccggagcttgctatccccactggtagggtcgaactctactccttcatggtggcatcgggctttccactcatcgagcgtgtgcatggatgtagggatcagctcggcactaccatcaatggccactgtcccaacaccgttgttgccctttcggtcaccaagcctgaggcctgagggagccaccatctgcacgtacccaccaccccccat

SEQ ID NO: 36462 - DNA, 3609 bp, Oryza sativa
  Clone ID: PAT_MRT4530_40286C.1
ctagtttttgatctcccggttgaacactctgctgttccgctctttcttgtgaagggtattgtacttgcagcgaagcggcgcaaaagttttccacatttgtctgtctccctcaaacttggcacgaccaatgaagaatcgcttgtaggctgatctggaagagtaagggcccgatgcatcccatctccaacaaaaatgagtcttgttcagcatggttcctaacccctcccgttctctgacaaagtgatagtcaacttctatgtgtttcgttctggcatgaaacactggattagctgacaaatacttagctccaagattatcacaccatattttagcagcttttggacttttaatctctaactctgcaagtaaagtctgcacccacattatttctgcagtggcattggcaatagctttgtattctgactctatgctagatctagacacagtggcttgttttctagcattccaggagaccagatttgaacccagaaatattgcaaatcctcctgttgatcttctgtcatctaaacagcctgcccagtctgcatcagagaagccactgactaaagtagatcctgacttatgaatttcaagtcctaaccgagtgcattgctttaagtacctaagaatccttttcacagcaatccaatgtacagttgtgggagcatgcaagaattggcaaactttattaacagagaaagctatgtcaggtctagtaagagtcaaatattgcaaagcaccaacaacactgcgatagtgacttgcatcttcaggccctaacaatgagccttcatgaagggagagtttctcacttactgaaagaggtgtattagcaggtttacaatctatcatgcccactttcttcaataaatcattggcatacttgtcttgattcagtacaatgccattctgaaccttgcttacctctattccgagaaaataatgcagctcaccaagatctttgagtgcaaattccccttttagatcctgaagtaaagctgcagtggccctctctgaagagctggctacaatgatatcatcaacatataccagaacaaacatagttatatcacctttattcagaaagaacagagacgtatcagcttttgatcctttaaaaccaaggtccatcaactttttacttagtctagagaaccaggctctaggtgcctgttttaacccatacagagctttatcaagtttacacacatgatgtggcttagtaggatcctcaaaacctggtggctgtagcatataaacttcttcttctaggtacccatgcagaaaggcattttgaacatctagctgtctaagactccaacctttagacactgctaaagacaatattattctgatagtggcagctttaacaacagggctaaaggtatcttcataatcaataccatacctctgtttaaatccttttgctactaaccttgccttatacctatctagggtaccatcagctttccttttaattttatacacccacttacagccaataatatttctccctctctgaggaggaacaagatgccaagttttattcttaactaaagcatcatactctgaatccattgctagtttccaatttttatcctttaaggcttctaaatcatttgtaggttcaccttttctttgcgaactccactttgcaacctggtgcgcggtcctgccggtgcctctgaacgctggtgaggactgctcctgctcctgcaccacctgcgactcctgctcctgcaccgcctgcgacactgagtcttctgctgtgtcctctgctagcgatgatgctgccccccgtggcacagaaccaggtgtgggacccggatgatggcctgatgacatggccgcaggggagtggtggacgacacggtctggttctggaccagaactggcatccagaggaggcgtcgccggcgaatcttctgcatcagcgggatgtactgcaccatctctatgtggttcattagcacgattagataaagcagcagaaacatcagcagataatggattagtcactggatgcatgcattgttcattcccaacagaccgtatgggtcctagcagttcaggagtgagaatatcaatctcagaacgaagacgggcaccagcattggcatgaagttcagtgaagggaaaaatattctcatcaaagacaacatcgcgagaaatatagatgcgtcctgcaccacttgctgtgtggatttgttcaccaccgttgtatttttccttcatagtgagcttgtccagctctcccgtgacatgatctgtagcaccagtgtcgatgtaccaatttgtgtcaactccataggagttaaccgctgcagctgcaacatgcttggcgtcaggaacgtaatcctcgtcgtacctataccaacaatctgctgccgtgtgcccccgtttgaaacacacttggcagattggtcttttatcaacgcctcctggtgtgcggcctcgaccacggacacctcctccgttgcggcgaccatggccgccgccgccgccgcgcgaacctccttggccaccattgctgttgccacgccccccgtggctgaagcctccacggttggcaacattgacggtgacctcctgtgcgccgcggtagatggcttggcgagcttcaaagttcaacacttgagagtacagatcactcacagagattggttcaacccgagcgcagacagccgacaccacctcgctgtagccctcgccaaggccggtgatgatatactgaatcagctcctcttcatcgatcgggcgacctccggcagtagccatctcatctcctaaggatttcatttttgcaaaatactcaggagttgacatgttacctttctttgtattggtgagagcaaaccgagtgttaatcgctcttgctcgtgtgtgggtggagtacatctgctcgatggcgctccacacttcagccgcggtgtcgcatgtagcgacttgctggtcggtggcttcccagtcttcatgggctaggttcggctccttcttggtggcgccatcttttgtgacagcgatctctgccggcggccgcttggttgcgccggtgagatgcccctgaagccgcgctcctctgactgcggcgcttacttgcaccttccagagcgcatgatttgccttcccaagcttctctgagattgggtggccttggaacggatttgtggcagccatactggacgacgaggccatgagtattgatctcttagggaattgatcaacgctcatattggcatctctttcatgacaatttgagctctcaccctttgataatttcccctcaagcgatatgttattacaataataaaaaaagagttgttggccccacatgtcaatgggactttttctcctctttcccccatcacatgtctcctctttttcatctttgcctgctccacgccggagcttgctatccccactggtagggtcgaactctactccttcatggtggcatcgggctttccactcatcgagcgtgtgcatggatgtagggatcagctcggcactaccatcaatggccactgtcccaacaccgttgttgccctttcggtcaccaagcctgaggcctgagggagccaccatctgcacgtacccaccaccccccat

SEQ ID NO: 36463 - DNA, 249 bp, Oryza sativa
  Clone ID: PAT_MRT4530_40287C.1
atggcgcggtgcaggtgcaggtgcagtgtagccgcgccgcgcgtggacaaggtgacgggtgacggggcgtgcagggggtcacaggtggcgcgaggcggaggtggatggaggcctggaggggatttgtcgggcggcgagccgctctttcgcctcttcctctgtttctgcagaggtttggtcggcgtggcttcgtgggcccgtggtctgcctgctttgaacaaggacaataccaacccacagtatctataa

SEQ ID NO: 36464 - DNA, 4383 bp, Oryza sativa
  Clone ID: PAT_MRT4530_40288C.1
ctaactaacaccctctctcaatccggacctaaccaggttcagattgcttttgaaattctccaggagtcttactgacagaggtttagtgaatccatctgcaacttgatcattagtggaaacaaaatcaatttctagaagtttctgacttacccgttctctgacaaagtgatagtcaacttctatgtgtttcgttctggcatgaaacactggattagctgacaaatacttagctccaagattatcacaccatattttagcagcttttggacttttaatctctaactctgcaagtaaagtctgcacccacattatttctgcagtggcattggcaatagctttgtattctgactctgtgctagatctagacacagtggcttgttttctagcattccaggagaccagatttgaacccagaaatattgcaaatcctcctgttgatcttctgtcatctaaacagcctgcccagtctgcatcagagaagccactaactaaagtagatcctgacttatgaatttcaagtcctaaccgagtgcattgctttaagtacctaagaatccttttcacagcaatccaatgtacagttgtgggagcatgcaagaattggcaaactttattaacagagaaagctatgtcaggtctagtaagagtcaaatattgcaaagcaccaacaacactgcgatagtgacttgcatcttcaggccctaacaatgagccttcatgaagagagagtttctcacttactgaaagaggtgtattagcaggtttacaatctatcatgcccactttcttcaataaatcattggcatacttgtcttgattcagtacaatgccattctgaaccttgcttacctctattccgagaaaataatgcagctcaccaagatctttgagtgcaaattccccttttagatcctgaagtaaagctgcagtggccctctctgaagagccggctacaatgatatcatcaacatataccagaacaaacatagttatatcacctttattcagaaagaacagagacgtatcagcttttgatcctttaaaaccaaggtccatcaactttttacttagtctagagaaccaggctctaggtgcctgttttaactcatacagagctttatcaagtttacacacatgatgtggcttagtaggatcctcaaaacctggtggctgtagcatataaacttcttcttctaggtacccatgcagaaaggcattttgaacatctagctgtctaagactccaacctttagacactgctaaagacaatattattctgatagtggcagctttaacaacagggctaaaggtatcttcataatcaataccatacctctgtttaaatccttttgctactaaccttgccttatacctatctagggtaccatcagctttccttttaattttatacacccacttacagccaataatatttctccctctctgaggaggaacaagatgccaagttttattcttaactaaagcatcatactctgaatccattgctagtttccaatttttatcctttaaggcttctaaatcatttgtaggttcacctgaagcagtaaaccaagaatgcttatatttaatagtaccatcagtatataccttttctttgcgaactccactttgcaacctggtgcgcggtcctgccggtgcctctgaaactgtgtcagtcacatctgcatgctgtaatgtattagtctcatctgtgacagcctgtgcatgttcctgcgctggtgaggactgctcctgctcctgcaccacctgcgactcctgctcctgcaccgcctgcgacactgagtcttctgctgtctcctctgctagcgatgatgctgccccccgtggcacagaaccaggtgtgggacccggatgacggcctgatgacgtggccgtaggggagtggtggacgacacggtctggttctggaccagaactggcatccagaggaggcgtcgccggcggatcttctgcatcagcgggatgtactgcaccatctctatgtggctcattagcacgattagataaagcagcagaaacatcagcagataatggattagtcactggatgcatgcattgttcattcccaacagaccgtatgggtcctagcagttcaggagtgagaatatcaatctcagaacgaagacgggcaccagcattggcatgaagttcagtgaagggaaaaatattctcatcaaagacaacatcgcgagaaatatagatgcgtcctgtagagacctcaagacacttgaaccctttatgcatagtgctaaacccaagaaaaacacaacacttagagcgaaattgtaatttgtggttattgtaggggcgaagattaggccaacaggcacaaccaaaaattctcaaggaggagtaatcgggtttttgtttgaacagtttttcaaggggactaatattatggataactctgctaggcacacggttaataagataagttgccgcctgaaaggcttcatcccaaaactttaatggcatggatgcatgagataggagagataaaccgatctcaactatatgacgatgttttctctcagccgacccattctgttggtgagtatgaggacaggaaacatgatgaacaatgccaatcttagaaaaaaaagagttaagggattgatattcgcctccccagtcagtttgcatggctagaatttttctatcaaattgacgttctaccatgacttgaaactcctgaaacttgtcaaacacttgagacttatgctgtatgagataaatccaagtaaatttactaaaatcatcaataaaactaacataatatttttttcttccaacagactctggagcaggtccccaaacatcagaaaagacaagttctaaggggtgtttggaaacactggaagaaataggaaaaggtaattgatgactctttgcttgttgacaagcattacaaactgactcactagacaaatctgaacaggggaggctaaacttattgactacttgtttaaccgtggtaatggaaggatgaccaagacgatgatgccaccggtccaaagatagtttgatggcactgtaggcttgcttcaaggaggagtgtggtagaggatatagcctgcgccatgatcttcccttaaggagagttttcctggtgatttgatccttaagaaagaaataatcacgatgtaattcaagaaaggcagagttatcattaactaagcgatgtactgaaacaagatttttcttagcttgaggcacatataaaacatttctaaggtggatattacgactattgggattatgaacaatagcatgaccaatatgactaatatccatacctgcaccacttgctgtgtggatttgttcaccaccgttgtatttttccttcatagtgagcttgtccagctctctcgtgacatgatctgtagcaccagtgtcgatgtaccaatttgtgtcaactccataggagttaaccgctgcagctgcaacatgcttggcgtcaggaacgtaatcctcgtcgtacctataccaacaatctgctgccgtgtgcccccgtttgaaacacacttggcagattggtcttttatcaacgcctcctggtgtgcggcctcgaccacggccacctcctccgttgccgcgaccatggccgccgccgtcgccgccgccgcgcgaacctccttggccaccattgctgttgccacgccccccgtggctgaagcctccacggttgacaacattgacggtgacctcctgtgcgccgcggtagatggcttggcgagcttcaaagttcaacacttgagagtacagatcactcacagagattggttcaacccgagcgtagacagccgacaccacctcgctgtagccctcgccaaggccggtgatgatatactgaatcagctcctcttcatcgattgggcgacctccggcagtagccatctcatctcctaaggatttcatttttgcaaaatactcaggagttgacatgttacctttctttgtattggtgagagcaaaccgagtgttaatcgctcttgctcgtgtgtgggtggagtacatctgctcaatggcgctccacacttcagccgcggtgtcgcatgtagcgacctgcatcagcacctctcttgtcagcgacgagagaaggtaccccagaacttgctggtcggtggcttcccagtcttcatgggctgggttcggctccttcttggtggcgccatcttttgtgacagcgatctctgccggcggccgcttggttgcgccggtgagatgcccctgaagccgcgctcctctgactgcggcgcttacttgcaccttccagagcgcatgatttgccctcccaagcttctctgagattgggtggccttggaacggatttgtggcagccgtactggacgacaaggccat

SEQ ID NO: 36465 - DNA, 1587 bp, Oryza sativa
  Clone ID: PAT_MRT4530_40289C.1
atggtggtggtcgacgggctccacgacggcggcggcggtgacctccaggccttgctggatgacgcgggggtggatgatgtcgcggcaaggggcggcggcgaggtagaggaggaggtggagcggccgtcgaacgaggacgcgttcccggcggtggagaagatggcgacggcagcggcggcgaaggggttgcagtgccggcactgcgggacgacggagacgccgcagtggcgccatggcccggagggccaccgcacgctgtgcaacgcgtgcagcatgcgctaccggagcggcaagctggtgccggagtaccggccgctgaggagcccgacgttctcgccggagcttcactccaacaggcaccaccgcgtcctccagctgcgccgccgaccggggccccagtcagccgccccgtcccccgcggcggtggcgaggtacggcggcgaggcgaaggaggaggaagaggagctggcatgggtgtcgaacaaggacgcgttcgcgacggtggagaccaccatggcgccgtcgccgcgggtggtggagacaccaccggaacacgaccaccggccggcgaacaccccgaccacctctccagagccgcactccgacagaccccgccgcgtcgtccagctacctcgccgcctgcaggagccatccgcatcagccaacctcgcccatgcagtggcggcgacggcgagggcggggcgagagtgcgcgcactgcgggacgacgaagacgccggcgtggcgccttggcccggacagccgccgcaagctgtgcaacgcgtgcggcaacaagtaccggagcggccagctgaacagcacgaccttctcccagaattcccaagaacagaagaagaagagcaagagctcggcgtgttccagggagaggaagcgatcggcggtggcggcgacggtggtggtgggtggtggtctccgtgacgacgcggcggcgatcgcggacgaacacctcgacggcggcgacctccaggccttgttggatgacgtggcgttggatgacgtcgcggcgaggggtggcggcgacgccggcgaggcgaaggaggaagaagaggagctggagtggctgtcgaacaaggacgcgttcccgacggtggagacgatgtcgccggcgccgccggagaaccgaacgaaggcgcccgtgccgccggcggggtggcagtgccggcactgcgggtcgacggagacgccgctgtggcgcgagcgcgacggcccggcggaggcggagcacgtgaggaaggaggagacaccaccgaacatcaccccggcaaccaaacaccgccgcatcgtcgacctcctccgctgctccactgctcttaacacggcggcgaaggcggtggagcggcggtgcacgcactgcgggacgacgaagacgccggcgtggctgagtggtccggacagccgcggcaagctgtgcaacgcgtgcgggaagcagtacaggaaaggtcggctggtgccggagtaccggcctctcaactgtccgaccttctcgccggagctgcactccaacgcacacgcacaccgccgtcgccgagagtcgccggtcgccatcgccatcgccggcgagaagtga

SEQ ID NO: 36466 - DNA, 819 bp, Oryza sativa
  Clone ID: PAT_MRT4530_4028C.1
atgtggccgacggggcaaggcaggagaggaggaggtccaacggtggcgacagaggagaaagggactctccacaccagccgcgactccagcgccgccaccctcaccgacgacatggcgagtgtgattccggagagtgagatgggtgctggcgatggccgacgagcagcgatggtgagcaacaaaaactatagttacctcgtgggcgaggttgggagcggcgagggcgcgaggccggcgaggtggacggggaggactgcgtgtgacggcgacggcggtggcgccgatatgaccgaggacgagcgtatgccgggcgatgtgaggaggaaggcgtgcgacgtcaacgctgatccgggtgacgcggcctgcgacggcgaacttgcggcggcatggactcgagcggggaggggcggcgcgtcggtcggcggggacaagattagggttagggtgagagggttgcacgatttcgggataagaaaaggaaatcacgcgattgagatcggtggcggcgagacgacggatgcaacaacggcggagcggcggcagtcgagggcggcggcgacggcgtgggttgtgctgaagaaggataggcgaaagaagaggaggcggcaacgattgggaggaggtggggaggaggccaacgagcaggagaggcatcgggggtggaggagtgaggagtcgatggcggtgcgtggagtcaaggtggtggtggagtcgagggttttggaggcagcgcggatggagtggagtgcaacggctgagtgcggaggagtcaacgtcgcaaaggggtggagcgcgtggtgcggcggcggtggcacataa

SEQ ID NO: 36467 - DNA, 4176 bp, Oryza sativa
  Clone ID: PAT_MRT4530_40290C.1
atgtcaattttctctgcgctctggaaggtgcaagtaagcgccgcagtcagaggagcgcggcttcaggggcatctcaccggcgcaaccaagcggccgccggcagagatcgctgtcacaaaagatggcgccaccaagaaggagccgaacccagcccatgaagactgggaagccaccgaccagcaagttctggggtaccttctctcgtcgctgacaagagaggtgctgatgcaggtcgctacaggcgacaccgcggctgaagtgtggagcgccatcgagcagatgtactccgcccacacacgagcaagagcgattaacactcggtttgctctcaccaatacaaagaaaggtaacatgtcaactcctgagtattttgcaaaaatgaaatccttaggagatgagatggctactgccggaggtcgcccgatcgatgaagaggagctgattcagtatatcatcaccggccttggcgagggctacagcgaggtggtgtcggctgtctgcgctcgggttgaaccaatctctgtgagtgatctgtactctcaagtgttgaactttgaagctcgccaagccatctaccgcggcgcacaggaggtcaccgtcaatgttgccaaccgtggaggcttcagccacggggggcgtggcaacagcaatggtggccaaggaggttcgcgcggcggcggcgacggcggcggccatggtcgcggcaacggagaaggtggccgtggtcgaggccgcacaccaggaggcgttgataaaagaccaatctgccaagtgtgtttcaaacgggggcacacggcagcagattgttggtataggtacgacgaggattacgttcctgacgccaagcatgttgcagctgcagcggttaactcctatggagttgacacaaattggtacatcgacactggtgctacagatcatgtcacgggagagctggacaagctcactatgaaggaaaaatacaacggtggtgaacaaatccacacagcaagtggtgcaggtatggatattagtcatattggtcatgctattgttcataatcccaatagtcgtaatatccaccttagaaatgttttatatgtgcctcaagctaagaaaaatcttgtttcagtacatcgcttagttaatgataactctgcctttcttgaattacatcgtgattatttctttcttaaggatcaaatcaccaggaaaactctccttaagggaagatcatggcgcaggctatatcctctaccacactcctccttgaagcaagcctacagtgccatcaaactatctttggaccggtggcatcatcgtcttggtcatccttccattaccacggttaaacaagtagtcaataagtttagcctcccctgttcagatttgtctagtgagtcagtttgtaatgcttgtcaacaagcaaagagtcatcaattaccttttcctatttcttccagtgtttccaaacaccccttagaacttgtcttttctgatgtttggggacctgctccagagtctgttgggagaaaaaaatattatgttagttttattgatgattttagtaaatttacttggatttatctcatacagcataagtctcaagtgtttgacaagtttcaggagtttcaagtcatggtagaacgtcaatttgatagaaaaattctagccatgcaaactgactggggaggcgaatatcaatcccttaactcttttttttctaagattggcattgttcatcatgtttcctgtcctcatactcaccaacagaatgggtcggctgagagaaaacatcgtcatatagttgagatcggtttatctctcctatctcatgcatccatgccattaaagttttgggatgaagcctttcaggcggcaacttatcttattaaccgtgtgcctagcagagttatccataatattagtccccttgaaaaactgttcaaacaaaaacccgattactcctccttgagaatttttggttgtgcctgttggcctaatcttcgcccctacaataaccacaaattacaatttcgctctaagcgttgtgtttttcttgggtttagcactatgcataaagggttcaagtgtcttgaggtctctacaggacgcatctatatttctcgcgatgttgtctttgatgagaatatttgtcccttcactgaacttcatgccaatgctggtgcccgtcttcgttctgagattgatattctcactcctgaactgctaggacccatacggtctgttgggaatgaacaatgcatgcatccagtgactaatccattatctgctgatgtttctgctgctttatctaatcgtgctaatgagccacatagagatggtgcagtacatcccgctgatgcagaagatccgccggcgacgcctcctctggatgccagttctggtccagaaccagaccgtgtcgtccaccactcccctgcggccacgtcatcaggccgtcatccgggtcccacacctggttctgtgccacggggggcagcatcatcgctagcagaggagacagcagaagactcagtgtcgcaggcggtgcaggagcaggagtcgcaggtggtgcaggagcaggagcagtcctcaccagcgcaggaacatgcacaggctgtcacagatgagactaatacattacagcatgcagatgtgactgacacaggttcagaggcaccggcaggaccgcgcaccaggttgcaaagtggagttcacaaagaaaaggtatatactgatggtactattaaatataagcattcttggtttactgcttcaggtgaacctacaaatgatttagaagccttaaaggataaaaattggaaactagcaatggattcagcgtatgatgctttagttaagaataaaacttggcatcttgttcctcctcagagagggagaaatattattggctgtaagtgggtgtataaaattaaaaggaaagctgatggtaccctagataggtataaggcaaggttagtagcaaaaggatttaaacagaggtatggtattgattatgaagatacctttagccctgttgttaaagctgccactatcagaataatattgtctttagcagtgtctaaaggttggagtcttagacagctagatgttcaaaatgcctttctgcatgggtacctagaagaagtttatatgctacagccaccaggttttgaggatcctactaagccacatcatgtgtgtaaacttgataaagctctgtatgagttaaaacaggcacctagagcctggttctctagactaagtaaaaagttgatggaccttggttttaaaggatcaaaagctgatacgtctctgttctttctgaataaaggtgatataactatgtttgttctggtatatgttgatgatatcattgtagccggctcttcagaaagggccactgcagctttacttcaggatctaaaaggggaatttgcactcaaagatcttgtaagtgagaaactctctcttcatgaaggctcattgttagggcctgaagatgcaagtcactatcgcagtgttgttggtgctttgcaatatttgactcttactagacctgacatagctttctctgttaataaagtttgccaattcttgcatgctcccacaactgtacattggattgctgtgaaaaggattcttaggtacttaaagcaatgcactcggttaggacttgaaattcataagtcaggatctactttagttagtggcttctctgatgcagactgggcaggctgtttagatgacagaagatcaacaggaggatttgcaatatttctgggttcaaatctggtctcctggaatgctagaaaacaagccactgtgtctagatctagcacagagtcagaatacaaagctattgccaatgccactgcagaaataatgtgggtgcagactttacttgcagagttagagattaaaagtccaaaagctgctaaaatatggtgtgataatcttggagctaagtatttgtcagctaatccagtgtttcatgccagaacgaaacacatagaagttgactatcactttgtcagagaacgggtaagtcagaaacttctagaaattgattttgtttccactaatgatcaagttgcagatggattcactaaacctctgtcagtaagactcctggagaatttcaaaagcaatctgaacctggttaggtccggattgagagagggtgttagttag

SEQ ID NO: 36468 - DNA, 5467 bp, Oryza sativa
  unsure (1)..(5467): unsure at all n locations
  Clone ID: PAT_MRT4530_40291C.1
atggttaattaccaagtaaattttctgtgcttgtccatcagaagagctcatgatcattaataacataacaaaaatagaacacgtaaaatataagaaaaatattgtntaggtagtgctctaattacataggtgcaggggcaggtgagatatggttcgggttccagcgtgcttgataatcctccccgatccgaattggagtgattatgtaccactcccaaaccagcaaacattatataagttatatgaaagaagagaagccagttgtagatggaagcgacggccaatggatactgcctcttgacggcattagtccggtgactgcgccacacaaacctccagaatatacgcatcgtcgttacaggttcaacccatgttccgacattgacaaccaaaacgatgaggcacacgtagataaccatgaacacgatggagactgccctcgaggttctcatcgtggcgcgaaaagccgcaaagaaggccaggatcaggctgacgagcgagacccagataaagtgcaacgccgccacgaagctcttccacgagccggcggagcgcgatgccttcccgtagacgagtaggatcacggcgaccaccgatgccgctacggcgacggtgtcgaggaccatgaaccatttgaatgagaacctgcccttgaggttcgccgtgccgtcgtctccgtagctgcctggcatgttgaatccggcggcaaaggcgacggtggcgatgagcacggccaccaccgcaaggctgtcagttgtcctctctatccctttacctatgtcgcggccgctccacggctttagatggtcattcctttgtggtcggccttgtgccccaaaagcaactaatatcaccacaaagcttaccatgttgaacaaattggtcgatgtcgaagcgagatcaagcggcgagtgtccatcgtcgttcaagacatcgctttgcactttccccttatggagtaaggcattcacaatgtcaggcgagccggcaaccacggcgatgtggagcggcgtgttcccaaccccgtcctgcgcgtccagaaggccaccgacctgcttgtgtttcttgatagcgagggacacgatcgaggactgcttctccctgaccgcggtgtgcaggaaggtctctccatggccgtcacggagctcaacagcatcagggcagatcccaattagttgcttgacaacattggcatgtcccaacctagccgcgacatgaagagcggagaggccatccgagtccttcatgtacactgtgccagttggcacgatggctaggattgcatgtacgattttgcggttgccgtcggatgccgcgaaatggagtggggtgctgccattgcagtcgacctggctagccagttctggcttccattgcaataataagtgaaccatctctgccaaagacacaaatttatcaatcgagttgacaaacacattcttgttttgtgcttgagatctgctcatcactgccaagtacaacggtgacacaccggctttgtttagctcggtctgtgaattagtttgggtggaaacgatcgcactaatcctgtgcgtcgccttcgtgttaatatatatgtgatgggaacagcccccatcgtggcgatacagagttcggcgcagctgagaacaaccgaagccgagattgatgaaacgacttaacaaccgttctctgacaaagtgatagtcaacttctatgtgtttcgttctggcatgaaacactggattagctgacaaatacttagctccaagattatcacaccatattttagcagcttttggacttttaatctctaactctgcaagtaaagtctgcacccacattatttctgcagtggcattggcaatagctttgtattctgactctgtgctagatctagacacagtggcttgttttctagcattccaggagaccagatttgaacccagaaatattgcaaatcctcctgttgatcttctgtcatctaaacagcctgcccagtctgcatcagagaagccactaactaaagtagatcctgacttatgaatttcaagtcctaaccgagtgcattgctttaagtacctaagaatccttttcacagcaatccaatgtacagttgtgggagcatgcaagaattggcaaactttattaacagagaaagctatgtcaggtctagtaagagtcaaatattgcaaagcaccaacaacactgcgatagtgacttgcatcttcaggccctaacaatgagccttcatgaagagagagtttctcacttactgaaagaggtgtattagcaggtttacaatctatcatgcccactttcttcaataaatcattggcatacttgtcttgattcagtacaatgccattctgaaccttgcttacctctattccgagaaaataatgcagctcaccaagatctttgagtgcaaattccccttttagattctgaagtaaagctgcagtggccttctctgaagagctggctacaatgatatcatcaacatataccagaacaaacatagttatatcacctttattcagaaagaacagagacgtatcagcttttgatcctttaaaaccaaggtccatcaactttttacttagtctagagaaccaggctctaggtgcctgttttaacccatatagagctttatcaagtttacacacatgatgtggcttagtaggatcctcaaaacctggtggctgtagcatataaacttcttcttctaggtacccatgcagaaaggcattttgaacatctagctgtctaagactccaacctttagacactgctaaagacaatattattctgatagtggcagctttaacaacagggctaaaggtatcttcataatcaataccatacctctgtttaaatccttttgctactaaccttgccttatacctatctagggtaccatcagctttccttttaattttatacacccacttacagccaataatatttctccctctctgaggaggaacaagatgccaagttttattcttaactaaagcatcatactctgaatccattgctagtttccaatttttatcctttaaggcttctaaatcatttgtaggttcacctgaagcagtaaaccaagaatgcttatatttaatagtaccatcagtatataccttttctttgcgaactccactttgcaacctggtgcgcggtcctgccggtgcctctgaacctgtgtcagtcacatctgcatgctgtaatgtattagtctcatctgtgacagcctgtgcatgttcctgcgctggtgaggactgctcctgctcctgcaccacctgcgactcctgctcctgcaccgcctgcgacactgagtcttctgctgtctcctctgctagcgatgatgctaccccccgtggcacagaaccaggtgtgggacccggatgacggcctgatgacgtggccgcaggggagtggtggacgacacggtctggttctggaccaaaactggcatccagaggaggcgtcgccggcggatcttctgcatcagcgggatgtactgcaccatctctatgtggctcattagcacgattagataaagcagcagaaacatcagcagataatggattagtcactggatgcatgcattgttcattcccaacagaccgtatgggtcctagcagttcaggagtgagaatatcaatctcagaacgaagacgggcactagcattggcatgaagttcagtgaagggaaaaatattctcatcaaagacaacatcgcgagaaatatagatgtgtcctgcaccacttgctgtgtggatttgttcaccaccgttgtatttttccttcatagtgagcttgtccagctctcccgtgacatgatctgtagcaccagtgtcgatgtaccaatttgtgtcaactccataggagttaaccgctgcagctgcaacatgcttggcgtcaggaacgtaatcctcgtcgtacctataccaacaatctgctgccgtgtgcccccgtttgaaacacacttggcagattggtcttttatcaacgcctcctggtgtgcggcctcgaccacggccacctcctccgttgccgcgaccatggccgccgccgccgccgccgcgcgaacctccttggccaccattgctgttgccacgccccccgtggctgaagcctccacggttggcaacattgacggtgacctcctgtgcgccgcggtagatggcttggcgagcttcaaagttcaacacttgagagtacagatcactcacagagattggttcaacccgagcgcagacagccgacaccacctcgctgtagccctcgccaaggccggtgatgatatactgaatcagctcctcttcatcgatcgggcgacctccggcagtagccatctcatctcctaaggatttcatttttgcaaaatactcaggagttgacatgttacctttctttgtattggtgagagcaaaccgagtgttaatcgctcttgctcgtgtgtgggtggagtacatctgctcgatggcgctccacacttcagccgcggtgtcgcatgtagcgacctgcatcagcacctctcttgtcagcgacgagagaaggtaccccagaacttgctggtcggtggcttcccagtcttcatgggctgggttcggctccttcttggtggcgccatcttttgtgacagcgatctctgccggcggccgcttggttgcaccggtgagatgcccctgaagccgcgctcctctaactgcggcgcttacttgcaccttccagagcgcatgatttgccttcccaagcttctctgagattgggtggccttggaacggatttgtggcagccgtactggacgacgaggccatgagtattgatctcttagggaattgatcaacgctctcaacaactttcatgctaactaacacggtcgccttcgcacgtgccacgacaagagcctccacggtggcgccatgcccgtgcctcgctgccatgtgtagggccgtgtccccggccgcgttctggcatcccaggatattctcctcgcagtcctgggccagatttacaaggatcgtcacggtgccggcgtgccctgccctcgccgcgcagtgcagaggtgtgtccatcgccgagttccggcgagagaggagactattgtccctgatgaacctatggtagagctcctggatcagctcgccatgccctttctccgctgcgacatgaagaatggtgttcctctccgccgtcacctcgagtacgttgcactgtctgtgctgaatgatgccagcgacttgacgatgtgctgctgcaccatcgccgggccgttgctgcagaagcaacgccatgacctcctccgctcgcccgctccgtgcagcgcgatacagcgacgggcacatctccatgcgaggcgcctcatcaccattcgacgccgccggctgatccattgatggagtatgcatgccgtacgtacgtgtcaaattaagcttattagagataaagaggatataaagtatatgctcggacgcgtggg

SEQ ID NO: 36469 - DNA, 330 bp, Oryza sativa
  Clone ID: PAT_MRT4530_40292C.1
atggccgttcttgggtcgcgcgcgtgcggcggcgacgacaaggagaacgtgccgccgatgccggcggtggcggcggcggtggcggcgagttcttggcatggcatcgccgtcgtcaagaaccagaggatgaagaggccgggcggcggcggagggaagctgcggaggcgcgtgccgctccgcgacatcaccaacctcatgtacgtcgccgcgcggccgcctgctccaccggctgcgagctccgtgacggcggcggcgcggtcgcgggaggagccggttgcggctgcggcggcgttgccggcgaggcgttcgctcaggaaggagttcagatag

SEQ ID NO: 36470 - DNA, 2064 bp, Oryza sativa
  Clone ID: PAT_MRT4530_40293C.1
gctgtcacatgaataatatctaccttttgaagttgggcaaatgttacactacacatgtagtagtaatagccaaaaaagaattgtgggagatacaccgacttcatatcatgctagcaacgctattctcaagctattttacatagtcaatacttcattcctaagaaaggacatcctcttgtcttcaaaaaacaattatcatgtggacacaacattacaaccggccccatttgcagttctgcatcatcacgatgcaaagcattcctaatgacttgcatatggagaaactgtttcaccatgattcaacgtcaggaaacatactccaaaacaaggagacaccttcaagttaactgatgtattatgttctgtaactgtatatggaagtccatggagaaacgacaacctttggaaactggtagaatgaatgggtcaaccttggacaaagtggttaaaagaacactatgcacaaatggtacaaaagcatcaatcaattgggtgcttgtctgtttgccgggaggtgtattgggcagaaatcagaagcaaggacagaaatgcactagccacaaatatagcatcaaaccagcggtggtaaaagtcaaactggatatcaccacccaaaacatctgtaatgatcaccctatactcatttgccaggcttttccttatgagaagaatagatgatatgaagtacattcccatgatctcagatagaaaaaggacaacattggttgttgaaccactcccaactctagaaacagcaaagaagaactgcatagaaagtgagacaccatagaattgcgttctaatgctcaattgaaaagggtacagtaacaactaacagccgtttgtatagattactgaaaggcaaaaaagaccttcataacatttgccaagaaacctcgaacagatatgacaaccaacatcccgataaatatgagagatatatactgtgataaaagagtgacatcaataccaatgtcaaaatgcctcaagaagatggtaattgtcatggttactggatcaacagaacctgcctctttaaagacaacactctgcaaggacttgagcatcttataaacacaatacactgacaaagcatatcctagtagattctgagcatggcctctccaagttcgagaaaacgcagcagctatctttgcttgacggagttcatatatctcaagaaatagttgtttggaaagttcttctagtgcctggacctctgcatccaagcttttgatatcctgctcagtttgatcttcttgcacagatcgaacaactgtcccaacgatacgctttagaaatgatctggcttttagcttctcttctgatccttgaatcctctccatctccattttggacagaacaattttctttttcttagcgatgcatgtctccatggattgcatgagctgcctttccaatgttttgatgtccttttcatcaatttccctgataaacagtgacagatagctgtaaggcagattgacggcaccaaaaccagaaagaacagccatgacacttactccaatcacgccaatcctactaaccaactggggcatcgtgaaaaaccctttttccggagaaggcatggggaaatgaatccccatgcgccagaagccatagaggaagaccagcaggaacagcgccgcgacgagcagagcccgctccctccgcacccctgagttgcgcagcagcaggtagcagtggtagtaggggaggacgaagacgaggaggaggatgaggcagaagaggtcgaggtgccagttgaggaagcgggcgtgcttggagaggacggggaggatctcgaagaggacgagctggaagaggttgcaggagaaggcgaagacgaggccgaagaggatctgcaccagcgcccgccgctcctcgtactccttgtacagccgccggttgaggaaccacagccccgcccagccgagccccaccagcgacgcccccaccacgccgccctcgtacaccaccgcgccccaacccattcccccctcccccaccccacctccacgcctcgcgcgcgcgccggcgccggagccggagatgatcctcgca

SEQ ID NO: 36471 - DNA, 750 bp, Oryza sativa
  Clone ID: PAT_MRT4530_40294C.1
atgcataccaacaaggagacggaaatactggccgcaaaactggacctcctaatgaagcgcttggacgaccaggaaaagaacaagccccaaggcaccatcaagaccttagactcacacatcatgtgtgaggtctacgggaacacgggtcattccgggacagactgtccagagactcatgaggaggcaatgttcatgaacaacggatatcgtccacaaggagctaaaaccactgatgctttaaacaagaagttagctaccaatgataacatcttggaaaatataaatgtcaagctagatggctttgcttctactttccaaaaccaaccgagttttaataagatgctacaaactcagctggtacctacatacgctcgctacctgaaggacattctggataacaagagaccactgccaaccacgaaggtagtgaagcttacggaggagtgtagcaacgctatactccactggctccaggaaaagaagaaagatccggggtgtcccacaatcacttgctcaatcgggagacaacactttgaccaagccctctatgaccttggtgcaagcgtaagcgtcacgcccaaggaggtcttcgacaagcaacttcacggtgttggcaccaacactgatgcggctccaactggccgattctttgttccgctacctagcgggaatcgccggagatgtgctagtaaagatctaggatttcttcatcccggtagactttgtggtgttagacatggactcagataa

SEQ ID NO: 36472 - DNA, 3288 bp, Oryza sativa
  Clone ID: PAT_MRT4530_40295C.1
atggcttcctccatcagtagtgccacctccaatcccctctctaggcaagcgatcctagacaaacttacccacagcaacttccttaccgtgatcaggggcgcacgtatggaaggatatctcaccggtgccaccaagtcgccgtcccagatggtgatggttccaacggagaaggaaggtggcagggccaccgaaaccatgaacctggcgtacgaagcctggttggctgcggaccagcaaatcctcggctacctcttctcctccttgtcaaaggagatcctgacgcaagtcgtgacaatggacacggcggcgcaggcgtggagggcaatcacggagatggtgtcctcccagtcgcgatcgcgtgccctcaacacacggcttgcgctctctacgacgcgcaaagacgacctcagcgtatcgaactacatcagcaagatgaaaacactcgctgacgagatggcatcagccggcaagcccctcgtcgacgaagaactgatgggctatgttttggtcggccttggtgatgactacgaaccggtggtctccagtttggtaggcaaacacgaaccagtttcaatttttgaagtttactcacaacttctcagtttcgagtccagagggaagctgcgacagattgcagcaaatcatggctattcctgcgctaatagcgcaaagcgcggcggcggtggaaaaggtggcagcatcggcggcttcgccttcaaccatggcggcagcaatggcgcagctcgcgggaacttcagcaacaatggcggtcgcggggatcgcggtggtcgcgggcgcggctacaatggaggcggccgctacaacaactccaagccgtgccccacgtttgatgattcttttgttccagatgccaagtatatcgataccggtacaacggatcatattacgggagagctagagaagctgacgacccatgaaaaatacaatggcaaagatcagatctacacggcaagtggtgaagatgtatggggacctgctcctgattcttttgggggcaggaagtattataaaaaatctgaagtgtttcagaaattccttgattttcagcaacttgtagagagggtctttgatcacaagataattgccatacaaactgattggggaggagatgcgggtgtaaatgtgaatgatcatatgtttgattctcctgaacattctaatgtctctattgagcatgcagcagaaaattcagacgaaaacagtgcacaaaatagtgaagaaaatgaagcggcagatcatctagaaattgccgcagaagatcctgacggcgctgactcccagggcgattctcccgctcctcctggtcctgactccatgctgggatcaccgccacagcagtctgtgcagcctgacacaacatctggtggtgatgtcgcccattctagtggcgacatgtcggctgctagcgccagtcgccatcgatacaaggctcgtctagtagcaaagagatttaaacaaagatatggtatagactatgaggacacctttagtcctgttgttaagccagctacaattagaaccattttatctattgttgtctctagaggttggtcacttcgtcaacttgatgttcagaatgcttttcttcatggcttgttagaggaagaagtctatatgaaacaacctcgaggttatgaagataagagtaaacccaatcatatttgtaagcttgataaggctttatatgggctaaagcaagctcctagggtgtggtatgctaggcttagcagcaaattatgtgatcttggttttaaagcatcaaaagctgatatttcattgttcttccaaagtaaaggaggagttaatatgtttgttttaatatatgttgatgatatcattgtggcaagctccacacagaaggcaacagatgctttgttaagtgatttgaagaaggattttgcccttaaggatttgggagatttgcattactttcttggcattgaaaaggttagtgatggaataaatgatgcaacaaagtacagaagtatagttggagctcttcagtatttgaccttgaccaggccagatttaccttttgcagtcaataagatgaagattgggctggatctgttgatgataggaggtctactggaggctttgttgtttacttgggatcaaatctggtatcctggagtgctacaaagcaagctacagtctccaggtccagtacagaagcagaatataaagctgttgctaatgcaacggcagagattatggtgtgataatatgggagctacatacttgttagtaaatcctgtgtttcatgctcgtactaagcatatagaggtagattatcattttgtcagagaaagagttgcaatattacagaacacagcaattaagaagagggtcatcaagtgcaagaggcacccacacatggaaggtggcaagggcatgcatgcattttctagctgcacccatcaggctagagaggaggctcaagccttgatctgtgtggctcaagagagattgaaaaagaaagaggtagaagataggttaccaagtgcaattgaaatagatggctgtgtgtcacccccaaaaaatgctaggggcaaagagctgtgtgcaaatgggggtgacaaacagcaacaatacagttgtatcatgatgaatattctgttttcgaatgtgaggggtttggggaatcctggtagaagagagcagttgacagaaatattaaggaagaataaagtagaggtggtttgtttgcaagaaacaattagagtgagttttgcagccaatgaattggatagattctgtggggggagggactttcactggttaactaaaccggctgagggtcattctgggagtttgttaatgggggttaacttggagatggtggatgtagtggaagttgacctaggggagtttttcataagtatgttggtagaatcaaaaagagagaagaaaagatggaggattgttaatgtatatgggccagttcaaacagataagaaagatagatttctccatgaattgactgagatggtgctggtggagcaagaggctgtaatgatagggggagactacaatttagtaagaagtgctgaggaaaagtctaatagtataatcaacaagagatgggctgccaaatttaatgcttttatttctactgctgaattaagagagttacatagagggggaggcaaatataccaggacaaacaaacaaacaaatccagtgagggaagttctagatagggttttggtgtctgcttcctgggataatctggaccccttcactgttgttggcggtatggcatga

SEQ ID NO: 36473 - DNA, 4681 bp, Oryza sativa
  Clone ID: PAT_MRT4530_40296C.1
atgaagatggcggcaaaggtcctcgatcaggacagcaaactcgatttgctcctgaagaagatggaggacgttgatcgcaagcaggaagcaagtgagaagcgacgggaacaatcagaagagaagagccgcgctgatttcttggccctcaaggtggcggtggaatcccgttttccggaagtggagaagcgtgtggatcttcttcaagaatcagtgttggatttgcaggagcaggtggataaattgcagtctctggtgaaatcttttccggctgcttcaggggatggtaagctaaattcgtcatccttctcccctactacccctaaggatcactctgtttcgctttccgggattttggctgggtctgcgagaatcagtgggaatgttcctcctatgtgctgccctcaatttgatggtgataatcctcaaatgtggaagagtaattgtgaagaatattttgagatttatggtgttcatcctcgcaattgggttcgggtggctggtttaaacttctcgggcaatgctgctttctggttacagtccatgcggcccaaattggtgggggtcacatggcaggaatttacaaaccaagtttgtctccgttttacaaaggacagaaaagaagtacttattcgccaatggtttcatattgctcaggactcgtctgtgtccgaatatgttgaaaaatttgatggcatcatgcatcagttattggcttacagcagttccctgcctctgaattactttgtgaccaagtttgtggaaggtctcaaacctgctattcgatctggtgttttgatgcaaaaaccacaagatctagattctgcttgttctcttgccttgttacaggaggaaattttagaagggtctcaaccaattcagtataagaagactgattattctgttgtttctaagtatacgagcaggcactcctctcccactttgtcaaatccacctgctacagtaccagcaattgatgacaagagaaccagtgttgttttctctaaacccagagatgacaaattgtctgcacttaaagcttatcgacggtctaagagcctttgctttacctgtggtgagagatggggaaaggatcacaagtgcagtacttcagttcagctccatgttgtgcaggaattattggaagtgttacaatctgatgagttgatctctgaaatttctgaagaagagccttcctagcctgacactattcttatggccatctctcaacaggccttatctggtactgaatctcctatttccttcagactcaggggttgggtgcagggtgttgaagttctcatgcttgtagattcgggtagctcgcattcctttattgacaactctctttcccagcaattgcaaggtgtccagcagttacccaaatctgtgtcagtgaaggttgctgatggtggtttactctgttgttctaaatttattccttattgtgattggtgttctcagggtcatgtttttcaatctgaattcaaatttttgcctctggggacctatgatgttatcttaggcatggattggttgatgcaattgggacctatgaatgtagactggactgctaaatggaggatgtttcagaaagctggtaaaagagtgaaactcttgggaattcaggctcagactaatagttgtctgtctattaccggtgagcaactccagggtatgttaaaattgggctctcttatgcatattgttcaactacaagagtctgtttcagtcccagctgtccagatttccccagcaatccaactgcttcttcaagaatttcagtccatttttgaggattcaaaaattgattcctctagttcccaattccaaacatgtctttattcggccttacagaaccaatcctgctcaaaaagatgagatagaaaaacaggttaaggagatgcttctctttggggtcattcagcctagtactagtgcatattcttctcctgctttattagttaagaaaaaagatggtacttggcgcttgtgtattgattacagacaattgaatgctgtcactctcaaaagaaagtttcctatgccagtcatcgatgaattgttggatgagctgtctggttctaagttcttttccaaattggatttaagggctgggtatcatcaaattagattggtggaaggcgaagaatataaaacagcctttcagactcacactggtcattacgagtacagagtgatgtcttttggcctcactggtgcacctgccacattccaaggagctatgaatgccaccctggcttctgtcttgaggagatttgcattggtcttttttgatgacattctcatttacagccctgatttaacttctcatttgaatcatctaagacaagtgttttctcttctgtctgaacatcagtggaaagttaagctctctaagtgcacctttgctcaaaatcagctttcttacttgggtcacattatctctgacaaaggagtcaccactgatcctgccaaggttgaggaggtagtcaattggcaagtgcctacttctctgaagaaattaagagggtttttgggtcttgccggctattataggaaatttgtccgcaattttggacttctaagtaaacctttaactcaattgcttaagaaggatgttccatttatttggtcccctgcagctgatcagacttttcagtctttgaaaatggctttggtgtcagcaccagttcttgcattacctgacttttctcaaccttttactgtggaaacagatgcttgtgatgttggtattggggctgtgttatcccagcagggtcatcctattgcatacattagtaaagcactgggagttaaaaccaggggtctttctacatatgaaaaggaatacttagccatcttactggcagtggatcattggcgttcttacctccagcaaggtgaatttatcatcttaactgatcaccacagtctgatgcatctaaatgagcaacgaattcatactccgtggcagcacaaagcatttaccaagcttctgggacttcagtttaaaatttgttacagaaaaggtagcagtaatgctgcggcagatgcactttctaggaagtattcggaggatacttgtgagttgcatgctgtttctagctgtactcctgtgtggctgcaggaagtgagtgatgggtatctcacagatgctttctcgactcagttgctagctgatttggttctttgttccacttctagacccatgttttctttgtctaatggtattatcaaatacaaagggcgtatctggttgggaaataatatagaactacaacagaaagtcattactgccttacatgccagtcccatgggcggccattccggattcccagtaacctataaaaggattaaagctttgtttgcttggcccaagatgaagcaggtgattaagaatgctatttctggttgttctgtttgtttgcagtccaagcctgacaggtcaaaatatccaggcctgctgcaaccattacctgtccctgaaggtgcttggcaggttttgactatggattttatagagggtcttcctaaatctgggaaattcaactcaatttttgtggttgtggataagttctcgaagtattcccatttcattcctctgtctcaccccttctctgctattgatgtggctcaggcattcatgtgcaatatatacaaactgcatggattgcccagatttattatatctgacagagataggatttttacaagtcaattctgggaacagctgttccctcgatctggtacacagctgcaattgactactgcataccacccacaaaccgatggacaaactgaaagagtcaatcaatgtttggagatctatttgcgctgttttgttcatgccatgccatccaagtggagttcttggttatatttagcagaattttggttcaatacttcttatcattccacattatttaagtctccctttgaagtgctatatggatatcctcctggtcattttggtattcgagaggattcttgctccattcctgatcttcatgcttggttatctgaaaggaaactgatgactcagctcctgaaacagcacctcatcagggctcaacaacaaatgaaagtgtatgctgataagaagagaagcttcagagaatttgttgtaggagattgggtttacttgaagcttcagccttacattcagtcctctgtggcaaggagagctaatcataagctttgctttaagtactttgggccttttcagattcttcataaggttggcaaggtagcttatcagttgcaactccctgccaatagtgcagtccatcctgtattccatgtttcccaactcaagcatgctgttggttttaagcaccaggttcagcctcgattacccaccttgtccacctttcaagtacctgtgtctgtgttggactctcgacaaatcaggaaaggtaacacttctctgactcaagtcttggttcgttggtccgatgatgggtatggtgaagagacttgggaagacctggtggagttgcagcaaaggtttccaaatgcattggcttggggacaagccaaatctcaagaggaggggattgttagcgtcccaggtgtgctacagcctgcagatgagccaagggaggtagctcagacttgtcggacaaggcctgtaagagcgcgtaagagtaatttgtttgtatctgggccggactgggccaaa

SEQ ID NO: 36474 - DNA, 294 bp, Oryza sativa
  Clone ID: PAT_MRT4530_40297C.1
aacaggtgcattataacctgccgggggcctccggaaaacctacctgacgactgaggagctccattcctggaacccaaaggcaactcactacccccttttgcttcgtgcaccggccaactcgatggcgcacatggcaaagagcacctgtgcctcaaaaactacctctactaaagagggcttgttcaacaaaaacaacgaatcctctgctgctcctgtcccatacaaaaagtgcacctgttctggttgttcctccagactacatctactgctgtactgttagaacctcagggggac

SEQ ID NO: 36475 - DNA, 1962 bp, Oryza sativa
  Clone ID: PAT_MRT4530_40298C.1
cccgggctgcaggctcgaaaaagtacacgaaaaagctccccggaagggaagacgacctgctttccggctcggtctgcccccgaactctgccggaacccggctccggcggctcacctcgcctcacctcaccatccgacgagcccccggatcaccggctccgacctgtcgccggcggagagcgccgcgggatccaggcgttgaggttggggagcggggtgtgtgtgccaggcgctcgggcgggggcgagcgggcggcgacgatgccggtggcggcgtcggccatctacttcctcaacctccgaggggacgtcctcatcaaccgcctctaccgcgacgatgtcgggggaaatatggttgatgcattcaggatgcacattatgcaaacaaaagaactgggtacatgccctgttcggcaaataggaggctgttcattcctttacatgaggattagtaatgtctatattgtgatcgtggttagcagcaatgctaatgttgcttgtgctttcaagtttgtcgtggaggcagtggctcttttcaagtcatactttggtggtgcttttgatgaagatgctatcagaaataactttgttttaatctatgagcttcttgatgaaattatggacttcggttaccctcaaaacctctcacctgaaatcttaaaattgtatataactcaagaaggagttcggtcgccattttcctccaagccttcagataagcctgttccgaatgccactctacaagttactggtgctgttggttggagaagagagggtcttatgtacaagaagaacgaggttttcttggacattgttgaaagtgtaaatcttcttatgtcttctaaagggagtgttctacgatgtgatgtgactgggaagattcttatgaagtgcttcctttctggaatgcctgatctgaaattgggattaaatgacaagatcgggcttgaaaaagaagctcaactcaagtccaggcctgcaaagagcggaaagaccattgagcttgatgatgtcacattccaccagtgtgtcaacttgacaagatttaactcagaaaagacagtcagctttgtgccgccagacggtgaatttgaattgatgaaatatcgaatcactgagggtgtaaatctcccattccgggttctaccaacgattaaggaattgggccgaacacgcatggagataaatgttaaagttaagagtgtttttggtgctaagatgtttgcacttggtgttgtcgtcaaagtccctgttccaaaacaaacagcaaagactagtttccaaaccacatctgggaaagccaaatataatgcttcaattgattccctagtgtggaagatcaggaagtttcctggacaaactgaggcaaccatgagtgccgaagttgagctgatttctacaatgggggaaaagaaatcatggaacaggccgccaattcagatggaattccaggttcctatgtttactgcttctgggttacgagttcggttccttaaggtgtgggagaagagcggttacaacaccgttgagtgggttcgctacatcacaagggctggatcatatgagataaggtgttagcgatgaagaaaaaagtcccaggtatttggcacggttatttcaaggattcgcggagctttctttctagtacggcgtcatgaatgatcataaagcatgtatattacatatgacaccactttttctttaagctattactttggcaaagggtagagcagagcagacaaattttcctgggttcttgtaatcgttttgacacgggatatctagtatcccctgagtcttgtttgtgtggtagggcatattttcatttgtatatgagaagatggcggtagcgtttgttcttgttgatcaatatacatatactcattggcagtttgtattgctttcttattaaattgatgggtgaattcacttgcaaaaaaaaaaaaaaaaaaaaaaaaaaaaaa

SEQ ID NO: 36476 - DNA, 648 bp, Oryza sativa
  Clone ID: PAT_MRT4530_40299C.1
atggacatgttgttggagattctgcggctgctcgagtgcccagatgtgatgcgctgtgccgccgtttgcacggcttggcgcgcggcgtaccgcgacttgcgtcgccgtggcattgcagccagccgccagaccccctgcttaatctatagatcggctgctgctggcctgaacgccattggcatgtacagcctttctgaccagaggccctacacgatccccatccctgaccccatcagcgagcagcactggttcggctcctccaacggttggctgataacagctgactgccggtctgacatcatactgctcaaccccatcaccggccgccggatcgctcttcctccggcgaccaccatgcagcatgtcacgctggtcctgaacgaggagggattcttgacaaatccgtcttcagatgatgactgcatcgccatgctcatccatcagccatatgatcagctctcttttgccaaggtcggaggcaatagttggaattggctcgcagtcgattatactttcgttgactgtatctaccatgacggatggttctacgcggtccatgacaaccacatgtccatgtcgtgggaccacatcaaggcgtcccagctcgccggcttcgacgtcgtggtcaacaccttcaccgcgctatag

SEQ ID NO: 36477 - DNA, 479 bp, Oryza sativa
  Clone ID: PAT_MRT4530_4029C.1
gaacaaaccagttgtggctttttattggggcttcttttccttggaccagacccgcccatagtttgcatacttggggcattatttttttgctccccctatactatttctttagggcatcactctaaggcctcgttctccgcctcatttgagaagcctgggtaggtctgttgttgttttttaggagtgaaggcaccgagctcttctccccttttattcttaaggcttggtgcttgctccctcgttttgcggttagcatttgcgatcacttccactggcctggcgcggaatattgagtttttccctgcgtggtggctccccatggagtttgctttggtcttgaatgaaatgttttggcctccttcttgctgtgcttttttcaagaaaacgtatcgttggggattgttcatcaattgacctggacgtaaaaccgccttgaattccgtctttccaaggctactaacgacctgaactcgagcatg

SEQ ID NO: 36478 - DNA, 183 bp, Oryza sativa
  Clone ID: PAT_MRT4530_402C.1
atgtcgacaacatcgagtttgttggttatatatgcagacgagcaacatgcaaggagagatggagatgagagattcagcaccatgtgccacctcccacttggtatgctccatgctcgtctgcctctagcagtctcatcatgccgccactcagaagtcgaaacgctccagttcggagttagataa

SEQ ID NO: 36479 - DNA, 1949 bp, Oryza sativa
  Clone ID: PAT_MRT4530_40300C.1
ttataccacgtgtccacgtgcgtgccagatcaggtaaaggacgcgccgcgcatcgccggcggccgccgtgatctctgcgccatttccggcggccggcacccctgaccccaccacgtccgtctcgctatctgtggtgacctcgttaatttcaaggatttgccgatccagtttccaaaaatgcaatggcacggacaaaacaagggaacatgatacatccttgttggtgtgagtgagtgtgcagactagagagtagttcaagaatacaatggaacgaattcgacgcggtaaatacatattttcatgcttggagcttgttatcttggtacttcttgttgatgatgctactctggaagctccctgtgatttcccaactgtttttccattcgtcatcgcaggcttcaccttgttgcaacgaatgctgttcaagacccttttggcttcatcaacctgacccgttgcaacatttctgatttgcttcttctgtttctcgccgcacgtcggtttgtctcgtccctttccgtcacgacaccttcctatttgctgaactgcggccgtggagttgttctcggtgagcgtctggtgtctttctggatttgcttctttcaacactcctctttcatcagtccttagccgaaatggcttcggattggtagttttcttgagctttcctccttgctctgcgttcagtttgctctgcattttggctaccttccgagggacattctcattgttctccagctgctgcaggttttcaccatcagaatgcgagatgatcaccatttgttcggttggctgatcaacatatgacaaattctccttatcgtcatcacaattgtcagcttgtgatgtctccacctcaattctggattcctgcatcacctccttcggttcctcgctggagctcgcagcttctggacaagcattctcatctgcagctgtgttctcacggccatttctgttctctctaccagcttcagaactggcatgttgcaacgagcagcctagaatcttcttcttcttcctctcatccggcctggaattttgagctgccttgacactcttcactgcagtctggtcgcatttcttggaactcttcggattcgatgactgacagaggtatctgctaggcacctcccggcacgccaaattcagcttcctcatcttggagcagacctcggacagcggcggcgccgcctgggccttcgccggcgtcttgctggcgtccttcttcggcgtggccatgaacagagctttcgcgacggtccccttcctcgccgccgccgcgacgggctcctgcttctggtgcttcacgctgaggaacggatcctgcctcggccggacgggcttgctcctcggcgtcgtcagggctttcttcctcgcgccggaggcctccaccttcgccgccttggtccgggtcggagacgcccgcagggtgcaaatccggtgggtcttcagcctgggcttcgccgcggcctccgtcgccgtgcttagcctcgcgatccgtgaccttggaggcttcggcggcgcggagtgcgggcatttcagcatcgagctctggttcctcctcctgatcgccttctgcagccgcacgttggggctcctcgctgccatgacccgcatgaagaagctcctgtgcagcgcctccgggtcgacatgctcgtggttctggtcacaaccgatgcggaggcagaaccaggaggggtcgtcggaggggcgggcggcgtcgggggcggtgaggtcgacgaacttgggcgcctcgatgtcctcgtagaacacgcggtcgtactcctcctcctcctcctcctcgccgtcgtcctccgctccccgcgccatgtcgcgcttcgagctcgggatctccatgaccatctcgctgtccgtccgtggggggaggattggatcgcttcgagctcggatctccatgacatctcgctgtccgatggtggggggca

SEQ ID NO: 36480 - DNA, 564 bp, Oryza sativa
  Clone ID: PAT_MRT4530_40301C.1
atggccagctggtcggtgaagacgtggacgcccatgaacggtggcgtgaccaaccaaccgcgaaaacaccagtcggcggcggcgaaggctagccggtcggtgaagatgtggacgcccatgaacggtggcgtgaccaaccaacccggcataataggccagccgtgcaagcggaaacaccagtcgacggcggcgaaggccagctggtcggtgaagacgtggatgcccatgaacggtgatgtgaccatcaaaccgcagaaacaccagtcggcggcggcgaaggccaaccggtcggtgaagacgtggatgcccatgaacggtgatgtgaccatcaaaccgaataggcaaaagcaccagtcggcggcggtgaggcagccagtcagtgatggagtacaggcgatgcacgacgtcgtcatcggaggtagccggcagatctcattaatagaagatcacgcggacaccgacatgaaggccctctcaatgagaggattacaagatagaaaccttaaccaatatggtatcggcttcctaaatctactttacaatcttatcaaatcaggactttag

SEQ ID NO: 36481 - DNA, 986 bp, Oryza sativa
  Clone ID: PAT_MRT4530_40302C.1
ccggtccaagaaccagcctccccctcctcctccccccacccctcacctctccttctcctctctcacccccaaattagcctcccacacttcacccacaccctattcctggacctccacctccccccacccctcaatgccaatccctccccctccttcctcccctcctccttccccgcgccctccccctctaccacctcccggcacgccaaattcagcttcctcatcttggagcagacctcggacagcggcggcgccgcctgggccttcgccggcgtcttgctggcgtccttcttcggcgtggccatgaacagagctttcgcgacggtccccttcctcgccgccgccgcgacgggctcctgcttctggtgcttcacgctgaggaacggatcctgcctcggccggacgggcttgctcctcggcgtcgtcagggctttcttcctcgcgccggaggcctccaccttcgccgccttggtccgggtcggagacgcccgcagggtgcaaatccggtgggtcttcagcctgggcttcgccgcggcctccgtcgccatcggaaattctacctctggttcctcctcctgatcgccttctgcagccgcacgttggggctcctcgctgccatgacctgccaccattaaaaaccacaaggattacaacctcccctaccacgaaatcgcgcgcataccaggaagaagcagcgcgcacccgcatgaagaagctcctgtgcagcgcctccgggtcgacatgctcctcctcctcctcctcctcctcgccgtcgtcctccgctccccgcgccatgtcgcgcttcgagctcgggatctccatgaccatctcgctgtccgatgaagcccaggattccaggcttccagtctcctcggcttccagcctcctggtccagcgcgggcggcctcaccccgctccgctgtgccgccaaaattttcccacccaagtgtggggatcggaggcttgcgaaggggcggaggcggagg

SEQ ID NO: 36482 - DNA, 574 bp, Oryza sativa
  Clone ID: PAT_MRT4530_40303C.1
gggaaatcagatgccgatctgaattttctcctgggttgggcctcttcttcttccctgatttttctttcaggttacaaaataatctaaatgatgatgtttttacagagaaaaaaatttcactcaacataccaatggcacggacaaaacaagggaacatgatacatccttgttggtgtgagtgagtgtgcagactagagagtagttcaagaatacaatggaacgaattcgacgcggtaaatacatattttcatgcttggagctgacaataaaacatttgtcacttcagttaagcagcagctgcttgtagcctggatagtttcaccgatgtactcttctcttttccaaccttagaaggtgccatggagccacttgttatcttggtacttcttgttgatgatgctactctggaagctccctgtgatttcccaactgtttttccattcgtcatcgcaggcttcaccttgttgcaacgaatgctgttcaagacccttttggcttcatcaacctgacccggtgcaacatttctgatttgcttcttctgtttctcgccgcacgtcggttttctcgtcccttt

SEQ ID NO: 36483 - DNA, 243 bp, Oryza sativa
  Clone ID: PAT_MRT4530_40304C.1
ggcacgagccgaagattagcagctacgtcattgggtgtgaccccattattccggaccacaacgtcactgtctgggcagctggttctccgagcatcgtttacgttgtgcaaggacggtccaatctacagcctcaagaatctcagatgcttgcacttgataggctgcttctagaagcccatagaaaagcgttataaaaaggaggtgatacagctctaagccacgagacgatctttctaagttaca

SEQ ID NO: 36484 - DNA, 2506 bp, Oryza sativa
  Clone ID: PAT_MRT4530_40305C.1
atggcgccgtggagcggcttatggggcgggaagttggccgccggcggcggcggcggcggcggcgaccactaccggggcacgccggtggtggtcaagatggagaaccccaactggtccatctccgagatctcctcgccggatgacgacgacgacgaggacttcttggtcggcggccgccgcaagggggggcgcggcaagaacgccaagcagatcacctgggtgctgctgctcaaggcgcaccgcgccgccgggtgcctcgcgtcgctggcctccgcggccgtcgcgctcggcgccgccgccaggcggagggtcgccgccgggaggacggacgccgacgcctccgccgccgccgccgccggcgagagccccgtgctccgctcccgcttctacgcgttcatcagggcattcgtcgtcctctcggtgctcctcctcatcgttgagctcggcgcctacatcaatggctgggacgacctcgccgcctccgcgctcgccctccccgtcatcggcgtcgagtcgctctacgcgtcgtggctgcgcttccgcgccacctatgtcgcgccattcatccagttcctcaccgacgcatgcgtcgtgctcttcctcatccagagcgccgaccgcctcatccagtgcctcggctgcttctacatccatctcaagcgcatcaagcctaaccccaagtcaccggcattgcccgacgccgaagaccccgacgccgcgtactaccccatggtactcgtgcagataccaatgtgcaacgagaaggaggtttatcagcaatcaattgcggccgtgtgcaatcttgattggccgaggtccaacttcttggttcaggtattggatgattcggacgatccgacgacgcagacactgatcagagaagaggtgctcaagtggcagcagaacggcgctcggattgtgtaccggcatcgtgtccttagggatggttataaggctggaaatctcaagtcggcgatgagctgcagctatgtcaaggactatgagtttgttgccatctttgatgcggacttccaaccgaatccggacttcttgaagcgaaccgtgccacatttcaaggacaatgatgaattggggctagtgcaagcaagatggtcatttgtgaataaggatgagaacctattgactcgtctgcaaaacattaatctttgcttccactttgaggtagaacagcaagtgaatgggatattcctaaacttcttcgggttcaatggcactgctggtgtgtggagaatcaaggcattggatgactcgggagggtggatggagcgtacaacagtggaggacatggacattgcagtccgggcacaccttaggggctggaaatttatcttcctgaatgacgtcgagtgccaatgtgaattgccagagtcatacgaagcttataggaagcagcagcatcggtggcattctggtccaatgcagctattcagactctgcttaccagacattatcaaatgcaagattgtgttttggaagaaagccaacttgatcttccttttcttccttctccggaagctcatactaccattctactctttcacgctcttctgcatcatcctcccaatgacgatgtttgtgcctgaagccgagcttcctgactgggtcgtatgctacattcctgccctgatgtccttgctcaacatcctgccttctccgaagtctttccctttcatcatcccatacctacttttcgagaacaccatgtccgtgacaaaattcaatgccatgatctctggtctgttccagcttggaaatgcatacgagtgggtggtgaccaagaagtcaggccgatcatcggagggcgacctcatttctttggcacccaaagagttgaaacaccaaaaaactgaatcggcgcctaacctcgacgctattgcaaaggagcagtccgctcctagaaaggacgtaaagaagaagcacaaccggatatacaagaaagagcttgcactctcattgctcctcctaaccgctgcagctcgcagtttgctctcgaaacagggtatacatttctacttcctcctgttccagggcatatctttcttgttagtaggccttgatctcataggcgagcagattgagtaaactgtgaaaagcatgatagatgttaaaaaaacagtgacaatggagggtgctccagggatgttgtgtcgaagctctttggcgatattgaaatgttgcatgacgcaattgtgtcgtccaattgatttatgtcacgacttcacacaacatgatccacaatgtacacgcccaaataggcccctcccccctcggttgtgtagatatagttgttcttggactgtaaatttgcctagttattccaagactatccgattcttttgtaaaccaattttggtgttcatgtggggattttatgttaggaggcaattactgcctgtacgagtgattcggaatccacaatgcccttaattagaagccattccttccttatgtgtctaaaaaaaaaaaaaaaaaaaaaaaaaaaaaa

SEQ ID NO: 36485 - DNA, 427 bp, Oryza sativa
  Clone ID: PAT_MRT4530_40306C.1
aaggaaacaaactcccatccgtttccgtttgggctgattaggactttgtttctgtttaggccgaataggacttgggttgaattataccaaggcctattcgggtagcatcaccaggagaacaagggcatatatacatacataggataaaaaatcacagcacataacaaagaattacatgccgccttatagcacttagcactgggtaaaagacaaaacaacacataactttccctcagtccaaagggtggcaccgagagttccgcgcctatgtcgatcccaggtaatccaacaactccgttgtatgcattttacatattactctgttgggtagttaataatactacatattacctgtagtgagtattttgcaccagcagtgtcaaatccttgggcgtgcctaattcggcacgaggcctcgtgcttctgg

SEQ ID NO: 36486 - DNA, 315 bp, Oryza sativa
  Clone ID: PAT_MRT4530_40307C.1
gaccaatagaaattccttttttacttgtatttgtttaccggttggtggttccaaagggccaacccccttattaaaaaaacccctggcccccgttaattgggcaatgggttaaccctggaggccttacctctggtttttttttaaaatggtaaaccgggagggccattttggccgtccgttgaaccaaaaccccagcttgcccttgaccaaacccaatattcccgccaattaattaagggcccgggaattggggcaagcttaacaacttccttattggaaaccttgattggggagggtggttatccttcccccctt

SEQ ID NO: 36487 - DNA, 476 bp, Oryza sativa
  unsure (1)..(476): unsure at all n locations
  Clone ID: PAT_MRT4530_40308C.1
gtggtagcataacttttcactttgggctaggtggtattaccataaattcacttaacgctagtggcccatatgtcagtcaatgtccgtaacccttatctctctcgaacactggtggccaacaattaacagatactcaacctaatcatagctacccatcatcaacttctctcctgaagcagcttgttggatggaggtttagcttgagagattgcaggactaggagggttgagcttgatgcagtgacgggtgtgggcgagatcgaccgagtggcctgagctgacaaaggtcgagctcaaacttgagctccaatgcacaagcagggattggaggaggtcaagctagattggtggcacgatcttgatggtctgctcaccgccgatggtgaagttcagtgcggagcaacgctcaatgcagctccagtgcaagggcgagcttgatgcantgtanggcaggggcttgatcaccggccagcggca

SEQ ID NO: 36488 - DNA, 614 bp, Oryza sativa
  Clone ID: PAT_MRT4530_40309C.1
atgccggcagcggcgacactttctgatctggcagtgccggctacgccggcgccggcgccggtgccggcggcgtgcccgagcaagtgcggcaacgtggagatcccctacccattcggcatcggcgtcgactgcgcctggccgggcttcaccatcaaatgcaaccatagctttagccctcccaggccgtacacgggcaccatagagatcaaggacatctcgctggaggcaggggagatgcgcgtctacactcatgtggcccaccaatgctacgactcatcacaccacgaggagcacgtctccacgcggttgaagctccatggcaaatctcgcttgtcgcggaaaaggaacgagttcacggcgatcggctgcaacacggtagcgtttctgattggcaggaagaaagggagctactcgaccggatgcatctcgacgtgcgcgagcttggataaggccgcccacgacggtgacccatgtacggggctgggttgctgccaggtgccttccatcccgcccaaccttagtgtcttaaatatttcctggggtgacggcttcgacgacgacctcgtgcgggcagacagcccctgcagctacgccttcgttgccgagaaaggctg

SEQ ID NO: 36489 - DNA, 145 bp, Oryza sativa
  Clone ID: PAT_MRT4530_4030C.1
gcagcaactgacagatatttgtattaaaggggatagcaacgttaagagtctacagaatatgggaacatcagaaatacaaaaccaccggttccagcctttgagcatggtacctatacaaacgatcacaaacccaaaagcgtaaaca

SEQ ID NO: 36490 - DNA, 2565 bp, Oryza sativa
  Clone ID: PAT_MRT4530_40310C.1
atgacatcgacagccttcaccgccccgcaagccaacaccagtctcaaagctcaagccgaatctgacatgggggccatgaatcagaatatggctaaacttcaagacacgcttcgccagatgcaagagcagcagcaagcgtacgaagcagcaaggcaagcaaaggcccacacccagcagttctacgctcagccccaagtcgttcctccatacgctgcacaagcaccggtgtacttcgccaagcctgcccaagttgtcgccgtgcgtctgactccacaagtgacctcggagccgaacttcgcctttggccctggccgagggaagcccaagtcagggtgcaccagtgggacagctgttgggccagttcgccgaaccaagtcaagctcaaggggcttcgcctcaaggccaaccgccacagttcgacccaagcacaccggcccaagcacccatgactttcgcacaagccgtacccccacggtatggtgcagccccaccactaaatcaagcctagaatcaagccatgttcgacccaacagtggtaatgcaagctacttcgacagatcagcaaaaccaagcaatgaagttcggcacggggcatcaatcgacacccacagcccaacctcatgtacaagctgtggcttcaccgttcgcgcccccatacccatagttgaattggccctctcagcaaggggccatggcacctacgaggagccgaaaacacagcaagaccttctcggcattcgccaaaggccgggagaatcgacaagggaatacatacgtcgcttttcgcaagcacggtgccaagtgcaagacataactgaagcttctgtcatcaacgttgcttcggccggcttgctcgtgggagaactcacgggaaaacttgcacgcaaggagccaaggacgatcgaacacctctttcgcacaattgatggatacgctcgaggtgaagaagacaccaagcgaagacaagagatacaagctgaatatgacaaggcgacttcagccgcagccgccaccgcacaggacaacgctcaagctcaggtccaagcccaagttgtaagatcggcgcccgtcctggttcaccctaccactccggcgaaccaaggacaacatccaagtccgaaccaagcctcgatgacatggaagaaattcaggaccgatcgagctggcaaggcaatgatggcggtcgaagaagtgaccgacttcgctcagaggatccggaggcgaagcagtgcaagtcttgagacaggacctaaagtcgctttcggcacacaagagaacaaaagagaagaggagatactcttcgacattgttgacatcccatacaactacaacgccatctttggcaagggcactttgaccaagttcgaagcagtctctcatcacaactacctcgagctcaagatacctggcctagctggcgtgatagttgtcaaagttgtccaactacagatagatgattccgaccccacgaaagttatatcactcggtggagaccaaagcgaacaagaagtgaatagcatcctggtcgcgctcaagaagaacatggatatcttcgcttggggaccaaatgaagtggggggcatttcgccagatctcatcatgcaccatatcgcagtcaagcctgacggaaagccgaagaagcagaagttgaggaaaatatcggcagatcgccaagaggcgacgaaagcgaaggtgaacaaactgcgaaaggcaggggtgatacaagagatcgaccacccaaagtggttagcaaacccagtgttggtgaagaagtcgaacgacaagtggcgaatgtgcgtcggatctcaacaagatgtgcccgaaggacgatttccccctgccacggatcgactagcaagtcgattcgaccgccgagtaatgcctttcggtctgagaaatgcaggggctacgttcgccaggctggtatacaaggtctttggatcccaattggggcgaaacgtcgaggcctatgttgatgacattgttgtgaaaagtcacaaggtcttcgaccatgcatcagacttgcaagaaacttttgacaacctccgtgcagctggcatgaagctgaatccagagaagtgcgtgttcggcgttcgcgctgcgaacaccaaaaagatcgatgccattcagcaaatgaagccaccatcgagtatacgacaattacaaaagctcgcggggcgaattgcggcactcagtcgattcttgtcaaagatggctgaaaggggcttgccattcttcaagacccttcgaggggcaggaaagttcagttggacacctgagtgccaagtagccttcgatgaacttaagcagtatctccaaagtcctccagctttggtcagcccagcggcaggaaacgaactgtggctctatctagcagcttcgctcgtcgctgtcagcgcagctttagtgcaagaaaccgaagcaggccaaaaaccagtatacttcatctccgaagccctccagggggcaaaaatcagatacattgaaatggaaaaacttgcttatgccctagtgatggcttcaagaaagctcaaacactacttacaagcccacagaatcgtgtaa

SEQ ID NO: 36491 - DNA, 1562 bp, Oryza sativa
  Clone ID: PAT_MRT4530_40311C.1
gcacgaggccccaatcgccgcgccgcactgcgactgcgattctcccaatccccggtggatatcgatcggattcagatgaacactcgattccggcggccggaggtaaatccggagtcgattttttcgcaaatcgcaggtactctacgcaatttttgttcctaatccccaaatccccaattgccgcactgctactgcgccgcgtctcgccggccgatttggatggctgcgggtgggacgcaagcaatgaggcagttcgtctatctggtggtgaagggctgctacgatcgccgcctgcggtgttgtcgcgacagctacatggcggacaccttccacatgcgccgcatcaacgtgtcccgcttcttcttctaccccgaaccgccgccgccgccgccgctggcgatggtcgtcgacgctcggctgcctcgcccctgcatcaccttctgcgccccctgggtcatgcacttcatgctgctgggccgcaacagcgacaaggtgctcgccgtcgaccacaagggccgcaccaccatgtacgaccccgccgccaacaccatccgcgccgcgcccaccctcgcccaccccaagagactccccgccatctccctccccattggtgacgacctctacatcctcgacccgacctcctccgaccaccgctgcttcgaggccctcgtctacaagcccggcggccccgcccacgactgggtcaccacccgtggccccatcgaccggtacaacgactggcactgccaatctctcccgccgccgccctaccatccctactcctgcagcttcgtcggcgcaaacggagccatcggcggctatgcggtggtcggcggtggcggcgactcagcagagatctgggtgtcaaccaacgacggcagcggcagcggcaccttctctttcgacacggcgcggcgcgcctggaccaagcacggagactggacgctcccattccgtggcctcgccgagtacgtccccgagtacaacctctggttcgccctctcctccggctccaacaacaaccatctctgcgcattcgatctcgccggcgcagccgagccgccggcgacgcgcgatttctgccaagaactcaagccacccaaggactggaagctggtgtcatcccatctggtgcacctgggatccggcaggttctgcatcgcaagattcttcgaaaagccggtcaagattccagtgtgctgcgtctgcgacatggatacgcagacgtacggcgtcttcaccggcgtggaggtgaagaagccgggaagaggcctacggctacggatggtcaagcacagatcagaatgttatcgcttcgatgaccacattaaggaatgggtgctgtaatatttatctagtcttttttagaaagatttgtgcaaatagatgaactcagtagcattggatatgctggtgcttcaacaccttgaacactagcacaactttttatctctatcaagttttagaggagaactcatctgtaccttttcctgacaaacaagaagattttttattttaaaaaaaaaaaaaaaaaaaaaaaaaaaaaaaaaaaaaaaaaaaaa

SEQ ID NO: 36492 - DNA, 1785 bp, Oryza sativa
  Clone ID: PAT_MRT4530_40312C.1
atgtatccgcctctggttctggtccttgcaatcttcttcgccgtggccactgccatagcggccttgtcgagtcccctcccgcacccactcgacccactttctcccacggagctcacggcggtaaggtccgccgtcctcgccttctctctcgtcgcttcccgcccgatatcctttcactatgtcggcctcgatgagccggagaagcccgatgtcctctctcacaccaacgccgccgccgccgccatcctcccacgccgcgcgtttgtgatcgcccgagccggcggcctctcccatgagttttacgtcgatgtcaccaacacctccgctccccgtgtggtttcgcatggtattcacgatggccctggcttcccaatgttcacgaccgaggagcaggtggcggcgggacagctttcacgcgagtaccctcccttcagggaatccttgcagcgacgtgggctggccttgaccaatgtggggtgcggggtgttctccatgggatggtttggaaagaatgaggcgaggcggttggcgaaggtgcagtgcttcattgttgcaggcggcaccgccaattactatgcgcggccactggaaggcgtgacgctgctggtggatgtcgagaaactggttatcgttgcgtatagagatagggcagcgtactcggtgcccaaagctgaggggaccgactaccgcgccggcaaggctaggccaccgttcaacggagcggtgccggcgcctggcgtcgtggtgcagccggagggcaagggcttccacatagacgatcatattgtcaggtgggccaactgggagttccacgtgggttttgacatgcgagccggcacagtcatctctatggcttctgtccacgacgctgatgccgacctatggcggcgggttctctaccgcggtttcgcctcggagatcttcgtgccatatatggacccggaggaggagtggtacttccacacattcatggacgccggtgagtacggccttggcgtctcggctgtcccgctgcagcctgaggctgattacccagccaacgccgcctacatggatggttattacgtcgacgcggacggcaagccggtgaagtcggagaacatcatctgtgtgttcgagcggtacgccggcgatattgcatggcgccacaccggggtcgcgggaccaatcgcaccgatcacggaggtccggccagacgtgaccttggtggtgaggatggtggtgacggttggaaattatgactacacattggactgggagttcaaaaccgttggctccatcaagaccgtggtgtcccttagtggtatcttggagatgaaggcgacgaattacacacatgtcgaccagattagagatgacatacatggcacgctgattgccgagaacaccgtcggtgtctaccatgaccacttcattacctaccaccttgaccttgacattgatggtaccaagaactctttcatcaaaaataccatcattccaaaacgcaacacgggcgttcgtgcaaccggcggtgctcccacaccaaggagctactggacggtactctatgaggtggccgaaactgaggctgaaggccaggtgaacattaatggcgcacctgctgatctcctcttcgttaacccaagcaagaagacaaaagttggcaatgaggtcggttaccggctcattccagccggtgcgacggcaacatcattgttggccaacaacgactacccacagcgccgagcaagctacactaagaaacaggtgtgggttacgccatataacaagtcggagaagtag

SEQ ID NO: 36493 - DNA, 2513 bp, Oryza sativa
  Clone ID: PAT_MRT4530_40313C.1
gcataggcccctcactggaggagaagcagtggataagaaggagtccgcaacaggggtgcccacccgatggtggtgcagcagggaagttggcaccgggttcgcagccggggacgcgtccaccgggcgcggcaaaacgcgcggcagatcaagtgggtgctgctgctcaaggcgcaccgcgccgcggggcggctcacgggcgccgcgtccgccgcgctcgccgtcgcgtccgcggcgaggcgcagggtggcgtccgggcggaccgacgccgacgccgcgccgggggagagcacggcgctgcgggcgcgctcctacggctgcatccgggtgtccctcgtcctgtctctgctgctgctcgccgtcgaggtcgccgcctacctccaggggtggcacctcgaggaggtggcgtcgctcctcgccgtcgacggcctcttcgccgcctcctacgccgggtggatgcgcctccgcctcgactacctcgcgccgccgctccagttcctcaccaacgcctgcgtcgccctcttcatggtccagagcatcgaccgcctcgtcctctgcctcggctgcttctggatcaggttcaagggcatcaagcccgtgccgcaggccgccgccgccggcaagccggacgtcgaggctggcgccggcgactaccccatggtgctcgtccagatgcccatgtgcaacgagagagaggtgtaccagcaatccattggggcagtttgcaacctggactggccaaagtcaaacttcttggtgcaggtgttggacgattctgatgatgctaccacttctgcgctgatcaaggaggaggtggagaaatggcagcgggagggcgtgcgcatcatataccggcaccgggtgatccgggatggctacaaggctggaaaccttaaatcagccatgaattgcagttatgtgaaggattatgagtttgttgtcatatttgatgccgatttccaaccacaagccgatttcctgaagcgaaccgtgccacatttcaaggggaaggatgacgttgggttggttcaggcaagatggtctttcgtaaacaaggatgagaacctgctgactagactacagaacgtaaatttgtgcttccactttgaggtggagcagcaggtgaatggtgcattcctcaacttctttggattcaatggaactgccggagtttggagaattaaggcgcttgaggattcggggggctggatggagagaacaacagtggaggacatggatattgctgtccgagcacatcttaagggatggaagtttgtcttcctgaatgatgttgagtgtcaatgtgagttgccagaatcatatgaagcgtacagaaagcagcaacacaggtggcactcaggtcccatgcaattgttcagactctgctttgtggacattataaaatctaagattgggttctggaagaagttcaacctcatattccttttcttcctcctccgcaagctcatcctacccttctattcattcacacttttctgtgtcatccttcccatgacaatgtttgttcctgaagctgagctccctgcctgggttgtatgctacattccagctacaatgtccatcctgaacatcctcccagccccaaaatctttcccattcattgtcccataccttcttttcgagaacactatgtccgtaaccaagttcaatgccatgatttctggattgttccagctcgggagtgcctatgagtgggttgtcaccaagaaatcaggtcgttcttcggagggcgatcttgttgggctagttgagaaacactccaagcagcaaagagtaggatctgctcccaatcttgacgcgctaacaaaggaggagtcgaatcctaaaaaggactccaagaagaagaagcacaataggatctacaggaaggaactggcactttccttcctcttgttaacggcagcagctcgcagtttgctatctgctcagggaatccatttctactttcttctgttccaaggggtctcattcttggttgttggtctcgacctaattggtgagcaagtggagtgatagaagatgaagagtttaatggggttcttttttgtttgaaagaaaacactttgcaagcatcaaagggctctttgtaaagggaagagtgatgcaaatgttcgatgcttacacatggaagctttgatccctattctaggggtcaagattcatcacatatactgaactgtggagatgtagatagatatagtttggattaagcctgtgggatgcttttattccttcaggcaattcttttgtaagaatcttttgtgcctagatgggttcttcttctctcttaacaaactttaccttcaaatgaagataatacatgtttctaccatgtactttgatcgattaccttgggtatccatatgaatgtcagattgtccttttttttcaatcaatacaacaccttttgctgcaaagatagtaatgagaaacccagcaaaaaaaaaaaaaaaaaaaaaaaaaaaaaaaaaaaggaggggggcctgcagcccggg

SEQ ID NO: 36494 - DNA, 276 bp, Oryza sativa
  Clone ID: PAT_MRT4530_40314C.1
atggctgaagcattgctacttgctagagaagagttgtataaatggggtttggcaagggctaagggcattcttgcccttgtgccgaacactgaatactctcctgtttgttcgagaaaaacaattgaatttgacataaacatccaaatctctaacaataccacgttctcgattgctcataggaatgagtaccttcgtggtttggttgattgttctccatcaaaatcactaaccttttctgaagttggtgtactggacgctgaggcgcaacgttcttga

SEQ ID NO: 36495 - DNA, 1061 bp, Oryza sativa
  Clone ID: PAT_MRT4530_40315C.1
tggccgccggcgaacacctcgccgccgtttactctctctctctctggctgcagcggacgacgagaacatgcaaggaggaggcggcgtgagctgcgcggtggccggggacgcgccgtcgtcgacgagggggggaggcggcggagggatgctggggttgacgctgttcgacccgccgggaggggagcagccggcggagaggatcgggaggctggtgcgggagagccccgtggtgatcttcgcgaggagggggtgctgcatgtgccacgtcatgcgccgcctcctggccgccgtgggggcgcacgccaccgtcatcgagctcgacgaggccgccgaggaggccgcggcgtccgcggccgccgccgccgccgtcccggcgctcttcgtcggcggcgccccagtcggcggcctcgacggcctcatgggcctccacctcagcggccgcctcgtcccccgcctcagggaggtcggcgccctctgcggctagctctctctctctctctctctcgctcgctcgctcgcttcttcccacctcgccgccggccatggccgccgccgccgccgccgctagctcaatcctgtccatgtagttgagtagatacacagcccacgttacgtacgtaatttcagtcaaggagagggggttggctgcaaaaatacatcggtgaataacaacacagcttggtagtgtactgagccgagaggggtggactgggatgagaaggttagttaaagtggagggccttgacagaaatgtctggatctaaatgtaattaatactttttttccttttattacagctgttaattcatctcctctgtagtagcaaattctcatgtttgctcgcttgttactgcactttaattaccctgtaagtatttttggtcattatctttcatgtataaataacatatataccatcccttttttccagcttaatgaatcttgatttttcataaaaaaaaaaaaaaaaaaaaaaaaaaaaaaaaaaaaaactcgagactagttctctccctcgtgccgaattcggcacgaggcctcgtgccgaattcctgcagcccggg

SEQ ID NO: 36496 - DNA, 842 bp, Oryza sativa
  Clone ID: PAT_MRT4530_40316C.1
atgtagaggagagaagtgaggagagagatgatgagccacccctaaatcaagaggcaacctccacacaaatttcaagaaggatgtaagagtattagatatattaatatttgtatactagatgtgatacattatatgagttgcctcttagtttatgattgaataaaatagataaatttagaggtgatagtcacatctaccatagcacttgcccttaggtactactagtagtagtcggggcaatcaggcatggtggtcatgcccttttgttctgtacttgtcagtttcatttaatatgatatttcgattaccaggtaatatagtagaagtagtaatatgttggtttataataaattactgcaagggttgtcaaaaaatattacgggttaacatgtcaagtttctttaaaagaggaatactatagtaaggtatcatgtttggaaccgtatctccgaggtatcaaccgatattctatcatgtatcaaacgatacctttgagttatcatcccgtattttctttgtacaaacttatgattggtgttcatatagtatttttctaaacatcgttgtgaacatttccttaattagaaacgtgaatggtgataatattcagtttctaggcaaaaaaaacggcggaaatggttatctctttttttttcttagactagactttacaattatctgtttttttttcatagcaaggggctttacagttccaattgtaatatttcttcgttttaagctttttcttgtgtatatttttgcgtgtgctaatggtgtgcttaacagatatatatagtacctataatgtcaattcgatcgaaaaaaaaaaaaaaaaaaaaaaa

SEQ ID NO: 36497 - DNA, 1662 bp, Oryza sativa
  Clone ID: PAT_MRT4530_40317C.1
atggatactggctgcctgtcatctatgaacataactggaaccagccaagcaagatcttttgcgggacaacttcctactcataggtgcttcgcaagtagcagcatccaagcactgaaaagtagtcagcatgttgtttgccaggactttccaagacctccactagaaaacacaataaactttttggaagctggacaactatcttcatttttcagaaacagtgaacaacccactaaaccattacaggtcgtgattgctggagcaggattagctggtttatcaacggcaaaatatctggcagatgctggtcataaacccatattgcttgaggcaagggatgttttgggtggaaagatagctgcttggaaggatgaagatggagattggtatgaaactgggcttcatatcttttttggagcttatcccaacatacagaacttgtttggcgagcttggtattaatgatcggttgcaatggaaggaacactccatgatatttgccatgccaaacaagccaggagaattcagccggtttgattttcctgaaacattgcctgcacccttaaatggaatatgggccatactaagaaacaatgaaatgctaacttggccagagaaggtgaagtttgctcttggacttttgccagcaatggttggtggccaagcttatgttgaagctcaagatggttttactgtttctgagtggatgaaaaagcagggtgttcctgatcgagtgaacgatgaggttttcattgcaatgtcaaaggcacttaatttcataaatcctgatgagttatccatgcagtgcattctgattgctttaaaccgatttcttcaggagaagcatggttctaagatggcattcttggatggtaatcctcctgaaaggttatgcatgcctattgttgaccatgttcgctctttgggtggtgaggttcggctgaattctcgtattcagaaaatagaacttaatcctgatggaacagtgaaacactttgcacttactgatggaactcaaataactggagatgcttatgtttttgcaacaccagttgatatcttgaagcttcttgtacctcaagagtggaaagaaatatcttatttcaagaagctggagaagttggtgggagttcctgttataaatgttcatatatggtttgatagaaaactgaagaacacatatgaccaccttcttttcagcaggagttcacttttaagtgtttatgcggacatgtcagtaacttgcaaggaatactatgatccaaaccgttcaatgctggagttggtctttgctcctgcagaggaatgggttggacggagtgacactgaaatcatcgaagcaactatgcaagagctagccaagctatttcctgatgaaattgctgctgatcagagtaaagcaaagattctgaagtatcatgttgtgaagacaccaagatctgtttacaagactatcccggactgtgaaccttgccgacctctgcaaagatcaccgattgaagggttctatctagctggtgactacacaaagcagaaatatttggcttcgatggagggtgcagttctatctgggaagctttgtgctcagtctgtagtggaggattataaaatgctatctcgtaggagcctgaaaagtctgcagtctgaagttcctgttgcctcctag

SEQ ID NO: 36498 - DNA, 422 bp, Oryza sativa
  Clone ID: PAT_MRT4530_40318C.1
acgctcttgcgtgcttatttgtcaaatcagatctgaatataattttaggagttgcttcagcatggatactggctgcctgtcatctatgaacataactggaaccagccaagcaagatctttgcgggacaacttcctactcataggttgtttgccaggcctttccaagccctccactagaaaaccaataacctttttggaagctggacaactatcttcatttttcagaaacagtgaacaacccactaaaccattacaggtcgtgattgctggagcaggattagctggtttatcaacggcaaaatatctggcagatgctggtcataaacccatattgcttgaggcaagggatgttttgggtggaaagatagctgcttggaaggatgaagatggagattggtatgaaactgggcttcatatctttt

SEQ ID NO: 36499 - DNA, 2263 bp, Oryza sativa
  Clone ID: PAT_MRT4530_40319C.1
catcttccacaatcctcacccccgcctcccctttgtccctttcccaccgccccaaaaacccaccccctccctgactcctccccccgcagcttccgccgtccgcctccgctcccacgtcgccgcccgctcgtcgtcgccgccgacgctcttgcgtgcttatttgtcaaatcagatctgaatataattttaggagttgcttcagcatggatactggctgcctgtcatctatgaacataactggaacagcatcagcaagatcttttgcgggacaacttcctactcataggtgcttcgcaagtagcagcatccaagcactgaaaagtagtcagcatgtgagctttggagtgaaatctcttgtcttaaggaataaaggaaaaagattccgtcggaggctcggtgctctacaggttgtttgccaggactttccaagacctccactagaaaacacaataaactttttggaagctggacaactatcttcatttttcagaaacagtgaacaacccactaaaccattacaggtcgtgattgctggagcaggattagctggtttatcaacggcaaaatatctggcagatgctggtcataaacccatattgcttgaggcaagggatgttttgggtggaaagatagctgcttggaaggatgaagatggagattggtatgaaactgggcttcatatcttttttggagcttatcccaacatacagaacttgtttggcgagcttggtattaatgatcggttgcaatggaaggaacactccatgatatttgccatgccaaacaagccaggagaattcagccggtttgattttcctgaaacattgcctgcacccttaaatggaatatgggccatactaagaaacaatgaaatgctaacttggccagagaaggtgaagtttgctcttggacttttgccagcaatggttggtggccaagcttatgttgaagctcaagatggttttactgtttctgagtggatgaaaaagcagggtgttcctgatcgagtgaacgatgaagttttcattgcaatgtcaaaggcacttaatttcataaatcctgatgagttatccatgcagtgcattctgattgctttaaaccgatttcttcaggagaagcatggttctaagatggcattcttggatggtaatcctcctgaaaggttatgcatgcctattgttgaccatgttcgctctttgggtggtgaggttcggctgaattctcgtattcagaaaatagaacttaatcctgatggaacagtgaaacactttgcacttaccgatggaactcaaataactggagatgcttatgtttttgcaacaccagttgatatcttgaagcttcttgtacctcaagagtggaaagaaatatcttatttcaagaagctggagaagttggtgggagttcctgttataaatgttcatatatggtttgatagaaaactgaagaacacatatgaccaccttcttttcagcaggagttcacttttaagtgtttatgcggacatgtcagtaacttgcaaggaatactatgatccaaaccgttcaatgctggagttggtctttgctcctgcagaggaatgggttggacggagtgacactgaaatcatcgaagcaactatgcaagagctagccaagctatttcctgatgaaattgctgctgatcagagtaaagcaaagattctgaagtatcatgttgtgaagacaccaagatctgtttacaagactatcccggactgtgaaccttgccgacctctgcaaagatcacccgattgaagggttctatctagctggtgactacacaaagcagaaatatttggcttcgatggagggtgcagttctatctgggaagctttgtgctcagtctgtagtggaggattataaaatgctatctcgtaggagcctgaaaagtctgcagtctgaagttcctgttgcctcctagttgtagtcaggactattcccaatggtgtgtgtgtcatcatcccctagtcagtttttttctatttagtgggtgcccaactctccaccaatttacacatgatggaacttgaaagatgcctattttggtcttatcatatttctgtaaagttgatttgtgactgagagctgatgccgatatgccatgctggagaaaaagaacattatgtaaaacgacctgcatagtaattcttagacttttgcaaaaggcaaaaggggtaaagcgaccttttttttctatgtgaagggattaagagaccttaaaaaaaaaaaaaaaaaaaaaaaaa

SEQ ID NO: 36500 - DNA, 408 bp, Oryza sativa
  Clone ID: PAT_MRT4530_4031C.1
atggaggtggagtggttgcgggacggggtggaagaagaggaggtcatcgaggctctagcacacgcgcaggcggcgcacaccggggatgggagtgcgatggcgttgcggcctttcatggcttcgggttcgaccgtcgaggtcctccagctcctccattgcttgtctgttgcctctaagaagctcaccaacggctaccacggtgcctgtttccacctctgtgcccatcactgcggcgccggcctgcgcccaacccgtcgccggccgccctttcctgcctcgcccctccagctgacccacacgaggggtgcggggaggccggcgagctcgtgccgctctgagcccgtgtgtcgccacctggggaagctaagatccccgggagccaccgtcgccagccgcaccaccctttag

SEQ ID NO: 36501 - DNA, 489 bp, Oryza sativa
  Clone ID: PAT_MRT4530_40320C.1
atgagctttccgctggtgtgcttctgccgccagatcccgcggcccatcgtcgcgctgttcaagctgctccaggccgtggcgctggccttcgtgctgatactctgcttcctcggcctctacgagttcccctacaccgtcgaggaccacgcgccgctcatccacggccgccgccgcgatcccctcggcgacgacggcctgcagcccgaggcggtgaagcggggcctcccgctggtcgagtacatgcaactcgccgacctgtcggcggattgccacgacggcgagagcggctacccggccacgtgcagggtgtgcctggagaggttggaggcgacggacgaggtgaggcggctgggcaactgcacccacgccttccacatcggctgcatcgaccggtggatcgacctgggagaggtgacgtgcccgctctgtcggtcccacctgctgccacgtcaacgaaggggcctgcttggcagtaggcggttcggctag

SEQ ID NO: 36502 - DNA, 1387 bp, Oryza sativa
  Clone ID: PAT_MRT4530_40321C.1
atggcgtcgagcgggagcagcacgacggccttccgacctcctcccctctgatccggcgcggccatggcgtcgagcgggagcagcacggtggtgggagagatggagagcagcttggagcgggtgaggcggcagctctcgtccacctccagccgccacctccttcagggccctctcctgaagcgatccgatacactaagaaaatggaatgaacggtgggttatacttgatcctgcaactggaaagatggaatacaagattcgtagaagtgatgcagctgtgaggggaataatagtgtttgattcaacaagcactgtgacgttgtcgccaatgaactttcatggactgccgaaatatgatggatgctgtttctgtatccacacggactaactttttttaaccttacattcttttgcatgggtgatatttattttgggaccctctattttgttttattcaatgactaatgttctagatattggaaccccacagaaaaaggaatattttctttgtgcagaaactcctagtgctgcaagagcttgggtgtcctccttacatgcaacgcctgaaacaagatcaggaaaaacaaattgaattttcattgcttaggttaagggaatcggaagatagggcaaagcttctttcagaagagagggagcatttactcaaggaaagagattctgctcttcaagaagctcaaatgtggcgttctgaactaggaaaagctagaggaaatgctgtaattttagaagcagccgttgtgagggcggaagagaaagcaagagtttcagcagcagatgctgatatgcgaataaatgatgctgcgagtagactcgattctgcgacaaaagaaaaggaagaactcgtagctcttgtggacgcgctacagttgcaaatacgaagccaagacactagcacaaaacaagtctgcgaggagaggtcggagctgtgctccacgtcttcaaagcatgtagacatggaagatgataatgtggataaagcttgcttaagtgatacagatccaatacccattactgagaacatagttgatttggatgatgatggagtcgatatccctacaattggggtcacggagtggaataatcctcattcttctgaagtatctgatgtaagagaagtaaccactgaacctgaagataacagcttggatattcctgttgatagccaaccagtatctgagaatgctttccacggttaacctggcttgtttctattcttaaccccgttggcttgtattctatgttctcattttagttcattgcaaacattcatatattcaaattaaagctcgctatgagctcatggactttagttccacaacgtgttcactgtatccaagtggaataaaacagtgcaattgtgggtgtgt

SEQ ID NO: 36503 - DNA, 683 bp, Oryza sativa
  unsure (1)..(683): unsure at all n locations
  Clone ID: PAT_MRT4530_40322C.1
gtcactatgctggactaggtcatctctgacgggcccaaacccttacctttgatgggtttggtcttggtcagtgattagtggtcactgatgacaaaattacctgtgacgggtgaaacacccgtcacagataacccatctctgactggtatataagtcatctctgacgggttaaaacttgtcacccgtcacagatgagttatcagtgacgtgtcgtaactacctggccgtcactgatgactcatctctgacgggttgtaacttacgacccgtcactgatgacaaagcaagaaatacaatttttgaattttaaacgcaatgaaaaaacgtnaaaaaaatattttgaattttactagccatcctatacatcgttacacatnactacctacaaattnacaatttttnacgcaatatagnctgnatgctacatatgagatttgaactncagacctnaaccttncataaatnnacaatttttnatgcaatatagnctgnatgctacatgngagatttgaactnnagacctnaacctnnataaagagctnncttaccaactnacctactnagnacatattgactactnacnnaatgtnattattnntgnctatgcttgnntgaatcatttaaatatatnnaacacnctaaatgactnnaaatgaaaatattatnaactaaatagtnataga

SEQ ID NO: 36504 - DNA, 589 bp, Oryza sativa
  Clone ID: PAT_MRT4530_40323C.1
atgaataaaactttaggcagtacattattggtttcagggacgatgattggtggcggtatgttggctatgccattgacgtcagcaggtattggtttttgtttaactttagtattattggtcgtgctgtggatattgcttacttatagtgccttattatttgtggaagtatatcaaactgcagaacatgatgttggtattggcacattagcggcgcgatattttggtaaaacaggacgagtcattgctacgttagtattaatggtctttttgtatgcgttgttatccgcttatgttacgggcggtggtaatattttagcgtcaatgtttccagctgcgcctgatcatttaatgacagagaaagagaaaattgcgatagtcatgtttacgataatttttggtgcttttattgtttttggcactagaagtgttgatggtattaaccgttttctgttttttattatgttagccggtttagcgttggtactgtttgctttaatgccttttattcagatagataatttactcgcaatgcctgtggataacttattattagtttctgctagcccgatctttttcaccgcttttggat

SEQ ID NO: 36505 - DNA, 238 bp, Oryza sativa
  Clone ID: PAT_MRT4530_40324C.1
aaaaaaaacaaaggggcgtgcgtattcttattaaggtgtgaaacatctcccatactcacccacaccgacccaccccttaattcaccatttattttcatcaaagacaataacaccttaaacaaaactaaaactataagacaactgctgtatcttcaattggaggcagcagcaccggcgccagccatcctcgccatggcgagctcgatcaccttgtccacctccggcatggccgccttgg

SEQ ID NO: 36506 - DNA, 1320 bp, Oryza sativa
  Clone ID: PAT_MRT4530_40325C.1
ggatccccgggctgcaggaattcggcacgaggccctccccttttttttttttttttttttttttttttttttttttttttttttttttgttgtttttttttttttttttttttttttttatccaactaacaacatatattctatgtcgttcacaagaaacattgatagtcaacggaaaatggatggtacaacaagcaattcatgctattttttctactgcaacattgttacagtgacaatcctagaaattattacactttaaaaaatgcttaacgatttgttagtctgattcatcaaataactgatatcaggacggtgtaacaatccttccatgatttatgaataatccttccagccaatatcattcaagtgaggctaaccacggatttcagcttttggctattgtaaatttgtaaatctacagcaaagtgaacattcttctcataagggcatcttcgaaggagtacctggatgccgcgggtatttctttggagtaatgcactcctttatgtacacaacagccgtccgttgaccatgaggtcccatagattcaacatcacatatttctaacatggaggcacccaacttatgtactgcacttttagcattttttatttcttcatggggattgtgtcctttcgcagctataaataaaccatcaattcggactaacgggaggcagtactcggctaaaactttcagttctgcaactgctcttgctactgctacgtcaaatgcctcccggaaatcaggactttggccaacattctcagctcggtcacacaccacatccacatttgacaaccccatgacctcaacagcatgctccaagaacaagcaccgtttctgcatcgactccaacagcgtaaatttccagcttgggcgcgcaacggcgaggatgaggccggggagcccagcaccggagccgacatcgacaagcctcatcccacccaaatcgccgcggtacgcgcgctcgagcgggggcagcacggcgagggagtcggccacgtggcgcgtcatgacctcgccctcgtcggtgacggcggtgaggttcatcctctggttccagtcgaggagggcgtccacgtagagggaaacctggcgctgctgcgacggcgagaggcgggtggtggaggcggcggcggcgggtggggcggcggtggtgtgggtcctcgggtggtggaggattgtgtagcggacttggtcgtggcggtggcggtggcggcggcggcctaggaagaggtgagggaggaggaaacggcgggcggcggcggcggcggcggtgctgctgctgaagcagcagagggacatctctgcaag

SEQ ID NO: 36507 - DNA, 176 bp, Oryza sativa
  Clone ID: PAT_MRT4530_40326C.1
atgagccatgcccccgccagcgaaaaactcagggccaaggtgagccaagtcgctattgaagacctagcgcaagttggcaaatggtacgccgccgcgcaactacatggcgggacaagggtacaagacgccttgatgactgaagatatgcaagcacttcgtggcagggccactgaatg

SEQ ID NO: 36508 - DNA, 319 bp, Oryza sativa
  Clone ID: PAT_MRT4530_40327C.1
gtggaatgagaaaagtagacgagttgatttagaaaaaacagatacacagacaagcagaagggaaggctcggccataaaaaattgggggacaaagtactacccaaccagacaacaaaaagcataaaccagcacacaagcaagatggaccacctgtttgtgagggggctagctcccaacaaactaacgggaagggggaacagctccatcccgaggtgaagctccaagtgggggaaaaaaaaaaattgcaggatcaaagaaaggacgtcttggggggagggcgacctatggggacaggcccccccaaaaagcgaagggaatc

SEQ ID NO: 36509 - DNA, 339 bp, Oryza sativa
  Clone ID: PAT_MRT4530_40328C.1
atggcctatgtggcattcatggccgtggcgccggcgaggtgtgggcaagggcaggcggcagcgtcggcatcggcgtgggcggcagcgacgggtgtcggcagcggcgtcgacggcggcgacgacaggcagagagcgaagcgtgtgacggtcgatgggcggcgcgtggcggtggagggcgtcggcatcgacgacgacacgtggccgccgggggtggtgcgcacggccgccgtcgggggatggcacgcgcggccgtcgggaggcgcacggccggaggcgtcggtggcggcgtccggcggagggcgaagctcaatgacggcgcgcggcggtcgacggatttag

SEQ ID NO: 36510 - DNA, 282 bp, Oryza sativa
  Clone ID: PAT_MRT4530_40329C.1
atggtgcaattgtttggactgatgcaggcaaaatgtctcaccagcgccaagatgtactccgactacaatgacgaccacagtgacaatatagcttctaccactacccgcagggagaacaccattgctgctatggtcgagatgcactcatgcacagctaaatactggggtgtccatcacacctcggttccatcaaaaaaggtttctcggagctggatcttgactccgatgaccacgactacgaggatgcggacaggaggagatggcggtggtggcggaggatga

SEQ ID NO: 36511 - DNA, 128 bp, Oryza sativa
  Clone ID: PAT_MRT4530_4032C.1
cgccccagaatccctggcgagacccacgcgcgcatattgatagccttatgtgagcaagcccaaaaggagacttactcttgctaagagaggtggtcaagcaaaaacaagctgggaggaccttccagcaa

SEQ ID NO: 36512 - DNA, 293 bp, Oryza sativa
  Clone ID: PAT_MRT4530_40330C.1
aggaattcggcacgaggcaccagcacagagccagcgcgagagagagagagagggagaccaaaccccatcccggatctctcgtcgtcggcggcgtctggatggcgctctccgacgtcccgcgagtcgctcctccgagctctctaactcctcgcggaggtccttcgcacggcgccacccgcttcccctccccgggtccccaggttccccggctccgggtgcgtcggggggggcgcccatctcgatcaggctcccagggagaaatgagatgtactcgccggcgttctacgccgcct

SEQ ID NO: 36513 - DNA, 174 bp, Oryza sativa
  Clone ID: PAT_MRT4530_40331C.1
atggttttggtctctggtttcgaccatctaagactcctagttggaattaacaaaggacttcagagaacttcagaggggcacacagagcaccacaggataaatcatggtggggataaatcgcagcaacaacagattaagatgggtattgaggacagaactataaacagattgtga

SEQ ID NO: 36514 - DNA, 444 bp, Oryza sativa
  Clone ID: PAT_MRT4530_40332C.1
atctctggaaggataaggataagtccaaatatatcgttaaaagttattacattatagaacagagatagtaagttatataaaatgaacaaacttaagtaacagctgagctatcatacagtcctctggagagacaggccggcatcaacaacaactacttgctactacgaaaacaacgtgtcagcagtcggcaccgtcagaaaacacagctttcgttttaagcattcggtcaccttacagcagcagtagttgaagcatgcatgtgtccttcattgccatcgacaacatatgttcagaaatttttcagaactggcaaaaatgttagcagggacaaaggttgtgatgttgattgttgaagtcttgaaaatggttttttcaacttggtcaggtgtgccttcttcatcacaagataatatatgctttgaaaggtttatgcttattatgcca

SEQ ID NO: 36515 - DNA, 927 bp, Oryza sativa
  Clone ID: PAT_MRT4530_40333C.1
ccaaagctggtcatgtccctcgatctacttgttccgtcgttcacggattccacctacttgcccttgtttcctccctgtgtggagattcttgttatgtgctcagccctctctattagcgaccgcatacagctgcttcggttggcgaccgtgcgcaacgtcttggatctgctccttccccatgacacctcctccgccgactaccgccacaacctgttggagatgctccttccccgccgccgtgcaccgtttccagtaggcctcctgctatcccctacgttcatagcgctgatgccttcgaagctccacgccgccgttatcgctgcttgtgaaaaagctagatggcgtggggtcagcgccaatgcatttggcgttgactcccgtatacctgttaactacatcaggaaagaaaagaataaagaattaaaaaaaagaaacaaattaccgatcggaatttcgatgatttcgatcggaatttcgccaaaaccgaccggttttcgagaacttgtcagcaaactcaaggatttgtattcaaattttattcaaattttggtttataaaatttgttcgaaatttaccggttttccaccggatttcgtgaaattccgaatttcgccggtgcccgaaacggaaggatcctgcttctctgctctggtgattgatgtcttcatgaatgtcagatggtggattcggcacaagcgactccacagatatggattcccttctcgtttaccgggccggtacttcgtgctgtatatcatcagatcctcactgtttacctcttctctccacgtaagacaaggcgacattccctgcagcttatacccactaaaagcgattaagcctctattaactaagcacgcaagtgatgatggcctcatgctatcattcgatgggggctcgcccaggacagcatgcggcgcctaccca

SEQ ID NO: 36516 - DNA, 1336 bp, Oryza sativa
  Clone ID: PAT_MRT4530_40334C.1
ccgcgcggctggacgccgccgcccttctccttccaggtctcgccgccgccgacgccgacgcccaggagctcgccgtcctccgctagtcccaccgcctctcctctcgctctgcctcccccatcaggccagtagcgcccccatccctctctcgacctgctcctctcctctcgccatctcgccaaatccaacacaggtccacggcaacgccgcgcatctcggcagcgcacacatcggcggcgcatctcggcagcggcaagccggcgacgagctgcagcgcttcaaagcttgattacccaaatactacaacactgtgctgatttcagtaattggatccctcaaattgtgaaatgcttgccaaagggaggaaagttgctggaaggggcggagacatgtctgcacactatgcatttgggccgcaggaagatgatgcgattattaaacataggcttctgaccaggacaacaactaccaggggtgaaccaccacttaagaagcttcagaagaagttcatgtcctttgccactgaggttgagaaggatgcagacaacataagtgactgtgagaggctgtacaaggcctttttacaggaaattaatgcttttgagctgcctcttcttaaaagcaaggccgtggttgatgcaaaccttagggagaaggagagcttcaacgagctgcaagacgagattcagcgacaaatcttgcaagctcagactgatattgaggaactcaagaagcaactggaacagagcaaaattgagaggcagcacaaagaggagtgcgaagcaatcagaaaaatgatttctttgcagcctccacgatcagaaacagaaaagctcattgcggatcttgagaaggagattgctaatttggaggctgagaatactgcatgtataaggaccctggaactaaggaagaagcagtttgctcttcttcttcatgtggtcgaggaactgcagatctcgatcgatgatgagcagaggagcatagcagatgagctgagagctgccactgaagagcagaagatgagcatagaggaagttagcggcggtgcttcagatgccatggctgtagattgatcgacgatcctagcagaaaagcgagttgcattcctgtttccacaaaggcagctctacattatcttggggactatatagcactgaatcgcctagatgactttgtaccctgactcatgattatcatcactcttgtaatttcatcagtagtaagttgtaatcgtgccctttcttgtctgaggtaacagaacatcatggtgttgacatatgcgcctccagaaaacaatatgtatgattgttattatttactgaacggggatcca

SEQ ID NO: 36517 - DNA, 1064 bp, Oryza sativa
  Clone ID: PAT_MRT4530_40335C.1
tcagaccctgagaagctggaccttgttctcaaaggcaatcgatatccactccgggtaagctgccgcccattgcagttggtttatctctgcaccggcatcatacaccatcacaggatcaatcccctcggccggcactgcgccgggcgtcgctggcagctcccaaatcagcgcttggccgtcgtccccagccgagcaaaggtgcctcgtggcctgtggcgcccaagcgaccgcgttggcgcacgcccggtgtctgtgtagttcggccaccggcaccccgggcgcgcgcatgtcgagcacgacgacggcgctgctgtccatgagcagggtggccatgtagtggaagtcatagcggttccatgccagcctgaggagcggcgtgtccgggcgggggctctcgtagaagatggtggaatgctccttgtcccggaggtcgaagacgcggacggagccgtcggctgagacggaggcgaagatgccgttctccccccaggcgatgtcgtgcacggccttgtcgtgcgcgatgagctgcgtctcgacgacgccgcgctcgatgtcccagatggtgcaggtggtgtcgatggaggcggtcccgatgcggcggggctcggcctcgttccagtcgaaggaggtgaggggggcgcagaactcggaggcggatgtcttgcggttgtcgaggacggagcggagctcgggcgcggcggcggtggcggtggcggcgagatcgtcgagcggggcaagccagagccgcagcgcgtcggaggaggaggcgaggaggtggggcgcggaggcggcgcgcgggtggaactggagcttggtgggcgggtaggggtggtcgaaggagagcgcggggagggcgcggaaggaggcggcggtggggtggacggggtcgaaggagaggagggagacgcggttgtggaggtcctcgaggaagctgccggcggcgaggacgggcgcggagggggagaaggccagcgcgtagatggagtgcggcagctcgcaggtgaaggcgttcgggttctgcgcctccgccgccgaggcggctaccgacggcggcttgggctgct

SEQ ID NO: 36518 - DNA, 2629 bp, Oryza sativa
  Clone ID: PAT_MRT4530_40336C.1
gaaccatgtacaggactatgcacacaaatacattaagctgattgagttacattggcaatttatattcagattcaacacagaaattctcaacgcgactgaatttggtgatcagagtgtaactcaatgtccagaagtttttgaggaaaaacgaagtgaacaagcatcaatcagaagcctgaacctggatcaactagttgttaatgatattggaaaaggagcagtgttgactttttcacagatattggctgctacaaacaatttttcagggagatccttaattggacaaggtggatttgggcctgtttacaagggaaaacttcccaatggacttgagattgctgtcaaaaggcatgatacttcttcacatcaaggtgaagaagagttcatggctgagattgacgtcataccaaaacttcgacgaaaaaatataattgagctgattgggttttgtgttcaaggcaaagaatatgaaacaaaaaggatattgctaaattggtctaagcgccttaaaataattgaaggaatctcagatggtcttctttacctacacaaccattctcccaagtgcattgtccatagggacataaaagcaagtaatatcctcttagattatgaaatgaatgctaagatttctgattttggtctggccataaaattagctccgaaagcaactacagaggtgcttgttcgtggcacatggggttatgccgatcctgaatatgttgctactggagtaatctcggagaaaaccgacgtttatagctttggcattgtactgcttgagataataagtggaaagttgtgtgtatctggatataatgtgaagagcagatctcgacgaacaatatttcctgaatttgtatctccaagctgcgcctcccttctccagcccgggctcttaacctctctcaagttcgaccagctggaagatgtgattgccatgttggagagcagtctttgttcctctccggtcagatctgttactgctggacctctggtccccatggaggttagtgagaatgcggtcacttcttctgttgcttctcctttaccggacgtaagaaatgccctagtctgtgtgcaagatagttcaatctcagtggctgccttagttccagttcttgcatgtgctgttaatgatctagagactgtctcaactgaagtggtacctgcgactgtttccttggtgtctgttatgcctacaagagctgctgcggttgctgaagttgctcatgctactgttgagtccgttgttgttccgtcctctgtcagcgaagatctctcgccagcggtcaaccttagcagtatgccacctcgtctcagatgcaagaataaaggtttcctcgcttggtacggcgcctgtccatcttcgaggcagccaagctcggtccccccacaggaacctagggatatcttcgtctgttcggaacagttgtctgccaacccaattctgtctccacctcaggatcctgatagcacgagatcgccacctccgacattgagtggcccctcagctgctgagcaaatcagaagagctctagcaggtctaagtccagaaggatctattcactctgcttcactctctccaggtcgggtgccagtcattacttccaatgacactactgctgcgcaggactttgcttttggggaaccagatccagttaacatatcaggagacagtgacgatgatattcttgatatctttatcccctttgttgacatgagagtaactgctcattacgccactgcttatgttacccctccatgtgaatgccctggcagagtaattcgaaaagcaatgcaggatgctcaccctcgttttcagttcactctcatctcagcttgtagaggtgcaatgactctaagatttattcacagtcaggacagagactttgcagttgatcaccaggagaatcttacagctgaaggccacttggttaggcttgaacggcctgaggacagtgcggctcgcttcattcaacacaacactatgctgtccgaactagactgtattgacttcccgccagagatgttgttccctaacaagataagaaatgcttttgaaaattacggcgagctgatggaagtagatgatcaatgcctctatggggacgaacaatcctctctgcgtcttgttgttctgcactatcctggcaagaggatgagccctagatttcggctgcgctacaatttggggattgtctgcactgtctatgtcagggttctaagaacatgggagctggccatgaacgtggatgaagatggaaattacattaagcattatgaacagtttctattccctcatcagttggatcctccccgttcaggaccaactgttggaccagaggcagagttggacaacttgaatcaggctccttcaaatcaaatctctaacaaccaaggacttcagaacaggggaagattgcttgcgattctgcctgcagctagcactgtcttcattgaggaaatctctgatacacctgaaatttttgtccctccgtcaatccattctgctccctccagtatccatgactgcctccaggacctcgtgccctcagatactgaaaatgaacatgagctttcagcccggaaacgcagaaggcagaagaaacggacaattgattcagat

SEQ ID NO: 36519 - DNA, 8226 bp, Oryza sativa
  Clone ID: PAT_MRT4530_40337C.1
atggcgctatggaatggcttgggtcaggtggccaacattgcgcagcttgccggggtagatgcatatgggctcatcaagatgatcgtggaggctgcgcagacagctaaaaggaaccgggagacctgccagaagctagcacggcatgtgaagatgatcggcgacctgctgcagcgactccaaagcacagagcttatgcagcatcaagaaacgaggaacccggtggagcagctggaggagacgctccgacacacctacatgctcatcttgtcctgtcaggacagcagctacctgcacagctgcttcatgggagggaagcaggctcaccagctgcgcgaggtgcagagtgatatcaccttctacctccagctcttccctcttgtcagcttcgttgacacgacccgtacctgggagcggcttctgagaagagctcaaccttcttgcactgaggatactgcagatgagttacaaaaagtacatcattcagatcatagaattaggaaccatgtacaggactatgcacacaaatacattaagctgattgagttacattggcaatttatattcagattcaacacagaaattctcaacgcgactgaatttggtgatcagagtgtaactcaatgtccagaagtttttgaggaaaaacgaagtgaacaagcatcaatcagaagcctgaacctggatcaactagttgttaatgatattggaaaaggagcagtgttgactttttcacagatattggctgctacaaacaatttttcagggagatccttaattggacaaggtggatttgggcctgtttacaagggaaaacttcccaatggacttgagattgctgtcaaaaggcatgatacttcttcacatcaaggtgaagaagagttcatggctgagattgacgtcataccaaaacttcgacgaaaaaatataattgagctgattgggttttgtgttcaaggcaaagaatatgaaacaaaaaggatattgctaaattggtctaagcgccttaaaataattgaaggaatctcagatggtcttctttacctacacaaccattctcccaagtgcattgtccatagggacataaaagcaagtaatatcctcttagattatgaaatgaatgctaagatttctgattttggtctggccataaaattagctccgaaagcaactacagaggtgcttgttcgtggcacatggggttatgccgatcctgaatatgttgctactggagtaatctcggagaaaaccgacgtttatagctttggcattgtactgcttgagataataagtggaaagttggaaacgtggcgcggtgggatgagagggcgaggcgagaggggcgacctggctggcgacgggccgaccaccgcggctgtcacctccggcggccgctccagtgccctcaccattgacttgccgcctctcctcccttctccggcaggtatctccaagctgcgcctcccttctccagcccgggctcttaacctctctcaagttcgaccaggtgaagctttccaaaacctcatccttcatctcttccactgccctgttacccctatcgccactacccttggcccgtcaaaaatcatcccaactcctatttggctttgcgctgctccctctaagccgctcaactcgctctatgtcaaaaatgctcttaatttctggttcagttcttcgttttcgtctttctctgtttcttctttgggttttggtttgtttctttctcatgttgcgaacaaagatgtggctacctcgttgtttcttgcgggttcgtctgttcttaagtctgctggtttgtccatccatttgaccaaagattcagctgcaaaggatattcaagaaaatgttacccggttcttggttcagtttgaaggcagttcgtccgttccctctctggtgggtgaaaaagttgttcccgcgcttcaaacagttaagccagcctttactgcaacgtcacgtcatattggatgctcccaacaatccagcaagacctctaccccctctgtgccgacaggccctgcattgaagtctgtttactgccctgtaacaaactccttcagagacgctctcctctcacagccaaaacctaaaccccccgctcgctcagccacttctcgccttcctagcaggggcagaaaaaacctcaccatgctcaaccgatgctttcgctgccttggttctgatcatcaggtcaaagattgccgggatcccttgatttgcgcatcctgccgtcgagcaggtcacaggcaagattcttgccggtcatctatggcttccaacatctcccctcgccgctcatcttcctccttccacccatccacagcaaactccacctcccgcttcactacccgctgggtcaggcgtgctctaaacactccagccccacctccgcctcgcttacctactgccccataccctcgatccaaccacagctccccccctccagataacctagccattgttccttatgttcctcctctgactcatgtggatgcgcagctggaagatgtgattgccatgttggagagcagtctttgttcctctccggtcagatctgttactgctggacctctggtccccatggaggttagtgagaatgcggtcacttcttctgttgcttctcctttaccggacgtaagaaatgccctagtctgtgtgcaagatagttcaatctcagtggctgccttagttccagttcttgcatgtgctgttaatgatctagagactgtctcaactgaagtggtacctgcgactgtttccttggtgtctgttatgcctacaagagctgctgcggttgctgaagttgctcatgctactgttgagtccgttgttgttccgtcctctgtcagcgaagatctctcgccagcggtcaaccttagcagtatgccacctcgtctcagatgcaagaataaaggtttcctcgcttggtacggcgcctgtccatcttcgaggcagccaagctcggtccccccacaggaacctagggatatcttcgtctgttcggaacagttgtctgccaacccaattctgtctccacctcaggatcctgatagcacgagatcgccacctccgacattgagtggcccctcagctgctgagcaaatcagaagagctctagcaggtctaagtccagaaggatctattcactctgcttcactctctccaggtcgggtgccagtcattacttccaatgacactactgctgcgcaggactttgcttttggggaaccagatccagttaacatatcaggagacagtgacgatgatattcttgatatctttatcccctttgttgacatgagagtaactgctcattacgccactgcttatgttacccctccatgtgaatgccctggcagagtaattcgaaaagcaatgcaggatgctcaccctcgttttcagttcactctcatctcagcttgtagaggtgcaatgactctaagatttattcacagtcaggacagagactttgcagttgatcaccaggagaatcttacagctgaaggccacttggttaggcttgaacggcctgaggacagtgcggctcgcttcattcaacacaacactatgctgtccgaactagactgtattgacttcccgccagagatgttgttccctaacaagataagaaatgcttttgaaaattacggcgagctgatggaagtagatgatcaatgcctctatggggacgaacaatcctctctgcgtcttgttgttctgcactatcctggcaagaggatgagccctagatttcggctgcgctacaatttggggattgtctgcactgtctatgtcagggttctaagaacatgggagctggccatgaacgtggatgaagatggaaattacattaagcattatgaacagtttctattccctcatcagttggatcctccccgttcaggaccaactgttggaccagaggcagagttggacaacttgaatcaggctccttcaaatcaaatctctaacaaccaaggacttcagaacaggggaagattgcttgcgattctgcctgcagctagcactgtcttcattgaggaaatctctgatacacctgaaatttttgtccctccgtcaatccattctgctccctccagtatccatgactgcctccaggacctcgtgccctcagatactgaaaatgaacatgagctttcagcccggaaacgcagaaggcagaagaaacggacaattgattcagatgtcaagaggcgatatagcgaaagactggcggccaaagaaggacatttgtacatttcgatggaatccaaagcagccagagcgaaaaaactaaaggaacaacttgccaaatgctcatccaaactcaatgacgcggtacacaagcacaatctgctcgaccttaacttcaagactactccgaaagcgttggaagatctggctattgcttgcagtttgaatgatcacgatattgcccagcttcgaaagctcttcttcagttctctagtgtcttctctcccttcgttatgttctctttcagtctatttactccatgaaactaaacttcaaaacatcccacctgaaaaagcaaaaactattctacctcctaacctcgctaattatgattttgtgggttcttatggctctactgcgggcctgcccactgcctggaatgctgactttacaaaaacttctttcatctccagacacttctcgctgacaatctccttcacctcaaccttcacagacctgtccttttctttaaccaacatctatgggccagccgagcttgatcaaaaacaagacttccttcatgagcttttagaaatagatcccctaatccagggccctagacttctcataggagacttcaaccttactagatccccttccgacaagaactcccaaaacttttcaactggtcttgcagctgctttcaaccaaacaataaactccctaagcctgtttgaattaccacttccagacagactatacacctggtcgaacaaaagagaagttccagtcctggcaaggctagaccgagctttcttcaacaatgcttggaacaacaccctcccaaacacctccctctcttcttgcactagaaccacctctgaccatgttccacttcttctcactgcttctacttccattccaaaatcgaaaactttccgctttgagaatcatcttttgctggaccgagattttcttccttcagtcatgcacaggtggccacaacagctcaatatgaatgatccggctgcttgccttgctgccaagctaaaacagacaagatctatcatcaaagtttggatgaaagaacacaggaaacgtagttctctcaatgaagactgtaagttcacaattgatctcctcgactatattgaagaactcagacctttgaatgatggggaacgctgcctaagaaatcttgtacaggagaaattgtttcaggccatccaaagcaaggttgcatactggaaacaaaggggaaaggtcaagcggctaaagattggaattgacaattcggcattcttcaaggctcatgcatcaaaaaattacaggaattcaaggatcagatcaatcaagcacaatgggtcagaaattgcagatcacaatggaaaagctctgcttctgcactccttcttccaacattttctagggtccgactgtcagccgttgtgggacttcgatctgtcaacactatactcagaagatgaacgagactataatcttttggcttcgcaaggattgcaattttctacggaagagataataacatcaattaaaggcatgaactccaacagtgcaccgggaccggatggtttcggaccaagcttctacaattcagcttggaattctataaaggaggatattatcaagctggctgcgagtttctgctcaaattcagtccaactggaaagaattaacagagctcacattgttctaattccaaaacctggcaaggagaatacagtagatggctatcgaccaatctccctccaaaactgctcagtaaaaattctttcaaaggttttggcaaataggcttcaaaaagttctgacaagaatgattcatctggaccagacaggcttccttaaaggtagatgcatctctgaaaatttaatttatgccactgaactgatacaagcgtgccatgcaaggaaatgcaagaccctcattatcaagttagattttgctaaagctttcgattcagttctctggacgagcctgttccaaatcttggctgtccgggggtttccaaacaattggatttcttggatcaaaagcctacttcaaacatcaaagtcggcagtgcttcttaatggaattccaggaaaatggattaactgcaaaaaagggcttcgccagggagaccccttatctccttatttatttattctagtggcagatgtgctgcaacgactgctggagaaaaactttcagattcggcaccctatctatcaggacagaccatgtgcgaccattcagtacgccgatgacacgctggtgatatgccgagcagaggaggatgatgttcttgctcttagatcaaccttgctgcaattctccaaagccacaggattacaaatcaactttgccaaaagtacaatgatctcccttcatatcgaccgttcaaaggaatcgtcattgtcggaattgctacagtgcaagctggaatcgcttccaatgtcttacttgggcctacctctatccttgcataaactcaccaacaatgatctacaaccaattgtggtcaaagtggatagttttcttacaggctgggaggcatctctactttcacaggccgaacgcctaatcctagttaatgcagtgctaagcagtgttccagtttatgcaatgtccgcgttcaaactcccaccaaaggtaatagaagcaattgataaacggcgacgagcctttttttggaccggtgatgacacctgctccggagcaaagtgtttagtggcctgggatgaggtttgtaccgcaaaagaaaagggaggactaggaatcaaaagtttaaagactcaaaatgaagctcttcttctcaaaagacttttcaaccttttctcagataattcctcctggactaattggatttggaaagaatttgatggaagatcactattaaaatctctaccgttaggtcaacactggagtgtctttcagaaactgctgccagagcttttcaagataactacggtgcacattggggacggctcgagaacatccttttggcatgatcgctggactggcaatatgactcttgcagcacagtttgaatctctcttctcgcattcaactgacgacttagccactgttgagcaaattttatccttcggaatttacgatattctcacccctaggctttcatctgcagcgcaaaacgacctacaagaactgcaaaccattcttcagaatttttccttgacaaatgaatcggatactcggctcaacaatcgccttggcaatttaacaaccaagacaatctatgatttaaggtctccgcctggctttccttcaccaaattggaaattcatttgggactgcagaatgccattaaagatcaagctctttgcttggcttctagtcagagatcgactgtccacaaaattgaatctcttgaaaaagaaaatagtacagacagcaacctgtgacatatgcagcaccactgatgaaacagcagatcacctcagcttcaactgcccttttgctatcagtttctggcaagcacttcatatccaaccgatcatcaatgagactaagtacctggcccaactaaaggcaccagcaactatcccaacaagacattttcagagtttcttcatgctctgctcttgggtcctgtggaaccacaggcatgatgttgtattccgaggaagaccaccttcaattgcttcatgcttgcaacgcggaatttcggaatcctccctatgggctgaaacttttacacctgatgatagatttgtaatagatgtttggaaagacatttcttcctcaattaatgcaatgacaattcaggtggggaacctctcccccccggcactgaagaacagaaaaaagttgcacaagcttattgatccatcattaggtgctaagaaacatgagcgagctcagattatgcaatgtcttagggtggcgatgttgtgcgttcgggatcgcgctgaacatcggcctaccatgtctgaagttgttactatgcttcctagcatcaagacaccgaaagacagaaaggcagttgtcaacgtgcgcttttga

SEQ ID NO: 36520 - DNA, 1648 bp, Oryza sativa
  Clone ID: PAT_MRT4530_40338C.1
ccgtttcccagagattcgactgatgcagcatgatagtgtacagatttgtgaacttcagacacggttctttccttcttttcgacgaaagtgaaacataccaattcactgtattcacccagtcgtatttacagagaacagatgctacggcattttacaacctttacctagtggctaagttctccaaaaaaaaaagaaaaaaggaacgcgcctgagcatattgcagcaccggaaacaagaaatccggccgcctgccttgacaaaggtccctgaactccgctcctacaaaatggtcagacatacgataggagacgtagagaacttgttgcctctgcaactcggagtatggcccattgtcgctttgcacgaggtttgcaggggacacaaacaaagggacagttaaaacaagtaaatgcaaagacattagaaaagatgcagtgcagatccatgacacgacaagaagaatagagtgttgatactggtagaaccaagcatggttggtaagattgttctttgtattaaggaaatggagtaaagtgtgagtgtgactgtcatggatacgtttctcatttagacaaactactaccacctccatcctaaaataagtgcgtttgtagttttctactaaatcaaatgcataagtttatagataagagtaataatgtctaccatgtcaaataagtaaaactatgaatatatttcacaatggaactaatgatgctcatttgaatagtaattattggagtattgttttttctatgaatttggttccaacttaggatagtttgacttaggaaaccagaaatgcactcctttacaacggaggtagtatggcaagtacaacagttgagcctagtatgggttccttggtaatacacatcatcttagagactatcctcttataacaattgagacaacagaggctctaaccatgaatccaccaaaatatttttatcatcattcttctttcctttatctagcctcatgcgaggaaattccctattatctggcgctaagcctcgtccgagagttgatattaactgagcttaggtggtacccccaagagcctgctataaagactgttttgtatgccctaaaagttcgaataccagaaacatcgatttgcttcaggaaagcataattgctgacagcgcttttttctctacttcaacgcactgtcatgctaaacatgtaaccttattttccaagccttaactgtgctgagtatttaatgctcgttcgcatcttggtgacaaaaaattttcaagcctttcactcaatagaatatttacttataagtttaaaacaagtaacccatgacactaaaaaagttattagccacaggggcatcaaacttttcacaggtgcgcaagagaaataactagtgaaaatagtgccagtaaagcatgcaatttgatagtagcacagtagaaaattagcacaagcagcactgaaagattgtaaagcagaagataaaaagtaggatcatggtgtcaactggcaaggaatgtgggtaattgtaaatatatataaaaggcaggcggaattgatagaatcaaccttcgaaaatactggacaaccatgacaagtcctgcgcctcaacgttgtaatctgaccatgaatccaccggacgcgtgggcggacgcgtggg

SEQ ID NO: 36521 - DNA, 513 bp, Oryza sativa
  Clone ID: PAT_MRT4530_40339C.1
ttcattttttcggcgatgaatcgaagttgaatgtatatgactacttcgaagtgtcagcgtaatgagtatagagatggcgtattaagttttatgaatgccgcggaggagaataggagaagaagaaacaacaaatacatatgttgtccacgtatggattgcaaaaatgagactatgtttgaaacatgagtggacgtacacgctcacttgatacgacggggattaatgaagggatacatatgttgggtgaagcatggagagtaagaattgggaagtgatggtgcagttacagatggaagtggtgcagacaatcatgaagaaggagatgaagatgagcatgacatgtttgtaccatctccattgggcggtgaaatggttgatgtagatcctgatctactgcaagatatgttacgtgacgttgatgatccagctctgaacgagagagattccatgaaaatcagcaggttggtcagtgactcggagacaactttgatcgctgggcgggcgggggagcga

SEQ ID NO: 36522 - DNA, 1761 bp, Oryza sativa
  Clone ID: PAT_MRT4530_4033C.1
atggcgaaggaggacgaggaaaaaacagcgttcatcacaccattcggggtattttgctatgtcaagatgcccttcggattgataacagctgggaatactttccaacgcacggtccagggcgcacttagcaatcagcttggcaacaatgtcgaagcgtacgtcaacgacatcgttgtcaaaaccaagacaagcgactcattgattgatgacctccgggaaacgttcgacaacctccgacgatatcgtctcatgctcaatccagagaagtgcacgttcggagtaccgtcggacaagctactcggattccttgtttcaggcagaggaatagaggcaaatcccgagaagatcaaagcaatcgagaacatgaagtcgcccacaagactcaaggagattcaaaaactgctctacgtagtcattatgacatcaaggaagctacgccactactttcaagcccacagggtcacaattgtttcctccttccctcttggcgaagttgtcagaaacaaagacgttgtcggtcgcatcgcgaaatgggtagtcgagctaagccaatttgatgtccacttcgtgccgcggaaagccattaaatctcaggtacttgccgacttcgtggccaattggaccatgctagataacaagtcagataaccaaggcaacaatgagacatggacaatggcgttcgatggcgcactcagtagccaaggagcaggggctggatttatcttaacatctccatccggagatcaattcaaacacgcaatccaccttaacttcagggcaacgaataacactgcagaatacgaaggactactcgtcgggatacgagctgcagccgcacttggggccaagcgactaatcgtcaaaggggactctgagctagtcgcaaaccaagtgcacaaagactataaatgctctaaccccgagttatccaagtaccttgcagaagtcaggaagctcgagaagaggtttgacaggatcgaggttcgacacgtctatcgcaaggacaacgtcgagccagacgacccagcccgacgcgcatccagacgagaaccgctcgaccccggtacctttctcgacatcctgacgaaaccttcggtaaaagaagtaagcggcgaagttggcccgagcacccccgacatcagctcggaggtcatggaggcagaacgcgccgtggctgacattgaaaccacggatgactggcgcaccccattaatcaaattcatcagcagcgaggagttacccgaagacgataaagaggccgagaaaataacccgtaaagcaaaaatatattgtatgatcggcaatgatctatacaaaaaagtgccaaacgggatacttctcaaatgcgtctctaccgacgacggcagacaactcctcctcgacatacacaaaggcatatgtgggtcacacgtcgccgccgtcgccgtcgctcgggaaggacatcatcatggtcgccgttgcgtcgccgtcctcgtccgcctcttcaccgtcaccggagatcatcggagcagcatcgccgtcatcgacccgaaggttcccgccgcttcctcctcgtcgccggcgccgtccgttgcctctccgccgtcgctttggtcgccggccaagggtccagaagccttgtcacccgaggacatccctccgacgacaaggctgagggctagggagagtcattgctctctcgagttccgccacttcaaaattcgtcttccaatattggatacgacgatcttgggtcgcaagggcatcctcgagatctgctga

SEQ ID NO: 36523 - DNA, 515 bp, Oryza sativa
  Clone ID: PAT_MRT4530_40340C.1
ttttgttttttttttttttttttttttgtctttttttttgagcaccatgattataccccgtaaattatatacagaaacacgtatacacaaacacttgcaccctaacattgacggaaaaacactgttagcaaaacacatttttaaagctgcaaaattagaaccggcaaaatggtcccaagtgcttgaccttcaggccttggcactcaggctcaattttaacctctctttatggaccgggctttaaggaaagtgcattgttaaaacattaacgggaaacctttgaccacagaattttgaaaccaggaatgtcaaaccttgctggacttagcttggaacacgctatgttgaaaacgctattgttgaagcttttgggataccatttacgaggtaccacttaccatgcaagactgagcctggaaattcgcgacttgtgaacaaacagactggcaaaaactgacagggaaaaattgggaagggacatttggggggaaatgtaaaggggccaacgataatgg

SEQ ID NO: 36524 - DNA, 459 bp, Oryza sativa
  Clone ID: PAT_MRT4530_40341C.1
atggcggacaaggcagtgactgcatcagatatggcggtgatccctctggaagtggtcattgatgacgatgagattgagtatgcttcaagggacactcctgggggctctggtcctgcacaagcagaaccccttcttccgacaaatctggcagaagaagatttccaagacgccttcattctgtttgttgacatgcgtatcactgcgcattttgccacggcttacaacaccccggccagtgacactcctgcccggatcatcacgaaaactatggaagcggctcatcctaccgccaccttcaaactggttgcctcctctcggggcaccatggctcttcgctttgccagtcgggctgacagagagactgccgtcttgaaccaggaaggtctagagtctttaagatttgtaaaggataagatacaatctcaggttgtttttgttctaatggtctctgagaattga

SEQ ID NO: 36525 - DNA, 1306 bp, Oryza sativa
  Clone ID: PAT_MRT4530_40342C.1
agagaaagcaaagcaagcagccccgggtgatcaacaacctcaaagatggagccggtgggcagcatcgtgggcgcggtgccgaaggtggcttcggcgatcgccaaggcagtgaagacggctcgccggaacaagaccaggtgccgggagctagcccagcgcgtgaaggaagtcgacgacatcctgagggagtacaagaaggtggccatgggagacgcggcggcgacgacgcggaagattctgggccgtctcaaggacgccctcgacgacgcgctcaagctcgtcgagtcctgcggcaggagcagggacggtctgctcttcaggctccacaggttcgtggccagcgacgggctcgccgccaagctcgatgacgtcaacagtaggatcaacaactgcctcatcgccctccaggccgtcaacgttgcccacctacagaagaagatggaccgccacctcgccgtcgccgctggtgggggcgatcaccgccgcacaaacaatccaagggagatcaacgccggcaagagcggcaacaaaggtaacaagggcgggcagcagcacaagcagaacggagggaagggcggcaaacggaggaaaggcaagaaggcggccgggccaccgccgcagccgcagccatgcacccccaccggcgccgtcttcccttactaccttgtccactccatggaggaggatcccacctcctgctccgtgatgtgatccacgcgcgcgtgcacggaggaagcccatgcaagcatctaagctcccggcagctgcgcaggcgcagctcgtgcttgatccatcaccaccagtgatgacgacgacggcgccgccgccgcggcgacacccaaagaatcgccacggcggcgagcaccgatcgagatcaagtaccaagggtactgcatgattccccgaacaggtcaagctttcattttatcgcatatttgggtatccggaaatccatggactacgtgatgatacacataacacatggatttccacatcatgcattcgggttgcaacggaattgggttggatatcatctgaactgcatttaatttcatgatcggattcaattcaaattggatatatatccgcccattcctagcttcatcttaataataagcagtttcagtgtgatcgagtctgtgtgtactgtaatgctgtgttctgcatgtctgtgtagtcgagttgagtccatcatgtttgcttcattctgtaattctgcatgatcttcagacgctctgcatgagcgagtagtaataataataaagtttgaatgaagtttataaaaaaaaaaaaaaaaaaaaaaaaa

SEQ ID NO: 36526 - DNA, 688 bp, Oryza sativa
  unsure (1)..(688): unsure at all n locations
  Clone ID: PAT_MRT4530_40343C.1
cagaaccggccaggtaaaaaccatgtgcagccgtgactctcaaccctanatgttctgcgtgatcgatccattgttgtttataggattaagctttaatatggtngggtnaccaaccatatagaagacttaggggagcttttgtttttacactgttgtcagctacaacacgtggtaattgagtgctatctacttgataagagagtgatctctgcatgttagactaatttttattctactggtttaaaaaatgtctcatttcatatctgaatgtaaaataaaagatttgtcattacaattttatatatagatacatattctagatatcatgcttggaaacccatggcagtttttcaggttgttggctgattgctaatgcttgaatctttgaaatggaagaaggcacttgccgatgttgctgttgtttgaaaggtggttagatcgtaaccatggctgatggcagagctaatgttgctttttgtcatctcgctgccgctgggccagacccccgtcggatnnttggaaatctgcacatcgctatcactctttcgcactgtcataaatgtgtacttagacataatcttatttgtttatattgatcatatgtgatacttagatgcaatcttatttatatccaagtggctctggatggctatccagactgccgtggttgataaaaaaaaaaaaaaaa

SEQ ID NO: 36527 - DNA, 211 bp, Oryza sativa
  unsure (1)..(211): unsure at all n locations
  Clone ID: PAT_MRT4530_40344C.1
cgcgcccatcnttgccgacctgaggctgcggtgcgccgcccgctccccgtgctgcggcgcgtggcggacgcatggcctccgggatgcgcgcngggctggccgacgacggngncggnnagntcaagatgatcntaagccacgtntactnactantcactgggaatnaaacaggactgttttatgctctggaccttggagggaccaattttag

SEQ ID NO: 36528 - DNA, 991 bp, Oryza sativa
  Clone ID: PAT_MRT4530_40345C.1
ctagtggatccccgggctccgggcccccccccgtgggtgtgtgtgtgtgtgtgttcttgtctcgtcttttttttttttttttttttttaactgactcaatatgggatctacagtatcaatttcatatttgcatctgattaagcattctaggtacatgtgtatgtgtgcaaaaagaatgaaagaaattggtaaggtagtagactaacctcttcacagtgaaaaacctacgagaaaggtgaaaggagatgtatgtgaagatgtacagtggaaaaacatcagaattgtctgcctactgctttcagccccctaccacaaatgtggcccagcaataaaatcaagaatccagccatgaacccatgtcaatgcctctattggaggcccgcagaagaattaaatctgagccatctgttaccagctgaccaaccaacaatttggaaaccttggctggtaggagctttcagcttccagaagttagggatgctgtttgttaacttacgtagtgttagaaccaatggcctagcagtcgtcatcgagcatgctggctgcccaagtcattgtcctggaatctacaagatacctccagctcagaaatcctgctgggaaaagatgggccacgaattttcaagcgttttggcccaagctctatagatggagattggtagttgcaactattatatttctggctggaagcaacttcatcctcaacaatatttgcatctagttgatgtatcatcttcaatttggttggagctatgaagtcgtctccattttcagaaatgaagtcaacacaatgtatacaatcatcagtatggacaggttcactccttgcaccacaggatagttcaggtaacttatgttcttgtctgtcatgtgcattaattttcttcagccgtttcaatacctgattcccagtgaaatttgttgttccatcttccatgtgtcttttctcaggagttaggccagatcttctctttactctaaatcctcgtgc

SEQ ID NO: 36529 - DNA, 275 bp, Oryza sativa
  Clone ID: PAT_MRT4530_40346C.1
ggccgacccacgcgtacgcccacgcgttcgcaaacgcatacacaaatttatttcttaatcagccaacgctgacaagcggggggggagtaccatacccatattcccacccactcacacaacggcagatgcaaagagagggaaggcacattttccagaatacatgaacagaaagtaggtatgaagacacatggatacatacatctcgatcggaaaccaatcaatagaaggacagtagatccatatgtccttcgaaacactagtcaataactacatga

SEQ ID NO: 36530 - DNA, 364 bp, Oryza sativa
  Clone ID: PAT_MRT4530_40347C.1
aaaaggagcttgctcactacaacggcggtgaaccaacctttttacagggggcaaaagccggtgggacctgacaggaccattttgcgaaacacgtttgaactatggaatttcctgcaggaacacgatggtaaagtctaacgtgagacttgtaatctcaattgctagagagtttgaaggtcctggaatggaattttgtgattttattcgggagggtatacaggcccttgcgcggggctctaaagtgtgtgcttcaaaaggggtcgatgatttacataatactactggtggaggaaacaagcagtactcaaatacgttttagaacaaacccagattattcgcttgccggcacacatggtcgaagcaa

SEQ ID NO: 36531 - DNA, 453 bp, Oryza sativa
  Clone ID: PAT_MRT4530_40348C.1
atgaggactgtcgccgtccttcctggtccccctcctcatcggagacctccagcacgtcagaaactccaacggacagccaagtctttgctccagggacaagcgttagcctccgacccatccgctgcacgccgccggcagccagacgtcgccggccgccactcgcagctcgccgccggctgccgctcgccgctcgtcacctcgctctttcttgctgctgagctagcgaatgtggcacttgatcatctccaagccgggtcatcgcttgttactcttggaggttgttgcctcctggacggcttgtggaggagttgcccggaagaactacccttagtgatcgaggcttgggtagtcctctccttggccggcttccgcgttgccaaccccttgacgaagggggcgtgcggtggcttcgtggttgagcgatggagttgggctctcctcaatggggattag

SEQ ID NO: 36532 - DNA, 1342 bp, Oryza sativa
  Clone ID: PAT_MRT4530_40349C.1
ccacgcatacacgcctcgcccgaggagataagttttttttttttttttcaaaaaaaattcctcctctgcggcctcccctcaccgccgtccccgtcccgaccaccggaggccggcccgctccggcgagctgccgatacgcatggccgtcctcctccgcaccaccacctccgctacgaccgccacgagcggcggctcctcctcggcgacggcgctcctcgccaccacgttccgacgcggcggcaggcgcctcctcctcctccccgcgacacgcggctcggcgccgcgccgcgcggccttactcacggctcgcgcctcggcggagccgctggaggtctgcgccaaggcctccctcaccgtccccgaccgcctcggcgactgtcctttcacacagagagtgttgttgacaatagaggagaagcatcttccgtatgatataaaactagttgatctcgctaacaaacctgattggtttctgaaaattagcccagaaggtaaggtgcctattgtcaagcttgaggaacaatgggttgctgattctgatgttattacacaagcgatagaagagaagtaccctgaaccatccttggcaactcctccagaaaaggcttcagtcatcctaaccattgggaacaactttctttacagcgggtcaaaaatattttccacctttattggtttccttaaaagcaaagatccgaatgatggaacagaacaggcactgcttagtgagctgacttcattcgatagctatctaaaagacaatggtccatttattaacggtgaaacaatatctgctgctgatctctctcttgcccccaaactatatcacatggagatagctctaggtcactataagaattggtctgttccagattcactttcacatgtgaaaaaatatatgaagactatcttttcaatggattcatttgtcaagactatagctctgcaagaggatgtcattgctggatggcgcccaaaggtcatgggttaaattgtagctgtaaaagtaaggcactctgataaactataaactatacatcatactttcttcagtaaagctagaattataccacacacaaacaattttcgtatgattaccacttgttgctgctgaaatatctgggcatttcttttgttgctaatagtttatcggtgagtaagacattccagaaatgatgatgattatgataagatgtaaggttgatacttttctggtcaactggaaatatcggttagtctagtcatgactcatgaagatagatgtaaagtcactggcgaccctgggaaacaatttacatatttcaaggactattttcttggttacgaaatactagctgattga

SEQ ID NO: 36533 - DNA, 517 bp, Oryza sativa
  unsure (1)..(517): unsure at all n locations
  Clone ID: PAT_MRT4530_4034C.1
aaagcgtgttaatgatgggaaattttaagattcagttgggaagtcgtagtacagagttccgtaacaggcattcattcctgcattgctagagttaaagagacatcccaattttgagtagtgccaagtacagggtatcctttattttgtcctgcccaagtgtagcataagactaaacaaatggttctactgtaatttgtaaggtaatagtgatactacagaattgcagaactgcagattggttttgatacatagagttagctctgcaggtccaacaccttgagaagcgactaaatgatcaatttgctatgcggcgtgctttggagaaagcattaggttataagccttgtgccattcattcatccaatgagagctgcattccaaaggtaaaattttcctccacttttttcctcaattgtatcgcaaatgtttttgaaggctgtgttttcccgttgcttactgaaagcttctgngtctttcttctcatgttgtctcagcctactgaggaactaataaagga

SEQ ID NO: 36534 - DNA, 233 bp, Oryza sativa
  Clone ID: PAT_MRT4530_40350C.1
gccgatcgcagcagcagcagtaatggcacgcctcgccgtctgatccaccgccttcgccgccaagccgcgcctggcgcgcgcgccgtggatcccggccgagcggttctccgtgtcgtgctccgcgtcgggcaacaacggcggcgccggcgagatggcgcactcgctggcggcgtgggccaagacgttctactgggcgctggcgctgtcctcggtgctgctctcctcgggagaga

SEQ ID NO: 36535 - DNA, 536 bp, Oryza sativa
  Clone ID: PAT_MRT4530_40351C.1
tcaatggattcatttgtcaagactatagctctgcaagaggatgtcattgctggatggcgcccaaaggtcatgggttaaattgtagctgtaaaagtaaggcactctgataaactataaactatacatcatactttcttcagtaaagctagaattataccacacacaaacaattttcgtatgattaccacttgttgctgctgaaatatctgggcatttcttttgttgctaatagtttatcggtgagtaagacattccagaaatgatgatgattatgataagatgtaaggttgatacttttctggtcaactggaaatatcggttaatcagtggctttcttagttggcattaatctatagcgagtcatagggacaaacaacacatgaagtgccaaaaaacacaagtttatgtgcagctattgatttatatgcaatagttctttctctagagtctagtcatgactcatgaagatagatgtaaagtcactggcgaccctgggaaacaatttacatatttcaaggactattttcttggttacg

SEQ ID NO: 36536 - DNA, 171 bp, Oryza sativa
  Clone ID: PAT_MRT4530_40352C.1
tggtagcaccgcatgagacgacgcctctacactgcgctcccttcccctccccttccctcgattcgctaccgacgcaatggcggccaccgtcgactacctaccgctccgtgcccaggcgcaggtgggcctggctccgctccggccgtcggactcggtcgttgttggggcgcg

SEQ ID NO: 36537 - DNA, 250 bp, Oryza sativa
  Clone ID: PAT_MRT4530_40353C.1
gtgtcgccgcgccgccgccttcgtgcgccgcgccgtcgccccggagccgccgcgccatgcgtcgccgccttgcgccgccgtcgagcccgagggagttgcggatccaagcgaaggtcaagacccgcaagacattgagcaatgcaagtcatcactattccttgaacatgttgatcccaattgcgaaattgttttgtttacaaataaaattgcatgcaatgatgaacatcccagttgtgattatgccatgcct

SEQ ID NO: 36538 - DNA, 270 bp, Oryza sativa
  Clone ID: PAT_MRT4530_40354C.1
atatattctggtttttggttttttttttttttttttttaaaattaattcacaacacccttttttattgaacaagttcaaaacctccacaaaaatacacactaccgggacaaatttcacccttttttcaatacttatacattcatccaccccgtccacaccaatacctatatttaaaccgcacaccttcctacatttacttcacccggtacacacacccacacttttcttcaaaaacccccatttttttaaacctaactcacttaacttaa

SEQ ID NO: 36539 - DNA, 387 bp, Oryza sativa
  Clone ID: PAT_MRT4530_40355C.1
atggcggcgacggatgggagcggagcccgagcggtggcggcggatggggacggaacccgagcggcggcggcggtggatgaagacggagcccgatggtggcgacggatgggagcggagcccgagcggcggcggtggatggcggcggcggcggcgatggagggggcggagcccgagcgcccggcggcggatgtcagcgacggatgggagcaaaacccgagcggcggcggcggatggcggcaccgcggcagtggatggggatggagcccgagtagcggcggcggcggtggcggtgatcccaaccccagcaaacaggtgatgacgcttatcattgactctgtttgttgcgttgcttctggtcgtctgtacggctacgcgtgctgcaactaa

SEQ ID NO: 36540 - DNA, 1116 bp, Oryza sativa
  Clone ID: PAT_MRT4530_40356C.1
atgccgacagtggtgctcaacaaggtggcagacttcatccatccgtccagaggcgggtggggtagagagttggttcgggatattggctgggaaggagctgtgcgcgacagatgaggcatggcggctgggggaggatcggcggtcgccggcccacggcctccggcgcgtaggggtgtccactccaatcccaaccccaaccccaagcaaaacaaaggagtcccagcaaaggaggttcgacagcgacagcggcggagagccgacggcgatcgacagcagtgtaaaatgaatgtttggatgtgaatttaaatttgtaacagcgatgtttgatgtttggatgtttgctcttcaatgtttggatgttgaaaacgaagtgtaaaatcgattgatttttggatgtgaatttaaatttggatatgatatcaaaaaaagaaaaaaaatgaaggaagaatcgggtcagttcatgatgctatgaatgctgaggctgaagcttgtctgagtgctcttcggatcacttcactccatggcatctctcactttgctattgagactgattgttctgcactggtgggtgccttgacatcatgtgactttgattgttctccgggcgatcatagaaaaattttctttaagaatcatcatggtgatttcaaagaaagtcttataattacaatagattttcagggagggctggtgcgggcacgggccgcggcgagctcgggcgtgggtggcggagctcgggcgctgatccgccgccgccgggccgcggggagggtgcgggctgacggcacggtggtgggagaggcggtggagctcggcgtgtcggtcggcggccatgcgcatgatgagctcgaggtgcgcctagcggccgcggatccggaggcaggtgtggttggggggtgggtcgtcgtcgtggtctcaggaggccatgtggagcgagatgaggcatggcggctgcgggaggtcggccatcgccggccgacgccctccgacgaggaggagagtccactccaaccccaaccccaaccccaagcaaaacaaaggagtcccagcaaaggagcgatgtttgatgtttggatgtttgctcttcaatgtttggatgttgaaaacgaagtgtaa

SEQ ID NO: 36541 - DNA, 334 bp, Oryza sativa
  Clone ID: PAT_MRT4530_40357C.1
gcatatctagacgagcacattgtgagtgccttggatcacaaacattcaaactatacaaatttactgcctgtagacacgtcctatcctgaacgcacactttacacacatatggtccatctatatatgccttatcaccacatgcacttactaacaacatatctactccaagaaatgcagatgtaacagctcgtaacggtggaactaggcatgtaggacgctcggaagctccgcctaataacatagcgactgtgaacttggctcatgcgtacacggtcaccaattcgttactatacatgctgcgtacggacagcgttactacctgtacccaggacgg

SEQ ID NO: 36542 - DNA, 491 bp, Oryza sativa
  Clone ID: PAT_MRT4530_40358C.1
tgagtaggtatcaggtgtgatacctatcaggtatcagacgattctacacacgtttcaggtgatacttgcaagtatcatgtgatacttatcaggtatcatgcgatttctaccacgtatcgtgtgatactcgtgaggtatcatgtgaaacctgtcaggtatcagacgatttcaaccacgtatcgcgtgatactcatgaggtatcaggcgatacctgccatgtatcagacgatttctaccacgtatcacgtgatacttgcgaggtatcatgtgatacctgtcaggtatcagacgatttctaccacgtatcgcgtgatacttgcgaggtatcggatgatacctaccaggtatcagcactgcagccgtcccttgtagacaaggacggtgacggcggcggcaggggacaagcacggcggcagtggtggggaacgggcgcggcgacggcgggggacagcgacggtggcggtgggggatgggcgcggcgtcagcggcgg

SEQ ID NO: 36543 - DNA, 496 bp, Oryza sativa
  Clone ID: PAT_MRT4530_40359C.1
cgagtaggtatcaggtgtgatacctttcaagtatcagacgattctacacacgtttcaggtgatacttgcaagtatcatgcgatacttatcaggtatcatgcgatttctaccacgtatggcgtgatactcgcgaggtatcatgtgatacttgtcaggtatcagacgatttctaccacgtatcgcgtgatactcgtgaggtattatgtgatacatgtcaggtatcagtcgatttctaccacgtatcgcgtgatactcgcgaggtatcatgtgatatgcctgttaggtatcagacgatttctaccatgtatcgcgtgatacttgcgaggtatcggatgatacctaccaggtatcagagccgtcccctgtagacgaggacggcacgggacggcgcggcggcggcggggaacggcgacggcggcggtgggggatgggcgcggcggtggtggggggggacgacgatggcggcgagggacggccgcggcggcgggtgagcagg

SEQ ID NO: 36544 - DNA, 617 bp, Oryza sativa
  Clone ID: PAT_MRT4530_4035C.1
gcgttcgccgacgacggctcaagcctatcttcgtcgccggcttctccgatggttaccaatcgcgtagacgtcttctggcacgaaggaatgctccgacacgacgccgtagaaggcgtcttcgacactggatacgaccctggattcctcgacgtattggagaagcacccggagaacgccgatcgcgtcaggaacatgctttcgattctccgacgcggtcccatcgctcctcatgtcaattggtttaccggtcttccagcaatcgtttcggagcttctaatgtttcacacttcagagtacattgagaagctagtggaggcagataaatcaggagaaaggtgtgaaattgccgcaggtactttcatgagcccaggctcgtgggaagctgctcttcttgcagctggaacaactctttcagcaatgcaacatattcttgattgccatgggaaaattgcatatgctctggtacgcccaccaggtcaccactcacagcctactcaggctgatgggtattgcttcctcaacaacgctgctcttgctgtcaagctggcattgaattcgggttcttgttcccgagttgcggttattgacatcgatgtacattatggaaatggcacagc

SEQ ID NO: 36545 - DNA, 1543 bp, Oryza sativa
  Clone ID: PAT_MRT4530_40360C.1
tttggttttttttttttttggggtatctgcatttccacggcccttactattcatgtttttcttggaaaacttccatccaagcaataaacccatcagtttattggattccacaaaattccccaaatccatcacattgcaaggttgccctcctcgtgatcttgcaagacccagcgcccgctcgcgttctgcaccatgcccttgttcttctccacccaccacgccgccggcacctggtactcgtccctgagcgcgtccacttccttgttcaccagcgccaggtcacggtccaccacaaggctgaaccccgcgccgtcgccggcgccctgcgtgcccgcgacggcgtgcaggtagcactcgaggttgtgccactgggccgggcccgccgggttcttcaggtacggcgaccggcgcgtgtccacgagcagctccgcgccgacgtccttgaagaaggccgacggcaggatggtcggcacgatgtccggcgcgttgcggacgcggagcaggctcaggttggacgtcgagtcgaaggccctcttgaactgatcgtcgccgacgcgcgggctggcgagggcgattgccgtgacggggaccgggacgcgggacgagccgcggacgttgtagccgttggcgacgatgtcgatggcgttgagcgtggagagcgcggcgcccaggctgtggcccgttatggtgatgctgcagttctcgttcttgtacgcgcgcagaagtctagttatttcagctagcacctgctctcgcgcgctaagtttgttgaacggcgacgagaaactcttggacgtgtagacggacaggaaccccctgtgcaccgacggctgcgtccagcccgggcccggaccgacgacgccgtccgccggcaccagcgtgatgtccaggtcgttggcccactccaccgcgcgcttcgtcccgcgccacgccaccacgatgtcccgcctcccggccttcgcggcgacgccgtcggcggccacggccacgtaccccatccagttggactccccgctccacgccgcgcccgccgacggcgcgggcctcggcatgaacgcgtcggggaggcggacgctcgacgtcgcgtagacgaacctcgtgacgcggtacgcgtccgggtcggacgcccgcaccttgcggaggaacgcgtcgggcgcgtaccgcgacgcgccggcgaacggcgacgccgggtcgccgatgagcgcgtccgacgtcgcctgcgccagctcgccgtagcggatgatgtcgcgccggaggtcggcgtcgagtgggtcgaggaggccgtcccacctgtccttgccgccgccgctcgtctgcctccatctctgtgcactggctacgtcggtgagagtggtggctagcagtacagagaccagcagaaagcaacacatttgtgcaactttgtgtacatgcaactgaaagaaaggagaaacaagagctggatcacggcctcacgggatggatgggtacaagttactatggatcccacactgcctgaacgtgcagggaaagaccggcctttgaaccaagagatgaaggaaag

SEQ ID NO: 36546 - DNA, 231 bp, Oryza sativa
  Clone ID: PAT_MRT4530_40361C.1
atgaggatttttttggcaggaaattcgtaccctttgcttttcggagttgaaacgagaaaacgcaacatcatcaccaattacaccgcatcacctgctcctttggaaaatactcaccggccggaatggcaccgcgacgacaacggcgtcgacttcaatcgacgtgatttgggcaatcagtgcacccagaaatcaacgagacagccaaagctttggactttcgggtccggttga

SEQ ID NO: 36547 - DNA, 102 bp, Oryza sativa
  Clone ID: PAT_MRT4530_40362C.1
ccattcactggtgggctgggccgtgggcttcccaacggtccaaggtcgtgcactgcaggaaatggggcccagcccgaagcataagtgcaaacaacagcccag

SEQ ID NO: 36548 - DNA, 447 bp, Oryza sativa
  Clone ID: PAT_MRT4530_40363C.1
agcgggcgaaggccgatcccgcgcgcggaaggtggcgaagctgggggagcgcacaagccgaacaaaggcgaaaaagacacgggaaaagcacgccgcacgcagtcgggccgccacccgccgccgccgccgccctctgggcccgccgtctcaactagtgtgtgcgctggcgcggggccgcgcggatgatgtcgtcgacgcggaggatgacctcggcggcctcgtggccggagaccagcacctggctcttgcacttgaacgactcggtgatgcggaggtccaccatgtcgcccaccacgccgcgctccatgtccaggcccgcggtgctgcggccctcgtagtgcgcggcgcggaggcgggtcaccagctcggagctgtcgaagccggcgttgtcggcgatgatgggggggatggcgcgcaaggccttggagaaagcctcgatggccagcg

SEQ ID NO: 36549 - DNA, 363 bp, Oryza sativa
  Clone ID: PAT_MRT4530_40364C.1
gcgttcttttagtccgccccgtgccccaacggccgacgctgctgcacgagacggtccccggccgaatctgccgtgcgcggtttggcacagtggcacacgcccaaattccatccctcccgttcctagccggttcctcttcttcctccccccctcgcaaaaattcaaaaaaaagcttgcgctcctcccgtcctccggcgccgatctgctcgaaggaggccacccccaaccttcccgaccaaaccaatggctttctccaacgaaacctaccgcgtcgagctccgagccgccgcccgccagcttggggagcgcggactctactccgccgtcaaatgggcggtctagctgttcgtttgtatctagccc

SEQ ID NO: 36550 - DNA, 860 bp, Oryza sativa
  Clone ID: PAT_MRT4530_40365C.1
accggcgcaggacgtgcggtcagaccgaccagggtcgtcggctgaggcttctgttgacgctgttcgagatggtcctccagagacttcaacttcgaccagtactgatttatgtggacgatatcatatttggttgttcaactcacgctttggttgtggagtttgctgagactatgcgcagggaatttgagatgagcatgatggctatgttggatcctgatgaagatggtgaagctgttgatcaaaaggagtatagaagtactgctggatttggtccggtcggaccgagcaggtgctgccagtcagacaggcgtgtattgcacggtcagaccggcgcatcggccgacactgtgtcggtttcggcgcggcaggcgatctcggcggttcgaccggagttcgatctcggtcagaccgacatgttccaggtggttagagcggcgcaacaccttcgcgccgccaccgccgccatgtcggctgccctccacataccaatgtgccggttctcggtgcaccacgcgctccccgaacatttcctcttcatcttctccaactccgacgacagggacctcgccctcgcgcgctccccgatcccggcggcctcctcccagcagctcctcctctggccatggacgcggcaggcgacggcgacggctttctccttgccgttcaaagtctcgctggatctcgtgggtgttccggcgcacgcttggaacccgtccacggctgtagtgctcatcgctccatgtaggctcttcgacatggacatggaggcttgcagactggccgactttaggatgttgcgggtctccgcccttgcgcacgaccccgttcatcccgcgggagcacctcctcctcatccctga

SEQ ID NO: 36551 - DNA, 2129 bp, Oryza sativa
  Clone ID: PAT_MRT4530_40366C.1
atgtcagccgcggcggtcaacgacgtcgccgcgtggatcctgctggcgctcgccgtcgcgctctccggctccggctcgccgatcatctcgctctgggtgctcctcaccgccgccggcttcgtcgccgccatcttcctgttcctccgccccgcgctggcgtggatggcgcggcggtcaccggagggggagcccgtcaaggagctgtacatttgtgccaccctcgccatcgtcctcgccgccggcttcgtcaccgacaccatcggcatccatgcgctgtttggtgcgttcctcgtcggcatcgccgtccccaaggacgggccgttcgccggcgtgctcatcgagaaggtggaggacctcatctccggcctcttcctgccactctacttcgtctccagtggcctcaagaccaatgtggccaccatacgtggagccaagtcatgggggttgcttgtgctcgtcatcgtcaatgcctgccttggcaagatcggcggcacggtgatcacgtcgttgctcgtcaagatccctgtccgggaggccgtcacgctggggttcctgatgaacaccaaggggctcgtcgagctcatcgtcctcaacatcggcaaggatcgcaaggtgctcaacgacgaggcgttcgccatcatggtgctcatggcgctgttcaccacgttcatcacgacgccgatcgtcatggccatctacaagccggcgcggccgacggcgccgtacaagcgccgcaccgtggacggcggcgaggccgacggcgagctgcgcgtgctggcctgcttccacaccaaccgcaacatcccgacgctgctcaacctcgtcgagtcgtcgcggggcaccgggcgcggccgcctcgtgatgtacgccatgcacctcgtggagctctcggagcggtcgtcggcgatcaccctggtgcagcgcgcccgccgcaacggcatgccgttcttcaactccggcgacaaggccgagcagatggtggtggcgttcgaggcgttccagcagctgagctcggtgcgggtgcgccccatgacggccatctccgacctggacaccatccaccgcgacgtcatcgacagcgccaccgccaagcgcgccgccatcgtcgtcatgccgtaccacaagatgctccagcacgacggcacgttccagtccctcggctccgcgtaccacgccatcaacaagcgcgtcctccgcgaggcgccctgctccgtcgccgtcctcgtcgaccgcggcctcggcggccacgcccaggtgtccgccaagaacgtggccttctccgtggcggcgctcttcttcggcgggcccgacgaccgcgaggccctggcgtacgcgacgcggatggcggagcaccctggtgtcgccgtgacgctggagcggttcaggccgagtcgcgcgcagcccgacgaggaggacgccgccgacgaggcggcggtggaggcgttcaagtcgaaggtgggcatggtgaaggacgggtcggtgcggttcgacgagcggccggcgcagagcaaggcggaggtgatggaggcgatcaactcgctgtccatgttcagcgtgttcgtggtggggaggatgccgccgacggcgccgctggtggagaagcccgacgagctgggccccgtggggagctacctggcgtcgccggagttcaggacgtcggcgtcggtgctggtcgtcaagaggtacgacccggcggcgaacccggcgagcaagaggtacgaccccaaggcgaggccacccgccgcgacggaggaggacgccctcgacgagctcaccggcgccgccgttgtcccggtggcgcattcaccgatgaaccacgacattgtatgactttaatttgctcgtcgccggccagaattattatactaccagtattattatactaccagtagtagttcatgtttgatgattcacagaaaatggtagcgatatatgtttgttgtgtgtgtggagtgttatactgatgaagtgtatataataacatcagtcgtttttcttgtacgcagtgtgcagccttcgtcgaattaatcatgctgctagctgctttttgcgttatcaaaaaaaaattttgacttgtttttcaaagtattgctgtcaaacttttataaatttgattgctaatacgactg

SEQ ID NO: 36552 - DNA, 607 bp, Oryza sativa
  Clone ID: PAT_MRT4530_40367C.1
atggattgctgccggcgcgtgaacccgttccgcgcctgctcgccgctgcgggggctcgggtacctcatgctggccttcgtggccgccatcgtcgccgtctcctactacgccgtcgtcgtctacacctggggccctctgctgctcggcggcggcgccgcggccggggccgcggccgtcctcgtcgccttccacctactgtttgagttccaagagacaccataccatgagtacacggcagtacagtatcactgtgcctcacaaaatcttgacactaacccaggaacaaaacaggctcccaatcaggttggtgcaggactgcagatgttattatctggcagaatagatataccaaatttgatgcttgcaatgattatatggtgctacttgatggttgttttcaccgatcctggtgctgtacctgaaaactggagacatgcttctgaagaggatggcataggtgtgaactctaggactatatcatataattgggatgctacataccccaatccagaagggcaaagtgcacaaaaatattgttctcgctgccaaaatggcaagccgcctcgttgtcaccattgttctgttttactgtgctaagttggataca

SEQ ID NO: 36553 - DNA, 156 bp, Oryza sativa
  Clone ID: PAT_MRT4530_40368C.1
atggtaacaaagacaaccaacctaagggagtcgctgccatgctcgctgcccgcgctgctggacatcatcgacattaacatctctacaaaggacaacaaagtactcgagatcaaaatgctaaagaaggttaaggcaatgatcgcacacaaagcatga

SEQ ID NO: 36554 - DNA, 1578 bp, Oryza sativa
  Clone ID: PAT_MRT4530_40369C.1
caaagcaactttcgtatataatttttttgcaaaaatatacaccgtttagtagtttaggaagcagtttacagatggacagaatcactatccaaactctaggacaaatttgaacagaagtacctcacccaccgcccaaaacacacacacaatgacacaaaaatgaagttaactttacattgtctaatgctcaatactctaatgcctatatgaagaagctgccgtgaataagctttgatcaaaacaatgctgtgcaacgatcgatgcttcatcatgttcacaacccacaaaaatctcgggagaatttctcaagcaaaagagtctcaacgttttgtcaaactaactctcagtcgccaatagatttgctgctagcaaatcgttccatgtatctgttggccctggcaaacaccaatgcatgcaatcatcatgcttcttcccaccagttgttgaaggatgagcatcagctctgaattcactcattccagttatattcagaacattgaaagtagacttttcaagagccctcaccaagtgctggtttaccaagcgtgcttctacgtttgtgccattgttgtccaaagagaaaagttcctcaacctcttctgcagacaagggcttgtcacgttgacaagatccaccttcattccagtcaccaccttcaaaatgcctaggagattgagtgcggaagagtttcaccccattgggtctcattgctttgttcacaaatattatcatgtgtttaagagccaaatccagtcctgcaggtggcaataaaggaggtataactggaatccccttctcaaagaatagcattggtgactgtactggattaaattttgaaggggcccaccaccaatgccctgtgttgaaaataagaacatcatggaagcttggtgcctctgcccatgtttggtcaggaatatcaacgtctactctgtagccttgcttgtatccaagagattctaggggacccccatttggactggctgaccacctaccatagcgtaccaaaagattagtcctgtggtatgcgagggtgaggttatagcgcaggaatgtgaaaccccggtctgctcctgcaggacgccacttgcgaacctccccactcgcccccctaagcatgcagaccaacgagacaaacatattccggttcaatgaatcacccacaaatccaatgctggtgttcctgtggcactccaggaaacggagcgggtcgagcctggggagctcgcacccgcgtggcctccaccgccatcggagcagctcccggccgttgcgcttcccgttggcgaggcagttccaccccttgaagatctccctgcacgtctggtcgtacctcaggccgccggacaccgcgggatcgtcgtcgtcgggaacccactcgccggacgcgtagtcgcagggcccgcgctgccggggctccccgtcgccggagccgcggagcagcggggagttgggggagcgggcaggcgaggaggtcaggtgcagcagcaggaggaggaggaggaggaggaaagcgagggggaggagcgcgcctcgcctccgcacgccggcggccgggctcctcgccggcggcggcat

SEQ ID NO: 36555 - DNA, 903 bp, Oryza sativa
  Clone ID: PAT_MRT4530_4036C.1
atggttgttcagaatggttgggcctatgcaacaggattggctatagatgttttggagccagtagttggctacactattgaccttgctcttaaacgaagattggagacaatccccttcttcgttgctgacattactgtccctgccgccggccgccaccccgccagatcaggccggggcggcacggatctagcggtcgccgccgccgccaccggggcgactcccctggccaccggagcaggctggcgagaagccccgccgccgccatccttacggtctttgctggcgaccgctcaggcagcggcgaggtggaggaggaagaaggagcgggaaggggtggccggacttgtcgcctccggagccgtcccgggggtagggcgacgcaagagcgtgacggttgacgctgtgaggtcccttcagcggtgggaacttcatggctgcggatcaatggaggcggtggcgatgaccacggatcctgaggcggggcccccatttgccaccccttatggcggatctggctggtggcggcgcgccaacggtgttgccaggaggccggaggacggcgcggctgtcagcgacggtgcgacggcagggacctctagggccggcgcgactcgggaaggtggcgacaacgggcagccgaagaaggagaatatatggggaccgacggcagcggggatggagatgatggcggggatggaagccggcggcgaggatggtgacagcgggccggatccagtcgcgccggagtcgggcagatctggtgtgaggcaagcccgcagtggtggcggcgctgcggagttcgcgggctcatggcgatggtggtggcagcgactggacagcggcgacaacaggtggctggccaacggtagcatcggctgccggctactgtggcaacgacgctag

SEQ ID NO: 36556 - DNA, 1348 bp, Oryza sativa
  unsure (1)..(1348): unsure at all n locations
  Clone ID: PAT_MRT4530_40370C.1
ctactcggggcgtgtcatcctgggcagcacgtgcagcgacaccacccgcttcccgcccggcgccgccacctcccacatgcgcggcggcggcggcggcgccgcccacgattccctcctcgctgctggtggcggcggcggcggtggcgtgacgtccacgatcaacaccttcccaccgccgggggccaccacgcaggccttcccgccggcgacggtcatctccgccgcccccttgaggcggtcggactcggctaccgtcctccagcggtcggcgccccagtcgtaggcggtgagcgcgccgcgctcctcgtcaacgacgtagatggtctcgccgtcgtccgggggcgacgccgccgcggggcccttccagccggcgagcatgccgggcggcatgtcctcccagcggccggcgcggaggtcgaacacggcgccctccttggcgccgggggtgcggaggttgaccatgcagaccttcccgccggagcagacggcctccgcggcgtcgcggctgaaccgcccgtcgcgcagcggcgggatcggctcccacgcggcggcggggggcggcgaggccgcggggtcccacgtcgcgccggagcgggcgacggccgggtcgtagccggcgccgacgcccccggcgacgaacacgcggccgcgcgccgcgccggccgcgcaccagcggcgcggggatagcgggatccgcgggccgagctgccaccgcggcgtgggcgcggccgggtcgaacacgagcgggcgggagagcgcagggtgcagggactgcgtggagcccgagacgaggacgaggcggccggcggcggcgacggactgcagcgggaggcggcgagcgaggaaggaggggtgccagagcatgggcggcggcgacggcattggcggcgagggaagcgcgtcccagcgtccagccaaggggtcgtaggcggcaaacgagacgccggcgtcggcatccgcgtcgtcgaggagcgcgtacagagacaaaaacggcgggaacgacggcgcgtacatgagccgtctccacggccggcaaacggcgtgcaggagtcgcggcgggagcggcgagaggcagagctgcgccaggtggtccggcaacccggggagcagcggctgcggcggcgtggtggtcgtcatcgtcgtcggcggcggcggcgccaccgcctcctcttccatgccgccgtccatggcagcagcagctggtagcgaagggcggagccgcttgtgattctggccggaggaggaagtgatcgccgtcgtggtcgtcgtcggcggcggcggcttgcagtaggggcgcttagccgcggccatcatggtcgcaatactactatatnagaggaggaacccg

SEQ ID NO: 36557 - DNA, 317 bp, Oryza sativa
  unsure (1)..(317): unsure at all n locations
  Clone ID: PAT_MRT4530_40371C.1
cccacgcgtccgcccacgcgtccgttcttgattcttgattcttgctgcttcttgcttcttgttgctgttgttcttggttggatctttgatgaaggtggggaggggatcgagggggggaggtgtgccctaanctgaaggattggaggctaagcatacatgtactgaactactgaacgaactgctgaccaaagataaacaaaaggccatcactgacactgaaagaccccatgcacatgcaaaagctctaagctcaactctgcatgatagaaccatatcagcatctatggatagatgctatctactacatggttccacgg

SEQ ID NO: 36558 - DNA, 633 bp, Oryza sativa
  Clone ID: PAT_MRT4530_40372C.1
atgagggtgagttcgcctccccacagcgctccggaccttttcggggcgacgtgctcgcttccgctgatatccacgtcatcccgctccctccgcacgcgcaaggctggtgcggctatgggcccggttcctgccgtttcccgcgctcggggagcgcctcttcccgcgcggccgcgcctccggcgcttgtgatgaagctgctgcgggcttgggtatctctaaatgggctgttagggtggggcccaaccaagggacagcaagctagcagactcctttgcgcgtcctccttcgcccaggcgctgctacgatcgttcgatgccgtggtgaaccgcctctaggctgcgcttgacgccacggacgccgcggcggcgtccctgttgagggaccacacggcgctcgacgacggcaacacgcggctcggggcgaggctagatcgcgcccacgcgtcgaaccttattgtccttatccaagcacatgctgaaaaatctaaagtcaaatgccaagaaagccgaccatcaaaagctttcaatgggtacaagccaaccattgatttcgaggtaactgaccatggactttcaatgggtacaaggaaccattgattctaagggaactgaccgtgaacttgttaaaggagga

SEQ ID NO: 36559 - DNA, 258 bp, Oryza sativa
  Clone ID: PAT_MRT4530_40373C.1
gatgggtacttcaagatcataaggggcacaaacgaatgtggcatcgaagaagatgttgttgctggtatgccctcgacgaagaacatggtgaggaactatgatagcgccttcggacttgacacaattgcagcagcaagcactcgcttggacgcatctagctccaaattcctgcaaaacactggatatcttggttcaatgggaaccgagaagtcggacaatgacagcaggcatcgatttcaggattccccattcaagtaa

SEQ ID NO: 36560 - DNA, 615 bp, Oryza sativa
  Clone ID: PAT_MRT4530_40374C.1
atgagggcgagttcgcctccccacagcgctccggaccttttcgggccgacgtgctcgcttctgctgatatccacatcgtcccgctccctccgcgcgcgcgaggctgatgcggctgtgggcccggttcctgccgtttcccgcgctaggggagcgcctccggcgcttgtgctgaagctgctgcgggcttgggtatctctaaatgggctgtcagggtggggcccaaccaagggacggtgcgctggcagactcctttgcgcgtcctccttcgcccaggcgctgctacggtcgttcgatgccgtggtgaaccacctccaggctgcgctcgacgccacggacgccgcggcggcgtccctgttgagggaccatgcggcgctcgacgacggcaacacacggctcggggcgaggctagatcgcaccctcgcgtcgaaccttattgtccttatccaagcacatgctgaaaaatctaaagtcaaatgccaagaaagccaaccatcaaaagctttcaatgggtgcaagcaaccattgattttgagggaactgaccatggactttcaatgggtacaaggaaccattgattctgagggaaccgaccgtggacatgttgaaggaggataa

SEQ ID NO: 36561 - DNA, 669 bp, Oryza sativa
  Clone ID: PAT_MRT4530_40375C.1
atggtaggtcatgttaaaagcaaaatatcaggagatgcaaaggccaatatcagttccaatggaagtccttctgttatgctcatgaatattgccgatgaaacaaagaagacacaacttatagaggtagttgagatgcttggcggagtagtcacttgtgaaggaaattcatgtactcatgtcattactggaaaagttcgaatgactatgaatttctgtattgctttgtgctctggagcctggatagtttctccaaagtggctgaaggaaagcttcaaaaaagggaaatttgtaggagaagcagaatatgtttttcaagatgatgaatttaaggtgaaatacaagtctgaactgagagatgcagttgtgagagctaaagagaggccttgctcattattttctggctacactttctgtctgacgaagaacatccagccctccgtcaatgttctctctcgcatcattaaatcttctggtggcaagctcatcaataagctggatgacataactcagcccttgaagacaatcttcttagcgtgtgaagaagatatggaacttgcattggatgctgcaaaaagaggcatcaaaacattcagcggtgagtggttcttgagctgtgtcatgacacaagagcttgaccttgaggcccctcagttcactgaatctctctga

SEQ ID NO: 36562 - DNA, 3429 bp, Oryza sativa
  Clone ID: PAT_MRT4530_40376C.1
atgacatggactagcaatgcagaaatttatttatcatacaatgttgagcaggaagtagaggagcacggcgcttccgataaagttgtcatggagaacattctgtcaaacaatgatttttcggaaggtctacatttgtggcatcctaatggttgccatggatttgtggctgttgaaggatcaggttatcatcatggaataaggcctcactcagggtcaaattatgccgtacttactcgtcgcacacataattggcaagggcttgagcaggacataacagaaaaggtcactgttggtactgagtacattgttgctgcccatgtcagagtccatggtgaactcaatgagcctgttggaattcaggccactctaaaacttgagggcgatggttcttctacgaactatcaatcagttgcaaggatctcagcatcaaaagactgttgggagaagttggaaggttcatttgaactaaaaactctaccaagacgtttggtattctacattgaaggcccccctcctggtgtagacttgctcatagattcagtcaccatctcctacaagaaaacagagcgggctgcatccaaactggttagtggaacagaaaacatcatttcaaattatgatttttcggaaggccttcatttgtggaaccctatctgctgtcatgcatatgtggcatctcaatggtctggtttccttgatggtattagagggagctcaggagaaaattatgctgtagtttcgaagagaactgaaagctggcaaggtcttgaacaagatattacagataaagtatctgctggtactgcttatgcagtatcagcctatgttagagttgatgggaatatccatacgaaagttgaagttaaagcaaccttgaggttgcataacacagatgattcaacgcactacagtccagttggaagcctgttagcttcaaaagaaaagtgggagaagatggaaggatccttttgcttgacaaatatgccaaaacgtgtagtattctacctggaaggacctcctgctggcgtggaccttatcattgattccgtaaatgtaacttgctctggatatcagcagttaaaagaagtaaaagtaccaagtggagttgataccatcgttaagaatcctcactttgacgaagggttaaacaattggtctggaagaggatgcaatatctgtaggcatgagcttactgcttatggaaatgtcaagcctctaaatggcagctattttgcttcagccactggacgggtccacaattggaacggtatccagcaagatatcactggcagggtacagagaaaagttctttatgagataagttctgctgtccgcatatttgggagtgccaatgatacagaagtctgcgttactctgtgggtacaagaatatggccgtgagcgatatgtaagccttgcaaagaacccggcatctgataagcaatggacacatctaaaaggaaagttcctcctccatgccccgttttcaaaagctgttattttcgtagaggggccacctgcaggcattgatattcttgttgatggccttgtcctatctccagcaagaaaactccatgctgcaccccgcccaagaattgagaatgtttcatatggagctaatgtaatacataacagtgctttcagtcatgggctttctgggtggagtcccatggggtcatgtcgattgagtatccatactgaatcaccccatatgctttctgccatcttgaaggacccctcagctaagcaacatataagaggttcttatattcttgccacaaaccgcactgatgtgtggatgggcccttcccagttgataactgacaagcttaggctgcacaccacttacagagtttctgcttgggtacgtgctgggtctggaggacatggacgttaccatgtaaatgtttgtcttgctgtagatcatcagtgggttaatggtgggcaagtagaagctgatggcgatcaatggtatgaactcaaaggagcattcaagcttgaaaagaagccatccaaagttactgcatatgttcagggaccgcctccaggtgttgatctcagagttatggggttccaaatttatgctgttgatagaaaagcacgttttgaatatctgaaggagaaaactgacaaggtaaggaagcgtgatgtcatcctgaagttccagggatcagatgctgcaaacctttttggttcatctatcaagatacaacagaccgagaacagttttccatttggatcatgcatagggagaagtaacattgagaatgaggatcttgctgatttcttcatgaagaactttaattgggctgtatttgaaaatgaactgaagtggtactggacagaggctgaacaagggagactaaattataaagattctgatgagttgcttgaattttgccggaaacataacattcaagttcgtggtcactgcttattctgggaagtagaagattcagtccagccatggattcgatcattacatggtcaccacctgatggctgctatacagaatcgtttgcaaagtctgttgtcaaggtacaaaggtcagtttaaacatcatgatgtaaacaacgagatgcttcatgggtctttctaccaagatagactgggaaatgatattagagctcacatgtttagggaagcacataaacttgacccttcagcagtactctttgtgaacgactacaatgttgaagatcgatgcgactcaaaatctacaccagaaaaattaattgaacagattgttgatctccaagaaaggggtgctccagttggtgggattggcttgcaaggtcatatcacgcatccagtgggtgacatcatctgcgattccctggacaagctctccatactgggtctccctatctggatcaccgaattggatgtcacggctgagaatgaacacatccgagccgatgatctggaggtgtaccttcgcgaagcctttgcgcatccttccgtggaggggattatcctttggggattctgggagctgttcatgttccgagaacacgctcacctggttgatgttgatggaacgatcaatgaggctggcaaaaggtacattgcactgaagcaagagtggctaaccagcattactggcaacgtggatcaccatggagagttgaagttcagaggctaccatgggtcatacacggtagaagtagcaacgccttcaggaaaggtaaccagatcgtttgttgttgacaaggataacgctgttcaggtggttaccctgaacatttagcttgtgagatatgttcttatggagagtgaggtatatatatactgcgacatgtctttttggatgattagagtttactgttttctgtcaacaatttaccatgtatacgaactgctgaaattgctgtcatgccacttattaatgccatactcacatttacctttaaaaaaaaaaaaaaaaaaa

SEQ ID NO: 36563 - DNA, 452 bp, Oryza sativa
  Clone ID: PAT_MRT4530_40377C.1
caagtagtttcccacccaaacaattaccaattgggcaaccaatgggatcccgtgtagccaagtaacaatgatgccaaaaacgctttggccattggggttagcctccacaacccaatgttcatgttcccagccaaatggcgctcctgcaccagcaaatgttgcatccagctacaaggcaatggatcccgtcaagtgccacctgtggcaccagttgccagatgatcgcagagcatgcaaacaaagttatttggtgctggactcggccacgcagcagatgtatgaagagtggcgatgcagatccacatacatgtgcaacatggcccctgtcaacttccaactctcttcctgtggttgttgtggatcaaacgtgggttacatgtactctagtaataaggtgttgcatactatcgtgtcaaaacactagaaataagaacctggaataaaatatcaat

SEQ ID NO: 36564 - DNA, 612 bp, Oryza sativa
  Clone ID: PAT_MRT4530_40378C.1
atcagttcctctacaggtgccgctgcttgatgtgtttagtaatggcaaaataatcaaggagtcaagaagtaaaacactactccactaatgctgcacactaataggtatgcacataataccgcactacaattttcctcaaaaggagctcagaagtcaccgtccagcccataaaaacaaattgatcacaccacattgttaacaatgaaatttggtaagcctcgaagtcattatcggtctagagtcagtatcggctttagagtcctggaatcggccgatgggaattatcaagttgccgatagtcggatttctgctatattcacctactttttgattgccaacaagggtttcattgaggtttcagccgatgaaatgacatcggacttccagccgatgtatgttttaaccttcggattagtgcttattctatcatattgttagccaattgatttctactggattatattattgttgtattgcattatcatcagccgattgtatttatatcgttatctacattggacatataaccgatggctcaaaatcctatcgctattggttggtatcggcatcagttggaattactccatcggtttgtcagccgatcggctcatt

SEQ ID NO: 36565 - DNA, 920 bp, Oryza sativa
  Clone ID: PAT_MRT4530_40379C.1
ctatttcatggaagtgttctaagatgaactccgtttggcagtgtaggagcgtcatctttgcagtgctagacaagcaaaggaaaagatccctatgggcaggaaccggagatctcacaagtggaaaatgcaaagttaattgggtgaggacatgttcacagaccacaaatatgggccttgcccctacacctcgagaaattcgtaagagcgttacgaatgagatggctatggcattagttgaaatagctgggaaaagcttcgttaggaatggagactccatgtgacgacactaacaaaatcctctttgcggtggcaacacaaatcaaggtgggagacagaaccaccgtgcgattctgggactcagcttggttcaatggcttgcggcctaaggatgtggcaccaaaagtgtatgcaatctcaaaaaagaaaataaaacactaaagcaggccataaccaacaatcagtgggtgtaggatcttgacttgccgattgtacaaggtatgacaacagacctcctggactagttggtcaacctttggaatgggtccagctggtcgagctgtcccctagtgaagcggatgacatcatttggaagatcacaaataatgagacatactcagcagcctcaacatacgaagcacaattcttcggctcgaccaaaacaaacttcgacatgctgatctggaagccttgggccctagttggtcatgtagaacagagtcctgacgtccaacagactgtattgatctactagactatatgtgagaggttgacgaaacaacacatactgcccactttgcaaacataccttggagacagctttatacctcctggcagaaagcagatacactagaagaatatggaacatgattgcaacgtagacagcgcaagaacaattcaaattggcatcatgagaggcgatg

SEQ ID NO: 36566 - DNA, 238 bp, Oryza sativa
  Clone ID: PAT_MRT4530_4037C.1
acggcacgaggctatcctctatgtatttctatggccgaaccccccctacgacacgccgtcgccgccgaggggagagagagagaggccgccggccgccgctaccactagaccccccccccctacgccggagcgccccgtcgccggtacgggtattgatacgataggcgtaccaagaggatacctagaaggagtagaaggacctagcagaaggaccctacccacctacatagcagcgcag

SEQ ID NO: 36567 - DNA, 1617 bp, Oryza sativa
  Clone ID: PAT_MRT4530_40380C.1
atggactccgccggcgtcatcctctccatcctcagcaagctgcagtctctcggcttctgcgcccatctccggatcggcgacgccgcggcctccggccccccctcggacctgttcgacaccgtcctcgccgcgttcctccgcgaggtctacccgggcggccgcgaggtgcgccctctcccggcgaagctcggcgacgggagccgcgtcgacctgctccgcctcttctccgccatccgcgccgccggcggctacgccgcgacgtcgtcgtcccccgccgtctgggcctccgccgccgagtccgtttgcctcgacgccaccctcgccgcgcccgtcaagctaatctaccacaagtacctcgccgccctggaccgctggatccagaggctcgtggaggcgcatggacccttcctggatggcaacgacgggaggaagaagccagagccattcttcgattccaatggaagggagaatgaagaaccactcttggaatgcaatgggggagatctgcagcatccaatcttgaagaggaagagggaggacatggttgggatgttggattgggtcagggagcttgccgagaatggcggtgaggcaggcaccatggctgccggctcggcgaatgggtactactcgttggcgttggcagcgaggaaggcggtgttcgcgaagagggctcgccgctcgagcatgacgatgaatggtgcactcatgcaggaaatatttccaatggattgcaagtgctgcatgagttccagcactactggaattgacacacaagaaaaatgcagtaaaaagattcaacttgtcattccacaggctggttcagatattaatgaattgataaatgttgtagaaaacataaatgtgccttcaattggaatggagcaagagaacaacattattggacaagcgaaatatgagagtaggaaacatcataactctgacaactggctttttacgagtcagcagaggaacaaaataccagtgggctctgagttccaagcacaagtaccacaatggactggtgagttgcctgtaagctatgataatgcagaaaccaggaaatggttgggcacaaaggtctggcctctggaaaatggtaacaggaaattatcatatttttgtaaccctgttggaaaaggtagagaaggtgtttgtggctgcaaccttccaggatctgtagaatgtgttaggtttcatgttgcagaaaggagacttcagctgcgacgtgaacttgattcagctttctatgcatggggatttgatcgtatgggagaggaaatcgcactttcctggacagattaagaggaagcaaatttcaaggcttgcgtgcagcttaatgccccatcttcaggaaggaatttctggaagcgtctccatatgctttttcagtcaaagggtaggaaagaacttgtgagctactattttaattgttttctacttagacggaggtgttatcagaataggatgactccaaataacatagatagtgatgatgaggatgagacagaatttggattcttgggtaaccgccttggtcataatgcaactaagtatgacagttccaagtataccctttgcatcgaaagtacacactgcatggatctcaaccaatag

SEQ ID NO: 36568 - DNA, 326 bp, Oryza sativa
  unsure (1)..(326): unsure at all n locations
  Clone ID: PAT_MRT4530_40381C.1
gtcaaagatccggggtgctgagnccntgccttgaggatgacgatgatgacgaggatgatgatgatgacgaggatgacaaagatgatgatgtagaaggagcaggaggtgatgctagtagaggtctaagcagagtaggagcgagaaaaggcaggaagcatcagaacttggatgagccatactgtgtagcgtgcacttaaagagagacatctgtcgcatttaacagtgttcanggccaactagcactcgcattcgtagcgagtcggactagtgactcagctaactcagcatcagactnctgnacgattaagcgcctntagantagtcgg

SEQ ID NO: 36569 - DNA, 733 bp, Oryza sativa
  unsure (1)..(733): unsure at all n locations
  Clone ID: PAT_MRT4530_40382C.1
cccttgttcaggagtttccgcatcccccccgatgtggttcctccgtgttggtcgccccggcagggggccccccccgaccaccagcgatcccgccgggtcgccgcctcccggagctcggagtggctcggccgggccccctttccccatggtttaaggccagcccggcgctggccaatnatcnttccctncaaccttctgccgtccttccattcacccaaggtatgaggaccaaagnttaaagcccctggccaacaagaaaaggggaagctatcccggtaatatccagcagttaagtctaatctgcagtgtagcttctgaaacatcatcatcttcaccaccaatggcttgatatactttgatataaaggggtaaacagggccttagaaagtggaagttaattatcattggtaatatcagtagttaagtccaatctgttcagcatgctcaacttcaggaaaggtggagaaggaaagtagggnggttgctttgacaagtaggggtgcaatggaattccaactatttatccaagaaaagcagcgagcatatctactaccagtacgactgtagtgtgattacttgtagtggctgtgatctgacatgacgtacggcattggcttttattatgctaagaagttggcaatggtcagtttcactttcacaatgattgtagccctcttgtatgttttaaccaatcaggccgtgtttacttcaccctcaaaaaaaaaaaaaaaaa

SEQ ID NO: 36570 - DNA, 405 bp, Oryza sativa
  unsure (1)..(405): unsure at all n locations
  Clone ID: PAT_MRT4530_40383C.1
gtacacaanccctgattttatttacatgtcaatttttaagaaagaaagaagcgaacatagaagtcaaatcaagcgacctgaagaacagaggagcaggtagaaatgcagaaaaaaaaagttgagcaaaatacacatgtttgttcatccagttggnggcagaccggcagagtagtagagtgtagattcaccattaaaagtaaaagaaagaaaagaacgaaaaaacactgaacataaacaacccccttaggtaataaacacccagtttatcctctctagtgaagcagtaataaagaactgactccatggaattacactacaagttactaacattttaccggctatttnttacttttttatccaagcagcnatgagcttagattgccttcttgtttgagacgccaatta

SEQ ID NO: 36571 - DNA, 951 bp, Oryza sativa
  Clone ID: PAT_MRT4530_40384C.1
atgaacgcgctggagatcctgcggaagacggtgcgggtgctgcggccggacccgcacgcgttcacgtcggtgctcttcttcttgctctgcccggcgtcggggtgcctcatgctgtccgccgccgcgctggagggcgccgccgtgctcccgctcgcgcggaggctgctcgccgctgcggcggcgtcggggctcccgctcacgcatttcgtcaggcagctggcgcaccacctcgccgccaccctcgtcgcgtccgtcgtgtcgttcccggcgacgttcacgctcctcctcgccgcccgcgccgccgccgcgtacgcggtcgcggccgtctacgcgggcaagccgctcctcgccggcgcggagctctccctcctcgcgcgccgcgcgtggccgcgcctcgccgccacgtacgcgctcgcgtgcgccgccgtcatcgcctgcctctcctccttcctcgctctcctcgtcaccgcgtgttccacgctcaagttcatgctctacccgcccgacatcgtcgtctgcgccggcctcctcaccgttcttgccttctccgtggcgtacgcgcacaccatcatagtgtgcaacctcggcggtgtcatcgccgttcttgaggacatcgccggagtcagcgcgctgcgccggtcagtgcagctgatgcgcgggcagacgcatgtcggcttgctcatctttcttggatccaccattggcctcgccttcgtggaggggctgtttgagcacagggtgaagacactgagctatggtgatggctcatcaaggctctgggaggggccattgcttgtcctcatgtactccttcgtgatgctcatcgactcgatgatgagtgtcgtgttctacttcacttgccgatcatcgagcatggagatcttggatgatgagggcggctcgattgaggagcttgagatgatggtgggtagcaattcagtcatcaggtga

SEQ ID NO: 36572 - DNA, 504 bp, Oryza sativa
  Clone ID: PAT_MRT4530_40385C.1
gcgagcgatcgcattcgtccagcatcacctacagcttccatatgatctgctccctatctgctgttcttatgccttttgtggacttatttcacgcccatggatctcgcagtaatcaacaccatcgttgcgatgatcagaggctattagcatgcgttgtgattcactgatgcatatcattcgacgccactcgtcttgctacacatcctgacattgtactttggacatcgcgcaattaactttattatgttcacgatgctgggaacaggaacaggcagatatattgtataccggaaagtgagcgaggttctaacggatgccagtggagatggcaccacaagaatgctgccttgtgatccatacttaatatgtcctgaaatgcttgcactgaactgtaggcagacggtctgattcatatgcttatccagaggagatgcactctagttagcttatggaactaacagtttttatgtacttagtctgaccaaggtgctgatctcatatcat

SEQ ID NO: 36573 - DNA, 426 bp, Oryza sativa
  Clone ID: PAT_MRT4530_40386C.1
ggcggccccaaatcccacacgcgcacagcgcagcaccaacgccggaaggagacagcgcccctcgcccccgccaccccaaccctacgagagggagggagccagccagccagccagccaggcatggccacctccacttccactggccaccgcgccgccgacctcgtcctcccctcctaccccgagatgatcgtggaggcgatcgcgtcgctggcggaggagaacgggtctagccaggccgccatcgcgcgccgcatcgaggcggcccgcggcggcggcggcctcctcccgccgtcgcaccccgcgctcgtcgcggcgcacctctcccggatgtcagccgccggggagctcgtcgccgtcgcgggtgggaagtacgcgctccgcccgactcctccgccgccgccgccggcggatccggcggtggcggcg

SEQ ID NO: 36574 - DNA, 874 bp, Oryza sativa
  Clone ID: PAT_MRT4530_40387C.1
ttattttggaaaagaaaaaggggattattgcgtcatcggctagggttcgcggtagaccgggtgcacggcggcggctcacggaaacgaacggccgagatcgatccatccaaaacgaacggctgggatctatcggcccacgaccggtccacgggacatggcgacgatgacgtcatcaccggcggcggctcgggcgcgcaagctcgtcggtgaacgatgacacgacggcgctaacgaagagcaccaaaatgatgcgagcgacgtggcgaactcaccggtgaccaaaacagcggcggaagctcaacggacggcgacggcgacgacggtgctccggcggtcttcggtaaaaacggaagacgggatgaggatggcgacggcttggcgaacccgatggtggccttcccgagcgacgacgacaaccggagcggcggcggcgcatggctggacaagcggcggcgacggcggcgctaggctacacggcgctagggttctatcggcgacgagaggcgaaggcgagggtggcgacgggggctaggaggcggcgacgaaggcccatggcgaccggcgacgtgatggaaagattagggttcggggagagagacgaatccgattcgagatcgaatccacggatttccaaacgattttagccgacgattccaaaagagaaaaggtagagtggatcgcggggatcaatttccctctatcaatttcaccggatcaggaaagagcaggtgggccccacctgtcagcgggcggacgcgcgcgcgcgagctgcggctcggctgcgggccgacttgggcctgggaggagagagagaaggtttcggaccgactttcggcctaaagccaaaagagaactttttaaaactttttccaat

SEQ ID NO: 36575 - DNA, 2237 bp, Oryza sativa
  Clone ID: PAT_MRT4530_40388C.1
atgcagcacgggagaaggggagggtggcggaagggcgaggcggcggcggcgggtgaacgcggtggcgggctcgtcctccccgatcacactctccggcatggggaaaggatggcgcaggcggcggaccgcgcgggagaccagcggcaggcggtcgtggatgcggcgctcacgaagccctcgcgtggccgcggcatcgtgaatggcggcggggaaacggaggcccgggcgacgacgagatggttgcgccaggggagcgcgggcgggggagtgacggccccatccggggtcgccttcaacatcaccgccgggcccatgaccgagatcgtggacgacatcgacgtcgccatggtggaggaggtggtggcggcgccggcggagaaggacgagcacgtgcaggccatcctcctggccattgtcgcctccactcgcgaggaccgacacggcgtggagaggttggagaggtcggaggtcgaggcccgggacccgcgcgtccgtgacgtcgcgaatgtgcaggcactctcccttcgccgccaccgctctcgcctgccgacgtcgcatcgttccagcccgccgatgccgcaccgctctcgcccgccgacgccgcctctccgcaaccgtgctcgcccgccaccgtcgccgcttcgcctgctctggccgccattctggtgcggcgacggcgcccggttgaagaggtgccccttgggccgccctgcgccgtcgcctccggccggcttgcccagtcgccagaagataagagaagaaccacaaccacaaccccccttctcctctcagatccgcgtcgcggcggccccaaatcccacacgcgcacagcgcagcaccaacgccggaaggagacagcgcccctcgcccccgccaccccaaccctacgagagggagggagccagccagccagccagccaggcatggccacctccacttccactggccaccgcgccgccgacctcgtcctcccctcctaccccgaggcacgctctctttctaaaccctagctgttcctggccagatgcccagatctgtggcggaattgaccgggtttcttgggttgtcttctccttctctttgctgcagatgatcgtggaggcgatcgcgtcgctggcggaggagaacgggtctagccaggccgccatcgcgcgccgcatcgaggcggcccgcggcggcggcggcctcctcccgccgtcgcaccccgcgctcgtcgcggcgcacctctcccggatgtcagccgccggggagctcgtcgccgtcgcgggtgggaagtacgcgctccgcccgactcctccgccgccgccgccggcggatccggcggcggcggcggcggtggcggaggaggaggaggaggaggaggagttcctcgccgatgatgactcggccgacgacttaccgccgcctcctccgcccaagcgaggccgcggccgtcccccgaaggtgcgccccccgggctacccggccgtacccgccgccgccgcacccgtccccgtccccgtcggtgcgccggtcgacggctccgtcgccgccgccgcccccgccgtgccgcgccggcgtggccgcccgcccaagccgcgggacccgcacgcgccgcccaagatcccacgcccgcgagggcgcccgcgcaagaaccctctcccggaagggatggtgccgccgccgccgacgcgccccggcgcgacggccaagccgcgcccgcagttcgccgaggtcggcttcgtgtgagacgacgacgcccaagcccaaggccgaaagaggaatcgctaacatttcactcaagtttcctgctgctgctgctgttgtttcatgtggagttctttctccgttcgtgttgttctaattcagggaggagcgtgtgtaggtgctggacgatgacgatgacggcgacgacgacggcgattgccggttgccgccggaggtggtgtgttttcagttcgtggtgttgctgctacccttttgtcgccggagcagcctttgcttcccggtggtgtatcctgtatctgttgtcacgcacgccatgaaattgcaatgcaatttttagttgatcgttttgattcgggggagatactgtccgggtttgtgcttcttgtttcagtgtatgactgtattgatcattgatcattttagcttctgcctagatcttttgacattgtagtggttgatttcaagcaagaactgcaaaggactcactgcttccctgttaaaaaaaaaaaaaaaaaaaaaaaaaaaaaaaa

SEQ ID NO: 36576 - DNA, 220 bp, Oryza sativa
  Clone ID: PAT_MRT4530_40389C.1
acaaaaaaagggcaatcccttgattctttgggggattaacaaaagggcaaagatgcaacaggggcacaaaccatagtccatattcccacacacaccacaaacttattttcctccaaaaacgtaaacaactttttttaaaagaaattaagtggtacaggtacaaacaatggcgcgcaatttaccccaccaaccatgtaacaaaaactcgggggaatgaaga

SEQ ID NO: 36577 - DNA, 712 bp, Oryza sativa
  Clone ID: PAT_MRT4530_4038C.1
aggtcagctccactctgatcgacgcccggatcttggcttcaaggcgtgcatctttctccgccttgttggaagtccgcttgtctagaaatccatacttccagagaacggtggacctaatgccccatgtccgtccacgcacctcccgcctcgcccgtgcgccgtccggctgcgccgtcaccaccctcggcctcacagccgcctcctctcccccggccggccgcgccgtcttctccctcggcgtcgccgcgtcgacctccaccccggcctgccctcggtttcgccggaacgccgtcgcccgcgccggtctcgccctccgcctagccggagttcattcggcaaccccttccgccgtgcccgtgcgccggcagacgtcgccatctcctcctctggcatcgcagcatcaaggttgccctcggcctcgcctcccctccatccgaaccccgccggtgttcgttatcgtcgtctccgttcgtcctcgtcgacgactcctccagtcggtcgttcgtcctcgccggctcgtcgtctcgctgcgctgccaccctcgtcgtcatcgcagcggcgtgttccgcgccgtcctagtctccgtgcagctgctgctggctgccctcatcgcctcctcgccagttccggtcgtcgtcctctcgtcgttcccggtcgtcgtggcgttcgtccctccgtcaagccattctcgtccgtcgtccgcgtccgtcaa

SEQ ID NO: 36578 - DNA, 564 bp, Oryza sativa
  Clone ID: PAT_MRT4530_40390C.1
tcatatgagtattaggcgtggactagggatggcaacgggggcgggttgggctagaactcctccgaccccgacccccgacttcacctcccgcccccggccctgactatggatgcgggatgaaaacatcacccgcccctgaccctgcggggccccgcaaacccgaccggggccccgcatttggtagcatctccgacgcacccgtgggtcgaaaatctcctccgcccccgtcctacccccgtaggggcgggtccccgcaggggactcggccccgcgggggaaattgtcatcccccagcttcctgtaggtgttttgtagctcccattggtacttgatgttgatacctgttaataccacctgatactcgtcgataccagagcgcggcaccgagacatcgtcactgctagccttgtcctccacatcgagcccgtcctccgctgtccaagccccatgccgaggctcgacgccggcgaccgaatcttccgctgtcatgccccacgccagggctggtcgccggtggccgcgtcttccatcgtacacgcccacgccgaggctcgttagtcccat

SEQ ID NO: 36579 - DNA, 600 bp, Oryza sativa
  Clone ID: PAT_MRT4530_40391C.1
atgtgggagaggagggagccaccggtgtgcggacgtgggagaggagggagccgccggcgcgcgaacgtggggagaggaggggagtcgccggcgcgcagacgtcgtcgtggccgaggggagctgtcggcgcgtggagccggcgtcgcggtcgtcgtcgtcgccgaggagggagccggccggcgacggacgtggggagccggcggcgcgcggacgttggagaggagggagccggccggcggcgcgcggacgtggggagaggaggggagccggcgtcgcggtcgtcgtcgtcaccggcgcgcggaggcaacgtcgcagtcgtcgtcgtcgccggcggcagaggtggggagccaaggagggagccggccacggcggacgtggggagaggaggggagccagcggcgcgaaggtcatcgtcgtggccgaggggagccgtcggcgcgcggagccggcgtcgcggtcgtcgtcttcgccgaggagggagccggccggcggtgcgcggacgtgtggagaggaggggagccggcgtcgcggtcgtcgtcgtcgccagcggcagaggctgctatcagtgctatctaccgctccctccgtttcacaatgtaa

SEQ ID NO: 36580 - DNA, 2646 bp, Oryza sativa
  Clone ID: PAT_MRT4530_40392C.1
ggaatccaacataaacttttgatcttgcagcaaataaaacagatcattacagaatatgaaggccgggccactttttccccaggtctacagacgatatacataacatgaaacacaagcaagaaagtagccctatggcacaaaattgaaccaaatcatgaatgttggttacaaaaagggggtaatgatataatatcatgtctgcaaaaaaatacatcaatttcaaatttgcaacaactaagtacatgttggctggacctccagtatcctttcctgggtaaatggggctccaagttgacacacgttatggggttagggtatactgctctagggaaaataatgttctttgccaaaattctccccaaaatgggccgaaagaatttcctcccagtatctacaggcaactcaacaggcgctcgaaatctggatgcccttgatttttgttttgggttactccgattcctcaccagtttctcatgtcattctagctaggtcttggacaacttcagacattggtggcctgaattgtggttcccggatacacccgctgattatgtcagcaaatcgtgacagtgctttctcagaacattgcccttgtatagaagggtccaccatcctggacagtgattctatgtcatgaagctgagaattggcccatctaacaagatgttgctcagcacgtgggagtgaactgtcgtatggtttacgcccagtaagaatttctagcatcactactccaaaactgtaaacatcaccttgttctgtaactatcccagattcccggaattccggtggttcatagttcaacagtgaatgcattcgatctgccaactgagtgacagaacttgatgccaacaatttttctagtccacattcagcaacacgcactgaaaatttattatcaaggagtacattagccggttcaaagttctgatgcacaattggaggctggaagctttcatggagatactctaaggcctttcctgaaccaagagcaacctggaggcgagcattccatgacagtgtactatcaactccctctctatcatgaagtgcatcatctagtgtttttgtactaaagtgattgtacacaagtaaccgctgcccatattcagcacaatatccaactaactcatggatgttaggatgcctgatatccgagacaagctgaaccaggtctagaaattcatctactgatattcttccattagtattgtcaatcttcattacttccaaaaactttccttcaggaaactctgctaggtatacctttcctagtctactctttcttatcaaattctcctctctgaaactgcttgtatattgctgaagagatgccacagagaatgaagtggcagaagttggtttatttatccttggtggagatatgtatctcttttctggaggaacaacaggatttacagtaactttttcaacagggaatggtggcaggaaaggagggggtggtgggggtggtggatcaactgcaaaaagttctgaatttgtacgcgccaaattatttgggtgctccaaatcaattatgtgttctctttggctttcaagaggcttcttagggacagctgccaaactttgctgatcttttttagcatcatcccttatgcctgatatccgagacaagatgaaccaggtctagaaattcatctaccttgccaattgacttctgttataatcataccttgaccttctctcttggtacttggacaaacaaaatatcaccagcaggactgtaactatgaacagcactactccaagaaaaacaaatccgacaattttgagggttgatgaattctgtttcttagatgatgaaatgttgtctcgagtagttggcccgtcagaagagtttgagggtgttctagatggaggggctgaagaggatggaggtggtggtgatggttctagatttggattggttggtgatggtgttggaggtcctgttggtgacggacttggtgctggtctcgttggtgttggagttggtgctggtcctccgggtgttgatggtggtgatgcagaaggagctatactggtattaaatggattcccatcctttttgaagtttggtatgctctgcaactttggaggcactggtccagaaaacaaattattctctatattcaatgtagtcaaagatgacagatttttcatagatggtggtaacacaccagtcaagttgttagaagaaatatccaaatttacaagtccagtgagtgaaccaaaagcatctggcagttgcccatttagttggttgtcattgagtgacatatgctgcaacgtaaccggtaggtcttctggtatagttccaccaattttattgttactaagatttatggtgacgatggaggtgaagttccctaagccaccaagctgaccccccaagtttgcagcattcatcgtaattattcccttcctatgatcatatcctacccccttcattatgttcagttgttcatcagtatggcaattaaaggtgtccattctgctattacttgcatagccaatacaaatgttttctccgtcagcggcggcggtgtccgcgcgcgccaccaccaatgcagcggcggcgacggcgacgaccaccagcgcccgcaacccaaccccacctccacgccgcaccgtacctccccgcat

SEQ ID NO: 36581 - DNA, 119 bp, Oryza sativa
  Clone ID: PAT_MRT4530_40393C.1
atcaatttacacggtttcgtacggtttttatggttaccgcggtaaccgtgcttaccgccgggggcgcggtaaccccggcccaggcggtttgggaaaccctggttgatagtgcctcgtgc

SEQ ID NO: 36582 - DNA, 805 bp, Oryza sativa
  Clone ID: PAT_MRT4530_40394C.1
ccacgcgtccgctgcaatttagtctctgctataaatggattgtacatttcactggggtcgccaaaacttcctggatggtcggggaatggcggagacccctgcagcgagctttggcagggtgttgtatgcaccggctcaagtataacctcagttacgatgaatgctgcaaacttggggggtcagcttggtggcttagggaacttcacctccatcgtcaccataaatcttagtaacaataaaattggtggaactataccagaagacctaccggttacgttgcagcatatttttctttcagctaatcagctcactggaagcatcccaagttcattggcaaaacttaaaaatttggcagacatgtcactcaatgacaaccaactaaatgggcaactgccagatgcttttggttcactcactggacttgtaaatttggatatttcttctaacaacttgactggtgtgttaccaccatctatgaaaaatctgtcatctttgactacattgcacatgcaaggcaatcgattgtctgggactcttaacgtcttgcaggatctccctcttaaagacttgaatatagagaataatttgttttctggaccagtgcctccaaagttgcagagcataccaaacttcaaaaaggatgggaatccatttaataccagtatagctccttctgcatcaccaccatcaacacccggaggaccagcaccaactccaacaccaacgagaccagcaccaaagtccgtcaccaacaggacctccaacaccatcaccaaccaatccaaatctagaaccatcaccacca

SEQ ID NO: 36583 - DNA, 524 bp, Oryza sativa
  Clone ID: PAT_MRT4530_40395C.1
cacttctatagttctgagacttaatcaacttatgatgattaacaggctgctttttaagcattttcaagagttgttgcatctgttccaaaggaacagctcccaacacacataaaactagtgcgcgatgctgtctctacagccagagataaagagcgtagaaggcgaaaggtactactttgaactgaactactgaaatttgtgctatgcgttgctattacttactaaagtagccactaatatttaagctgaaatctttgaggtggctcctgtactagtctaaaacttctctttccattttcagggtgtgcctattcttctgcctggcttatgtctttctaaagcactgcaaccttttcttcctatatttcaccaggtatttatttgtgaattctcatttattatggggccgacatatttaaaatttgagcgtaagaaagtgcaccacaagattaatttcaggcatgaggacatctgacacattcttattgaactccagggttaattagggggcgggccgaaacaaa

SEQ ID NO: 36584 - DNA, 562 bp, Oryza sativa
  unsure (1)..(562): unsure at all n locations
  Clone ID: PAT_MRT4530_40396C.1
ttcagcgaggcggctctgactacctcggcaacccgagcctgatccacgcaccagagcatcctcccatctggcggtgcagtggggctcatggcccgtcgagggtaccgcatcgccaggcggccgctcaggcgaggtcgtcgacccgctctaccccgcggcagccttcgacccgctcggcctcgccgatgaccccgaggcgttccggagctcaaggtgaaggagatcaagaacgccacctcgccatgttctccatgttcaggcttcttcgtgccagccatcgtcaccaggcaagggccccctcgagaacctctccgaccaacctcagccgaccaccagtcaaacaaacaacgcctgggcagtacgccaccaacttcgtcccccaggcaagtgaagtgggggaccgtagcttagcagtggtaatttgttggatgggattttgcccacgattcttntctttggttggggaaatggtttagtcgacgagatgatgatcgagttggtttgtggtacacctaagaagatgaagaagaagatgatgtttttcaaaaaaaaaaaaaaaaaa

SEQ ID NO: 36585 - DNA, 449 bp, Oryza sativa
  Clone ID: PAT_MRT4530_40397C.1
cacaacacgacgcaccaatggagctggtgtccgcctcctcctaaccaccgaggtcgcggtgctccccggcgccgccagggcctactacttcctgggaggcgccggaaggagcggcaggctgctgctgaggcaggccaagtcgtcgtccacgcgggcgtcgttcgcccagcgcaccatggggcccgacaggccaatctggttcccagggacacccccccgccgaggctcgacggcagcctcccaggcgacttaggcttgaaccccctgggtctgggatcggacccggagagcttgcgggggaacttgcaggcggagctggtgcactgccggagggcaatgctgggcgcggcgggcatcttcatcccggagttcctgaccaagatcggaatcctcaacacgccgtcttggtacaccgccggcgagcagcaatacttgaccgacaccaccac

SEQ ID NO: 36586 - DNA, 1299 bp, Oryza sativa
  Clone ID: PAT_MRT4530_40398C.1
cggaataaagcaagctgagattaatctgtaaactctatcctctctctctctctatgacatgacggctctgggcaagcaaggtcctccagttgagcatgggtccttgccaccaaatgtgaggagctcccgtcaaatggtatgactcttggagtataatttattcttcatgtcaacacgagtaaacccgagattctcaaatccacaagcttgttttgccatcaaatcaatagctatcctcaaaccaatctggcaatctctcaaccattccatctctctcacgcacgcgctcgggcaaggcagcgggtgaccggcggcggagatggagctcctcgggcggccgggtgtctgaggcagagcgggcgaccggcgacggagacggagctccccgagcagcgggcggcggaggcggagctccctgggcggtgggcggtgggcagctgaggtggaagcagagcgggcggtcgacggtggaggcggaggtccctgtgcggcgggcgtcgtgccactgaggctgaggcggaggcggagcgggcggctggcagcggaagcggagcttcccgggctgcgctgctgcgggtggcgagcggctgaggcggaggcggagtgggcgaccgacgacgccgtggtgaagggcggcggcggcggcggcgatgcgggagcaggtgtgtgtggcgtgcgggggatggcggcgcgcggggccgggcggttggcggcggcagagggggaggagccgccctccgtgcgttcggcatgggcctcatcatgggtggcgacctcctctgcaccgagctggagtaagccatcccgcgggtggtgtacgaccatagccgcggtggcggtggcggtggcgatggcgcgggagagaccgtcgcctccgtgccgcccgcctgctgccgcccaccgcccgccatcagctaggtaatacccatggttgtactcttccccgttgacataataatggacccgagaagcctcacctctcactgtgtcaaggaaaagaggggactgattcagcacgttgatgtcgttgttagaaccagcgacaccaaagaaggcatgccaaatccataggtcgtgtgaagcaactaaggcttcaacaatacgtagaaagagtggcttgtgcatgcggaaccttgtgcgaaacatccactctgggtacaatggatgctccttcatcttctctatgattcgagaagcaaatgagtctagtacattctgctcagaaatgtacttgtctagaactttagatgggtctaggtcatctgagttagaggatgaataggaggatgagtccgacat

SEQ ID NO: 36587 - DNA, 218 bp, Oryza sativa
  unsure (1)..(218): unsure at all n locations
  Clone ID: PAT_MRT4530_40399C.1
ctccggtgaccggagaggcggtggtgtttggatcgggaggggagagatggtggcngangccnnnngcnattcattcagcccgtgccggtgacggaggtgccggaccaccagagcgaaaaccagggtgctccagatgtgctcaacgtggcggctgaaggcccgacctggaagaaaaaggattgatttggcatcttttccacttgctaatgttggcgcaa

SEQ ID NO: 36588 - DNA, 1650 bp, Oryza sativa
  Clone ID: PAT_MRT4530_4039C.1
atggataacactggtaacaaaggctatgggaatgatggatccgatgactcaagaacccaagccaatgggaatgagaaaagcatcaacgaaacctcaccagagctaatccaaattgtggttaaccaaaccaacatgttggcaaccgcctttcaactattacagaatcggaacaacccagcaggggcaaccaacgttcaagtacctacagtccagcaacagtgcaagttatcagaatttctcaaaacggggcctccaacctttgccatggccgtcgatcctatggaagccagtgattggttgcgcacagtcgagaagaagctagggttgattcagtgcaccgaccaggagcgggttggcttcgcaactcatcagttggttggaccggcttcagagtggtgggatagctacgaagcatcacggccagaaggacataccatcacctggaacgagttttcatctgtattcaagagatcacatgttcccgcaggaatgatcacactaagaaaacgagagttccgctacctgaagcaaggagatttgaccgtcacagagtacctgcacgagttctatcgtttggctcaatatgcaccagaagatgtggaaacggatgaagacaaacaagagaagtttctccaggggttaaaagatgagcttgcagtgcaactacttctagaggattatgaagattttgagaaacttgtggacaaagccatgcaactcgaaagtgagcataatcggatgacgaactgcaagagaaggatggttaacaacccagtatttccaggtggtaaccaaagacagcgcactgagccacttcagatcaccggatcttctgttgtgtatcaagagttcctgccccaagaagatgaacgcaatgcaggcaacaacaatagcaatactaatgctgatgataccaccaacaaccatggttcttgccccattcatgaccacttagatcaagcgtgcaatgtcaacatcattcaccaagatatcgacgatagtatcaatgaaggcacccagaatgacaaccctagcaattttgactctgggaaggactccaatggtgatagcaataatggtaccactgatgccaatgttagcaaggattcccaaccaccaattccaactccaagtcaaaatgatcgtccccagatggacagctcagtaaagaagacgttgatttgttacaactgcaaagaaccaggtcatttctctagagattgtccacagccgaagcgtaacctgcgccatcactccggccattatgcaagaagaagacaagtcactcgccttgtggtcactggagcaaacgccgtacctgcaaggagtgaaatcttcaactcggtatcagatgctacacgaagtgaaaagtgcaagcaccggttaccagttgataacttgtccgaggttgactccgaagatatgaatcatgagaagttctggaacggaagcatcactgaactaccgcaacttagtctgagtcagccaaaaggtgcaccctggtccaagtcaggtgaagagaagattccatccgcaacaggaggtcaagccaagcagttccgagtggtaaagttttgctggaagttcgtcaagacgcaacggaagaagtcagacaagaagagaagaccgcccaacctatcttcttgctag

SEQ ID NO: 36589 - DNA, 145 bp, Oryza sativa
  Clone ID: PAT_MRT4530_403C.1
cggtgagtggggagctcgtcggggcgaggtgggagaggacatccggcggaccggcgatgtgaccaccacagcagttatagatacgactgtgaaaaaggtaaagctacacaatctaaccgacagtgtaaccaagatttcaagtatt

SEQ ID NO: 36590 - DNA, 1335 bp, Oryza sativa
  Clone ID: PAT_MRT4530_40400C.1
atggtgggaggacagcttgtgctggctgctctttttatcctgttttctcttgtgttaaccccgggggcaagccactttctgccttttcccctgaatcccccagctccctatgcccgcctggggagggggctccttgatgaggcactgaaaattctcaatcctcttgctagcaacaccctggacagttttcttgcggatcactgcaccaagaatgggaaggtgttgaattcccatcacttctgtagctacaacatagtgtcgtatgaccatgactttgggctgctctcttttcatgaggagcagagtctgtgttcatggccctactgaagcacatcccggggctatcagcacaagacctggaccttaccaggataatgggagatctccacgagttcctgaagccttgcatctgctcccgtctcttccaccaagctccggcctatgccaaagcgtaataacttcatccttttgtccgcgaatcctcacaggccagagcgagaatatcaggcacagtgaagggtcttattcaggaccggctgagtgctggctagaacagcaagggtgatttccttgaggtgtggcatggaaacaatgaggtctaggagtgaagctagatcgtgagctttgtgctggtttcttgatttgctgcttttgagcaaagctctctctgaagatcagtaagtgtgctttttgttggattccctacttcgaggttttgagaccatctcgctcttgatctttctggttgtgtatttccttgggcagtcagctcaagatctggaactagtgaagagggagcatgaaggcataagatcgaagaaagagaaggacgagttcttgagctctgaagactataagaagatggaatatacccaacatgttatcaatgaggcactgagatgtggcaacattgtcaagtttgtccacaggaaggctctcaaagatgtcagatacaaagagtatctgattccttctggttggaaggtcctacctgttttcagtgctgttcatttgaaccccttacttcatggaaatgcccaacaatttcagccctgcagatgggagatgccaaacaagctccctgtggctgcaatgccttttgtgcatggtcctaaccatgattcctctcattcaaagccagcattcttggctttgcttccttttcttagtttctgtgatgaagctaatggtctgattcatagaaaggctgatcatcgttcttcgtttctttcgtttcttgaaaacctgtgcagatggagaatcgatggcgatgacattccgatggcatacccgtacgtggagttccagagaggtttgcagttgcagccacggtga

SEQ ID NO: 36591 - DNA, 1245 bp, Oryza sativa
  Clone ID: PAT_MRT4530_40401C.1
atggcctcgccggcgcggcggtccgggcaccgtcggctcgacgacacccaggagttggccctccccgacgacctcctcgcggaggtcctgatccgcctcccgtccctcgccgacctcggccgcgcctccgccgcctgcgcctccttccgccgcgtcgccaccgacccggccttcctccgccgcgcgcgcgcgctccacccgccgtcgctcctcgggttctgcgcctcgcccggcggcttccaccccgccgagccgccccacccgtccgcgcccgccgcccgagccgtgctccgcgccgccgacttcggcttctcgttcctcccgtccccgctcagctgggtcgtccgtgacgtcctcgacggccgcttcctgctcgaccgcgacggcggggaaggcggcgccgccctgaggatcctcgccgtgtgcgaccccctgttccggcggtactcgctgctcccccagattcctgaagacctagccgcctccgtccgccggcgaccgcgccgcggcgtggctcccaacggcagattcgataccttcttcgctccgatcggcgaagaggagcgcgccgcggcggcggtggctgagacgtcattcaaggtgatctggattgcgcagtgcccagataagcttgtggcctttgtcttctcttcagtcactggacagtggcgagccactgcatctccctgctggggcgatctgagccctgccttctcgcgccccgcttgccgctccctgttgcgccgcagctacgcatacggctgcttctactggatgatgggtgactcagggaatctgcttgtgctcgacatgtgtaagatgaatttctccattgtcaagctcccatcgagcccgcctggtcgtgacattgtggaatgcgccatcgtagaggcaggagaaggcaagattgggatgtttgctttctgtaattgcatcgacatttatgcactcgagctctattctacaaccatgcaaaatgaaggaagagttgccagcaagtggagttttgagagtgcaattttaatgccttctcgggatggatttcgcgtgctaggtgtgactggcaaggaattgtgcttacaagtttctcctatttgtgtgagcggatgttatttgctggagttcagtacaaatccaagttgcaagaaacttgagtttgtccggagggtgatcaggggtgttcgaacttctctgccattcctgtatgtcggctacccaccatctctatcatcaccaagcatatga

SEQ ID NO: 36592 - DNA, 345 bp, Oryza sativa
  Clone ID: PAT_MRT4530_40402C.1
atgcatgttgccagttgggaggttcgtcgttggtggcggcatgacgagagtgatggtgggtgtggtgctgcaaggtggagcatcaggccatctgatccatccccttcttccatggtagataggggtaggaaggaggaagggagcatccgattcatcccgctcttccatggaagacagcaatggcgaaggggcaggaagggtggacgggcagaggggcagagcgcgacgcggcaggcgagcgaagcgccggaacatgaggcggcggcggcgcagctgggcatggttgcgagcggcaagccgacgtggcggcgtgaggcaaggcattatgtgcaggcggcatggtag

SEQ ID NO: 36593 - DNA, 136 bp, Oryza sativa
  Clone ID: PAT_MRT4530_40403C.1
accagggggaaaattttaagggatttaatgttgctttacatgacaatcaaggccacaacccggacagcatggaccgaacccttggcgagcccagatatagactggcccaaacccatagcgagcacaacttttggac

SEQ ID NO: 36594 - DNA, 375 bp, Oryza sativa
  Clone ID: PAT_MRT4530_40404C.1
atggttcatccgcgcgggaggccgagcaaggggcggcaggcgatcgggatccgccgcatcgaggacaagcccggcggcacgtcaccttcaccaagaggcgggccgggctgttcaggaaggcctcggagctctccatcctcaccgccgctgctacgcgcccgcccccgtgtccacgactgcgagcccgaggcgttgaggcgggcggcggacgaggccaaggtggaggtggcgcggctgcgcgacgtcgcggggaggcggttctggtggtggtgggaggccaccaacgtcgaggcgctcggggaggcggagctgccggagttcgccagggcgcttgggagggtcagggccgccgtcgtgcgccgccacgcgctctga

SEQ ID NO: 36595 - DNA, 231 bp, Oryza sativa
  Clone ID: PAT_MRT4530_40405C.1
atgcataatcctgcttgtttgcatttgttagcaactcgacaatacaaagaaggctctgcttgggtacctcgcagatgccctacaaatgtgaaaggaaatactacctgcccgttttaaaactgacaccagcccaagtgaaaaggaacacaccgattaaaacttgcccccttctcagaaagaaccgaatccaacccactataaaaccccccttttggggagaaaaaagaaatc

SEQ ID NO: 36596 - DNA, 165 bp, Oryza sativa
  Clone ID: PAT_MRT4530_40406C.1
tttttgtggttaccctcttttttttttttatttttgggggcaaaccaatcttttttggggggtcaaccacgccagaaattcacaccaaatgtaactcataaagctatcactgctaagagagtaaatcgatctgccctttaaaatgaaagctcatcccaccaaacc

SEQ ID NO: 36597 - DNA, 287 bp, Oryza sativa
  Clone ID: PAT_MRT4530_40407C.1
caagcgtgctgtgtgttgtgtgttgtcgctggcatggagcttgtggccgaacggatagaccactatgttggcctgtcattggtcacccaagggcaaggggcagcatgccttctgcctttaccaactctcaggttccctgctctctctctctctctgctttgctttgctgagttcatatgcacaatgcaatcatgcatatactcccaattaaacagtaatgctaatgcaatgtcaaacctttcttttcatcatccaattaattatgaattatctttgcaaaaaaaaaa

SEQ ID NO: 36598 - DNA, 162 bp, Oryza sativa
  Clone ID: PAT_MRT4530_40408C.1
aaaaagcaacaaaaatgcttttttttggtgggcacttttacagacttacccttccccagtttcgcaggggtttccacaacagcgaagggtttttttacaggggaaaaaacaacccggggcattttaacaaaaggtttttcaaacaaaaatgcccccttcctt

SEQ ID NO: 36599 - DNA, 951 bp, Oryza sativa
  Clone ID: PAT_MRT4530_40409C.1
atgtgcctcgtcgccgcgccgtgctccgccgtcgacctcgccgcctcgtctccgtcgaccccgccgccgaaccggggctctacggtggggcagccgttggtaggaccgcggggcgggtgtctacgtggtgtcgccatcggtaggactgccatccaggcccatgcctctcccgccaccagcgccgcctccgctgtcccgtcgtcgttgccgccgccatctcgtcgttgtcgccgccgccgcctccatcccatcgccacctccatcccgtcgccgcctcctctgccccaccacccgggagctagcctccttcgatggcccagcagcgagcgttggatctggcctggagggagccagatccggcggcgcctcgtccccgccgccagcgacgtcgcctcctccgtcgacgtcgcgactgccctagccgggccccagccgtcgggtgttggagggggtagaaggccccaccgccgccgtccttgctgccgcccggctttgccggcggctgctcgggtggcggcgaggcggacgaggcgagggagagaaggctggcggcggggcggcctcgagtcgcctcccgtgtcgccctggagcggagcgacacgggggctcggaagcaagtccacggtgtacttgtacctcatcaactccaccaccaaggtgtacctcgagtcctacgacttgccaggcacgcggggcgcggccgacaggggcctcgccgccgacgtcatctacttccctgtgttagtgaggcaccgcagccgcaactgctacgccgacgagcactacctgcccacattcctgggcatccttcacctgtcgcgcgtcgccaaccagagcgtgacggccgggaccgggacgacatgcgactacaacggcgacaccacgacggcctacttcatgttcgcgaggaagttcctacccaactcgctcaccaggttcctcatattctag

SEQ ID NO: 36600 - DNA, 2531 bp, Oryza sativa
  Clone ID: PAT_MRT4530_4040C.1
aattgtaatacgactcactatagggcgaattgggtaccgggccccccctcgagttttttttttttttttttttaattaaaacatctggggatggtcattattgtttattattgctgcacacgaagagagcaagttgctgcaacgcaaagtactgctaagataacaagcggatcgagtactcgctccaatactaataatcatcgtcgcaaaccatcgatcatatcacaccaatttattcgttcgtcaacagtaagcgacacacgatcgagctagcgcgcgcgcggtggccaccgttcattcgatcggcggccggcggcggccggccagcccgccggcgagccggccggcctagacgaccggcgggccactgtacgtcaaggggacgatccgaaggtccggcggcgcgctggcgttgatcggtcgcagccatgcaaactggctcttctcctgggcgctcaagttgcgggcgaacctgtgattgcggtggagttggaaggggtaatcacggtagaaggtgcaccggcggaggcggccctccgagtagggcggcgtgaggacgtcgaggaaggcgcagggcccgtccacgccggcgacgaaccggtgcaggttcccgccggtggacgggtacagcacccaggtgccgcaccccgcctccacgacgtggtccagcaccttcttcaccagcttcgtattcttagagtgaacagcgcgcttcccgccggagccgtagacggaggggctgacccagtcgaaggactggacgtgcaccgagccggcgaggagcttgctgaacaccgtcatccccgggtggtcgtgcagcggcatcaccgtcccggcgggcaggtagaagaccgccaccgtgaaattatcgcattcgtacaggtaattgcccccgataacctgtatggggtctcggcggcggaaagcggcagctctcgttacctcggaggtgtcgagcaccgtgcccagcttgaggtcatccggtccaattccattgagcaaggcgacgatacgggagacggtagtactgttgggcggctgagtggacttggaggagccatcgagcagcacgcggcactcgtcgacaagccgctggagagcattctgccgcggcggggacaccgcctgcagcaccggcgcttcctcgccgtcgtcgttcttgtcgtcgtcgcttccttggccgtcagtaccgtccatgctggagctccccacgtccggcgccgggtccctcttcctcttcttcgctggttcctccacctgctcctccggctccatggacgccgacgccgacgccgacgactcagactcggtcaccgtcttgggcgccgccaccgccgtcgccgccgcgccctgcccttccaccgcctctggtctcaacgcggagtccaccgcaaccacaggaaacgaggcacaggcactgatccccgccatcgcgtgcaacgccgatctctcgatcaatcacaacgtacgaaccagccaggaatgatcagggagcgcgagagagccgatcgaggagcagcgtggggaggtgaacgcgaccggccgggcctatttatacacgagcgcgcggaccagaccacacgagagagagcacgcacgtacattcatgcatatgatcgcgtcactgcaggggccaggggaccgagatgggatcgcgtgacggggacgtacgcgtgtggtggatggaaatgcttcgtgcagacggacggccgtggccggttgatcgatcgatcggggtcggacgaaacggaccccgcgcggcgcgcgctgctccggggccgggtggcggtttccgctagctgcgccttttcctccccgggcgtcccaacgacgcgacgcgacgcaagccagcatgcagcccaacgggcggcgcggccggcgcgcgacgtacgtagcttgcctcggggtggaccaccacaccgacggtggtcccccgggaagtgaaccgggccggggggtttcttgtcgtccgggactggggcgcgccgcgcacacggctggtcaagctagcaacgaccgtccgtccacccggccaccatgtcccctcaccattccctctactataccaactcaccctctctctccatttttcgatcctccatttgaatctaaaagttggcgttgcgggagaccacccacatggcccgagcgggcccgtccacggtggtgcttgacgcagagcaccacggcggcggggacgacgaggccgcggaggaggagcaggagcggcggcgcccggcccgcgatggcgtgcacggcgtcgatgcgccccaatccagcgtcgacgcgacggaagagcatgtgcacatcgaggatatgcgacagcgcgccgccgcgcggtgcctcatccgttgcctcgcccgccggcgcgactccggggagcgggcgcagccgcagcagcccaagccggcccccacgccgccgtgccgcccagctccgcttgcgctgctaaggggagcagcggatcggtggaggcgaagaggaggagggaggcgaaggggaggaggaggtcaggtggcggcggcggcggt

SEQ ID NO: 36601 - DNA, 822 bp, Oryza sativa
  Clone ID: PAT_MRT4530_40410C.1
ttatgcgccattgctgggaattatttctagtaatgtcgttaagaaataccaacatggagccgaactggggggagccagagccagcggcgtcgtgcgcagccaggcccatgcctctcccgccaccagcgccgcctccgctgtcccgtcgtcgttgccgccgccatctcgtcgttgtcgccgccgccgcctccatcccatcgccacctccatcccgtcgccgcctcctctgccccaccacccgggagctagcctccttcgatggcccagcagcgagcgttggatctggcctggagggagccagatccggcggcgcctcgtccccgccgccagcgacgtcgcctcctccgtcgacgtcgcgactgccctagccggtgctgcgtcagccaccgtcggccttctccgtcggtgccacgactgccccagctggcgcctcgtcctcctctgatgcggcgcccggccagcgccgctctgtcccgatctggccacgcgggggaggggggatgggccagatccgctagcgacgacaccggctctgccgcctctggccgtcggtggcgccggagccacctcgacgcgtcgccgtccctccgcctgtttcccgtcagggccccagccgtcgggtgttggagggggtagaaggccccaccgccgccgtccttgctgccgcccggctttgccggcggctgctcgggtggcggcgaggcggacgaggcgagggagagaaggctggcggcggggcggcctcgagtcgcctcccgtgtcgccctggagcggagcgacacgggggctcggaagcaagtccacggtgtacttgtacctcat

SEQ ID NO: 36602 - DNA, 135 bp, Oryza sativa
  Clone ID: PAT_MRT4530_40411C.1
atggcggggcggcctcaacgaaggtggttgcagctcgacgacggtgggggtgaggggatggccgtggcttcacgttttggggcacggggctcgctccacaccgacgtgactaggaatcccaagctagtgaggtga

SEQ ID NO: 36603 - DNA, 296 bp, Oryza sativa
  Clone ID: PAT_MRT4530_40412C.1
ctcctcaagacctcaacaatatccaccccgaagcagcagcatccaccgccacgcagagagccagcatttgctggcggcgcggaggcgactgtgtgtggtgtggtgtagatcggatcggaggagagatggaggtggaggtggtggaaggaacaacaatggtggggtggcttcgccaccttgtgcttctccatgcttaggacgctcacgagcatgggggcctaacacaggtgtgtgctagttccgtgagcttatttaggcaggatctgcatgtcttgacctctacgttcgagtggtat

SEQ ID NO: 36604 - DNA, 748 bp, Oryza sativa
  unsure (1)..(748): unsure at all n locations
  Clone ID: PAT_MRT4530_40413C.1
gttgacatgacccagggtgaggaggtcaagatctatgcaagtaaggtgaccgcggtcctgtgcaaggccttcgccaccgcgacgtccgctttagtcgggtatcatgttctcggtgtcggtgagcgcgcgctcaacctgtgaatctgtgatgagatgccattatttttgtggtagctgtaaatgagaaaataagtagtatgtctggtgtcggtaggagacaccaattggcacgtcgaattctacgtgaagacgatagaatttgagtagactgaccatctaattgtgtacagtggatgtctcctttagctattgctaaatgatatttcggattggaatgggtaatctccagtgatgtctttttcatgcaaggctgggatggatattaagatcatgtctataaatgctgttcattttgtggtattatgtaggttagttcataaattcaagccatctgaacgattttagtcttggaaattatatgtccaaattgaatataaaattataaatgtggctaaaatttcacctagaaaatggttgtgctatatcaaaactcaaaacaacactactagttgaacgtgataatttactctctttgaagaaaacaggagcattgtcactttctaaataatcattctgtctgatgaacagtttatctaactgaaatggaagaaattctactgttcctttgntctagccaagccaatctatcagtactgtcatttatgcaaacatcttccataagttctgc

SEQ ID NO: 36605 - DNA, 459 bp, Oryza sativa
  Clone ID: PAT_MRT4530_40414C.1
atgacctccctcaactgccaccaagcgaaacaacaggtcgtgggagccctgggcggtagaagcagtaacaggttgtgcgggtggagaccggttgaggccacatctatcttgcctccactgagtgcggtaagcttcacaacattccctattcaccgcttccgtgggcacttctcgagccgccgccgtcgttgccattcatccatgctaccaagcttcgaggatgttgcctccataattggatccatggtgccgagcttcaggctattgccaccaccgaggattcacgccaagctccttggccgccatcaccacaagccgggtcgcgctgtccgctcctcctccaccaccgttgacaaccacaacaccatcctctccggccacccacctctaccgccgcattcactggatttttcacattttgatccttttgaaaaacttatttcgcaaatagacctctga

SEQ ID NO: 36606 - DNA, 725 bp, Oryza sativa
  Clone ID: PAT_MRT4530_40415C.1
attcggctcgaggtcaccgttacctttttgcgttgttcctcctttggaatgatccgaagaggctcagaaaaaagggcaacttcgcaactcgtgaatcgattactgtagaaattgtcgtcgattctatataaaacatattaggcactggctaccattttgaattctggttgagggattgaagtgtgattataggtggaggaggatggcttgtaggggatgctgggaatgccttttgaagcttttgaacttcatattgactcttgctggtctggccatggtgggctacgggatttatctgtttgttgaatacaataaagcttgggataatactctcaatttcagtgaggataaaacggaagttcaatttggcagacccatgctagtggttgtgtctctgtccaacagttttttagatgagttgcccaaggcttggtttatttacttatttattggaattggtgcggtcctctttgtcatttcttgtttcggttgtattgcagctctgacacggaatggatgctgcctgagcttttattcagttttagtgttgttgttgatcttagtggagctgggatgtgcagcctttacattttttgacaaaagctggaaagaagaaattcctaaggacaaaactggagattttgatatgatatatgaatttctgagagagaactggaatgttgtgagatgggttgctcttggaattgtcatctttgaagctcttc

SEQ ID NO: 36607 - DNA, 171 bp, Oryza sativa
  Clone ID: PAT_MRT4530_40416C.1
atggctccgacggaggtcaagctggcggtgtgccacgaattgatatcatgtctacctagtcgggtgcccatgtgcactaaggctgtgtttgaggagaacgacgccaaggtgatggtggcggcggtgatggcacagggtgggctgaggtcagctatccgctcccccacctag

SEQ ID NO: 36608 - DNA, 496 bp, Oryza sativa
  Clone ID: PAT_MRT4530_40417C.1
gtcatcgtcgtcaaagcaagaactcaaacacactacctccagcactccgcacagccagcacagacagacagacgagctcacacacgtcgacgagaagaaggagcacagacggcaggcagcaggcgaggacagacaagccggtggcagtgcatgcaggacgtgttcagcccagccggcgaggggggaggactacacgatactgcaggcgctgttcagcgtggacatgcgcaggtgcatgttcgtgcgccacacatctgcaggcatcggcaggcacagctgacggcagatcagacaacatggggcagatcggcagtcgctgggctacccgcagcggagcatctccacacttcgtctccctcgtcagcatctggaactacgccggccgcgtcgccgccgggttcggctcggagtacgtgctcgccgcgtacaagctgccgcgcccgctctagaggatccaagcttacgtacgcgtgcatgcgacgtatagctcttctat

SEQ ID NO: 36609 - DNA, 148 bp, Oryza sativa
  Clone ID: PAT_MRT4530_40418C.1
gaagccggtattataaccccttttattccttaatcaacaccaattaccatacctccattcccgacaccaacccttcaccgagcacccccaaaggccgggttggtggctacctattagccctggtttaaaaccttttccttccttcctt

SEQ ID NO: 36610 - DNA, 617 bp, Oryza sativa
  Clone ID: PAT_MRT4530_40419C.1
tttttttttttttttttttacacaagtaaaccatagtatattttcagaaccaaacgctcagatgagatagtgacacaaacataatgtagcctgaaaacttcaggtgccccaaatcacaaatggccatatcatagcatctaagattcagacaagaacacaaaggggacacctcacaagattcacagtccacattagtacatcaggatgaacaacaagctgactcacacacactggagccattgcacaccaaatggcttctttatttacttgtacagatcatcagcatgataaccttcccctttagcagttgcaggggttgcacttgcagctggagccacagctgcagccatgggcagcctcaccagattcagctgccttgccaaccatcacctcaaagtgccccttctcaggtgcaacgccgaggacagtggttgcagtagtggtggtggtggtgatcttctcagccaggtcagggtacatctttccgcagccaccgccgcatccgcaggaaccgcagttacaacttccaccgcacgacatcttgatcttctgggtctcttgtaaactcttcaggaacttgtgtagttggatgaaatgagagattgcggacgcgtggg

SEQ ID NO: 36611 - DNA, 2349 bp, Oryza sativa
  Clone ID: PAT_MRT4530_4041C.1
atgctgtacatggggggacgtggatgtatcgatggtgttgatgtcctcatcatcactattcaagggaatgctaagctggcagtgcaatgcgacaagcaaagcctcgacatggtcgagcacacgcccagcccacctgctacagcagagccacccaagaaactgtccgacatgccgggggtacctagggaggtgattgagcacaaactcatggtgcgacccgatgccaagccagtaaagcaaaaactgcggatatttgcaccatatcgaaaacaagccatacgagaagagctcgacaagcttctcaaagctggtttcatcagagaggtacttcatccagagtggctagccaacccagtcatggtgtggaaggccaacgggaaatggagaatgtgtgtcgacttcactgacctcaacaaggcgtgtcccaaggatcacttccctcttcctcgaatagaccaactggtggactcaacagccggttgtgagttgttgagcttcctcgacgcttactccggctaccaccaaatcagcatggcgaaagaggacgaggagaagacagcattcatcacgccgttcgggggcgcacttagcaaccaactcggaaacaatgtcgaggcctacgtcgacgacattgttgtcaagaccaagacaagcgactcattgattgacgatctgcgggaaacgttcgataacctccgacgatatcgcctcatgctaaatccagagaagtgcacgttcggagtaccatcgggcaagctactcgacttccttgtctctggcagaggaatagaagcaactcccgagaagatcaaggcaatcgagaacatgaagtcgcctacaagactcaaggaagtacagaagctaaccggatgcatggcggcactaagcaggttcgtcgctaggatgggagagcgaggacaacctttcttcgctctgctgaaaaagcaagacaaatttatatggacacaggaagctgaagaggcattcattgcactcaagcgctacctatcaaatccacctgtacttgttgcccaccaacctaatgaagaattatttctctatattgtcgccacgccatattccgttagcactgtcattgttgtcgagagagagaaggtgcaacgaccagtctactatgtcaacgaagctctccacgacacaaagacaagatatccacagatccaaaaactgctctatgcggtaatcatgacatcaagaaagctacgccactacttccaagcccacagggtcacagttgtatcctcctttcctctcgccatcaagtcccaggtacttgccgacttcgtagccgattggactatgcctgataacaggttagacaaccaaatcaaaaacgaaacatggacaatggcgttcgacggcgcactcaacagccaaggagcaggggcaggattcatcttgacatcaccttttggagatcaattcaatcatgcaattcacctcaacttcagggcgaccaataacacagccgagtacgaaggactactcgccgggataagagctgcagccacactcagagtaaggcgactgatcgtgaaaggggattccgaactagtcacgaaccaggtgcataaagattacaagtgctctagccccgagttagccaagtatctcgcagaagtcaggaagctggagaaaaggttcgatgggatcgagcggtgtgaagcctgtcaattccacagtaaacacacaaagctgccagcgcaagcactccagactatccctctcacttggccgttctcgtgctgggggctagatatactcgggccattcccacgaggacagggcggctacaggttcctatttgtagcgatcgacaaattcaccaagtggattgaagcgacacccatgggggaaatcatggccgacaatgccatcaaattcatcaaagggatattctgcagattcggattgccccaccgtatcataatagacaacggctcccatgtcatcagtgccgatttccaggattactgcatcaggctgggagtcaagatctacttcacctcggtttctcaccctcagagaaatggacaagtcgacagggcaaacggcatagtactacaagtaatcaagacccgcgtctacgacaggctcatgtcacatgacaagaagtgggtcgaggaacttccatcagtactatgggccgtgcgtaccacactgacaacgtccaacaaggagacacccttcttcctcgtgtacggctcagaggcgatgctccccaccaagctacgacatcaaagtacacgagtacagaagtattccgatgaggatcaagaggagcagcgatacgatgatgtgaatctactcgaggaacatcgcgattga

SEQ ID NO: 36612 - DNA, 1013 bp, Oryza sativa
  Clone ID: PAT_MRT4530_40420C.1
gaaagatgtaccctgacctggctgagaagatcaccatcaccactactactacaaccactgtcctcggtgttgcacctgagaaggggtatgatatattgatatctatgaatcttttccttgataaaaaaactaaactgaagggaactcctgtctgagattcagacatgtgaccatatgctgaagaaaagctgaagatgttatctttccatgcctgaaactgttcgctcctgaatttgatttatttctttgcaggcaatttgagggagttggcaaagcagctgaatctggtgagggtgcccatggctgcagctgtggttccagctgcaagtgcaacccctgcaactgctaaaggccaaggcgatctgtgactatgtgatgaacaaacagagcccttccagtctgatggctcatggctgtgtgaccctgtgaatccagcattgtgtgtgcgcgcgcgcgtcatgaattgtcaaaaattatggctggaaaaccaagtggtttctggcaatatgtgttgtaccgcttgtatgtaaatgttggtaaaaacacatattgccagaaaccacttggttttccagccataatttttgacaattcatgacgcgcgcgcgcacacacaatgctggattcacagggtcacacagccatgagccatcagactggaagggctctgtttgttcatcacatagtcacagatcgccttggcctttagcagttgcaggggttgcacttgcagctggaaccacagctgcagccatgggcaccctcaccagattcagctgctttgccaactccctcaaattgccccttctcaggtgcaacaccgaggacagtggttgtagtagtagtggtgatggtgatcttctcagccaggtcagggtacatctttccgcagccaccgctgcatccgcaggaaccacagttgcaacttccaccgcacgacatcttgatcttctgggtcacttgtaaactcttcaggaacttgtatagttggatgaaatgagcggacgcgtggg

SEQ ID NO: 36613 - DNA, 639 bp, Oryza sativa
  Clone ID: PAT_MRT4530_40421C.1
atccatatgtacatgatgagtttatattattttttttgtatagttttcagtttttttttttatttttttttttttcatagacaaaccaatatttatatttcacagagtaagagtaaaattcatagacaaaccaatatttatatttcacaaacaacatttacataaagccagaaaccacattgatttccagccacggacttttgacacctgattcgcacatggttgagacaaacacacacacacacaggcatgagccatcacactggatggactctttatttattcatcatgtagacaggctggtgcattggcaattcagtcatagatcatcttggccttagcagttgcaggggttgcacttgcagctggagccacagctgcagccatgggcagcctcaccagactcacctgccttgccaaccatcacctcaaaatgccccttctcaggtgcaacaccgaggacagtggttgcagtagtgatggtggtgttgatcttctcagccaggtcagggtacatctttccacagccaccgccgcagccgcaagaaccgcagttgcaacttccaccgcacgacatcttgatcttctgggtctcttgtaaactcttcaggaacttgtatgcaatgagagagatcgcga

SEQ ID NO: 36614 - DNA, 417 bp, Oryza sativa
  Clone ID: PAT_MRT4530_40422C.1
gtcgtccggtccgcgttcctcgcctccggccccctccccgcgccgcttctccgtctccatacgccgccgggcgggccaggagccccatcattgcgatggcatctgctctaaggaagggaaatggtgctcgcctaacgcaagaggacgacgccttcatggatctctaatgcatctccaagggtcaggtctcccgtggtgacgactaacgcatctgccgtcctgtcactcgtatttgcatgccccttattggcaagcgggcagtcgcggtgtgcagtcaccgatgccaacccatccaattttcctagcacacagccaatcgtcgaactctccaaattgccattacgggatgcaccaagtatccaagccagctttatattagcatggcacacaggacgcgcggcagcagcgcttatcggg

SEQ ID NO: 36615 - DNA, 563 bp, Oryza sativa
  Clone ID: PAT_MRT4530_40423C.1
gagagagtaaaattcacatacacaaaacaatatttatatttcacaaacaacatttacataaagctagaaaccacatggatttccagccacgatttttgacacctgattcacacatggttgacacaaacacacacacacactgatggattcagtcacactcacacaggcatgagccatcacactggatggactctttatttattcatcatgtagacaggctggtgcattggcaattcagtcatagatcgccttggccttagcagttgcaggggttgcacctgcagctggagccacagctgcagccatgggcagcctcgccagattcagctgccttgccaaccccctcagagtgccccttctcaggtgcaacacctaggacagtggttgcagtagtggtggtggtggtgatcttctcagccaggtcagggtacatctttccgcagccaccgccgcatccgcaggaaccgcagttgcaacttccaccgcacgacatcttgatcgtctgggtctcttgtaaactcttgaacttgtatagttggatgaaatgagagcggacgcgtggg

SEQ ID NO: 36616 - DNA, 359 bp, Oryza sativa
  Clone ID: PAT_MRT4530_40424C.1
gggaaccgaaagaacaagattttcccaagtaaaccatagttttttttcagaaccaaacgcttagatgagatagggacacaaacataatgtagcctgaaaacttcaggggccccaaatcacaaatggccattttatagcatttaagattcagacaagaacacaaaggggacaccttacaagattcacaggccacatttgtacattagggtgaacaacaagctgacttacacacactggagccattgcacaccaaagggcttttttatttacttgtacagatcattagcatgataaccttcccctttagcaattgcaggggttgcacttgcaattggagccacagttgcagccatgggcag

SEQ ID NO: 36617 - DNA, 316 bp, Oryza sativa
  Clone ID: PAT_MRT4530_40425C.1
cgcccggtattttggggttggggggcaacggctcgtgcgcacgtgcgtggtcctcggtgtgctgctcttgactcacccgttgcaatggggctcgtgcggccgtgcatgcggcgcgctcgccggcggcccaagctcggcgcgtcgcgtgcatggacccatgtggcgtcgaggaggcgcacttgccggagttgcagggaccagatggaacgccttgcgccgccgccaactgaggctaacacatggctgtgatgactgatgccccccccccaccattgagtgtgaatgtgatgatgtgaatgtgaccagtgaattgatg

SEQ ID NO: 36618 - DNA, 828 bp, Oryza sativa
  Clone ID: PAT_MRT4530_40426C.1
atggagccctcagatttagcgcagaagcacacacgatttagaattgcagtttgcaaacttgcagtatcatcttcacttgtaagaactgaaaagatatcaatggctatcagccaggaggagcagcacgccggcggcgggagggactacgccgagccggcgccgcagccgtttcttggctcgtcggagctgcggcggtggtcgctgtaccgcgcggcgatcgccgagttcgtggcgacgctgctgttcctgtacgtgacggtggccacgtgcaccgccggcgtgtccggcgggcacgtgaacccggcggtcacgctcgggctgctcgtcgcgaggaaggtgacgctgctccgcgccgcgctctacgtcgccgcgcagtgcctcggcgccggcctcgtccgggcgctcaactcggcccacttcgcgcggcacggcggcggcgccaacgtcgtcggcgacggctactccaagggcgccgggctcgccgccgaggtcgccggcacgttcgtgctcgtgtacaccgtcttctccgccaccgacgccaagcgcagcgcgcgcgacagccacatcccggtgttggcgccattgcccatcggtttcgcggtgttcgtggtgcacctcgccaccatcccgatcaccggcacgggcatcaatccggcgaggagcttcggcgccgccgtcgtctacaaccagcccaatgcttggcacgatcagtggatcttctgggtagggcctcttgtcgggtccgccattgcgacgctataccacgagcatgtgctgagggcgagtactctcaaggcgttgggctcattcaagggcgccagacaatga

SEQ ID NO: 36619 - DNA, 625 bp, Oryza sativa
  Clone ID: PAT_MRT4530_40427C.1
gataagacgacaaataattcgaaagcgggtagctgtacctttatccatcctctcattccctctggccccacacgtcagcaccgttccaaattccaattccttgcttccctcgccggccacccccgctcgatccgcatcaccaccaccgccgccaccgccgccaacgccgccgcggcgttggtctcgatcgttgtcgaatagggaggagggggtacgttggtcgtcgtcgtcgttgtcgtagtcgccgccgcggggcgggggaggcatggcgacggggggaggggggttgtcggggccgcagccgtcgctgcggcggggcttgtcgagggcgttcaccatgaggccggaggggtactccggggaggacggcggggagtacagcgaggagagcgagctggtgcctaactcgctcgcccccatcgtccccatcctccgcgccgccaacgagatcgaggaggagaaccagcgcgtcgcctacctctgtcggtttaccgcgttcgagaaggctcacaccatggatccaaactcaggtggacgaggagttcggcaattcaaaacatacctcttgcataggctggagaaggtatctgcttttcctgctattcctccacctatctatcaatga

SEQ ID NO: 36620 - DNA, 1484 bp, Oryza sativa
  Clone ID: PAT_MRT4530_40428C.1
atgaggcagtcgaggttcaagaggatctgcgtcttctgcggcagcagccaggggaagaagaggagctaccatgacgccgccattgagctcggcaacgagctggtggcgaggagcatagacctggtgtacggcggcggcagcatcggcctcatggggctcgtctctcaggcggtcttcgacggcggccgccacgtcatcggggtcattcccaagactctcatgacgccagaggacggagggagtatattatgtaggaataatgtattgttggttctcatcggcatgatgattgctgattgcaaaaaccaaatcatggttcattgtttctggcagataagtggtgagacagtgggggaggtgaggccagttgctgatatgcaccaaaggaaggcagagatggcaaggcagtctgatgccttcatagccctacctggagggtacgggactctggaggagctgctcgaggtgattacatgggcacagcttggcatccatcataagccggttgggctgctcaacgtcgacgggtactacaactcgctgctgacgttcatcgacaaggcggtggaggaagggttcatcaacaccagcgcgcggcggatcatcgtcatggcgccgacggcggaggagctgatggacaagctagaggagtacgtgccttaccacgacagggtggcatcgaagctgaactgggagatgggccacctagaagtagagacccgtggatgggtggatgctgaggccggattcgattggcttgattcggggctcctcgatgggcgacacgccgcctgtgcagggaagcttattgcaaacttgattgtcatgggctctgggattataggaagagctatgctccaagcataccggaaagcacttgataatgcaaataaaactggtgtggcccatgaaacaattaataacattcgtagagccagcaaaacaatgactgagcaagaagctaggcagatactcggtgtatctgagcagtcaacttgggaagagattgcacagcgctatgataatttatttgaaagaaatgcaaaatctgggagcttttatcttcagtcgaaggtccaccgagcaaaggaatgcctagagaatgtgtaccaaaagaataagcaagatggaacaccaccttgaaatttgcagtccttgaaaaatcatcttttcagatatattctttcccactcataagagaagtgtacataccagaattggtcgctgctgttgtatcattacacgtaggggaatcaataagaatcaaagtgcagcgagaccttgggaattgtggaaaactgttttatgaggtttcaataaactctagcatgaagtacggttttggtccttttgatttgaccttgggaaacaatgcaaattttgtcatcttggtggctgctagttaggtttaaacatttgaacatgtactgtccctcatcaaagtttggcattgcagttaggctgccagatggaccaatgttgaa

SEQ ID NO: 36621 - DNA, 706 bp, Oryza sativa
  unsure (1)..(706): unsure at all n locations
  Clone ID: PAT_MRT4530_40429C.1
tccttcctccgccggcccntttccgccggttcccccctcccccttcccccggcggggcccgcccgttcaagtccaacntcggccacatgctccgcctccgcctcgccttcgagaccttcctcatgagtaggctcctccacttcaccaccgtccacagtctcgttcccgctccacgcgcgcgccgccgagtaggcttatgaactaaatgacgaggtgaatgcacggataagccctgcagatcaccatgtttgtacaatttatagttggactaagagagtattctggtaattaacttctggggcaagtaatctgccctgcagatcatcgtattgttggaattttttttttggggggcttaccaggttctcagggtgaagtgctttatgagcttcttcgaggaatgggaggtcagaaagaggaatttgacattggcatcatgccaagccctgttgctgttttccgtcctatgtcctgtcctgaggttgtagaatgatagtcgagatacatgaggatatctcaagatttactgactaaacttaaataactttttcgcacttcagaaatggtatattacttcatagtataaatttttatacaaagatttgtgtctcgatatgtaattttcttttggtacttaaacaaaatattattgccatggtatattataaatttaatactgtgatcaaaaaaaaaaaaaaaaaaaaaa

SEQ ID NO: 36622 - DNA, 583 bp, Oryza sativa
  Clone ID: PAT_MRT4530_4042C.1
ggcaagaaacaggagatcgattttgagtgaaccgattacatggtacagctccatatcatcatcatcatcatcatgtttatgtacacaaacatcttctttacaagtacagccatggatttttctttttacatggcagtagtagagtagcactagtagtatggtgatggctcaagcaagccctttatctctctcaccatggacaagaacaacatatatctacaaaacacctcacctgacctgactcttccatctcaacgaacacaagacttgagatccagaaaccaattcagtaaaaaaaaaagaagaacaataattgattaaaaatcctctcctcctccgtggttggtttgatcatcctcctgtgcatcgggcgatcgtttctaaactctttttttccttaattaacctccctactatctgctgttaataaaaccgtactaaaaattactttatatacttcaccatggtgactgcgaacgcggccggcgaaaactgtacaagattgaggattttacgttccctttgggacaggcggttcgtcggcgtagccccgccggcggatcaggcgcgggcggacagcacc

SEQ ID NO: 36623 - DNA, 830 bp, Oryza sativa
  Clone ID: PAT_MRT4530_40430C.1
cgggctgcaggaattcggcacgaggctttgcggcgcctctccagtctccccctcccctcccctctcccgacgacccgaccggcgacgccgctcctcctccgccgcccctctccgccgctccccctccccctcccccggcggggcgcggccgttcaagtccaacctcggccacatgctccgcctccgcctcgccttcgagaccttcctcatgagtaggctcctccacttcaccaccgtccacagtctcgttcccgctccacgtgcgcgccgtcgagtaggcttatgaactaaatgacgaggtgaatgcacggataagccctgcagatcaccatgtttgtacaatttatagttggactaagagagtattctggtaattaacttctggggcaagtaatctgccctgcagatcatcgtattgttggaattttctttttggggggcttaccaggttctcagggtgaagtgctttatgagcttcttcgaggaatgggaggtcagaaagattgtcaggtgtattgtgaatggcagtttatttccgaacagagaaatcatgtttcctcagaggaatttgacattggcatcatgccaagccctgttgctgttttccgtcctatgtcctgtcctgaggttgtagaatgatagtcgagatacatgaggatatctcaagatttactgactaaacttaaataactttttcgcacttcagaaatggtatattacttcatagtataaatttttatacaaagatttgtgtctcgatatgtaattttcttttggtacttaaacaaaatattattgccatggtatattataaatttaatactgtgatc

SEQ ID NO: 36624 - DNA, 2447 bp, Oryza sativa
  Clone ID: PAT_MRT4530_40431C.1
tgataacactggtaaaaaaaaaaggagagagagagcgtcgacaggtcgcttcctgcttccattggagaagaggagaggagaggagaggagaccgagccggcggcggcggcgacgaggagagggagctgatcgggcggtccccccctttgccgaggggacgccggcggcctccgggttgggtccacttggcagcggtgagcggcggcgggggatggcggaggcgcggctgctgcggcggcggcggctgtgcttggcggtggcggtcgtgtgggtggtggcggtggccgtgagccgggtcggcgccaacacggagggtgatgccctatatagtctgcgccaaagtctgaaagatgctaacaatgtgctgcagagttgggatcccactctggtcaatccatgcacatggttccatgtaacttgtaaccctgacaacagcgtgatcagagttgatcttggaaatgcacaactgtcaggtgcattggttccccagcttgggcagttgaaaaatctgcaatatctggagctttacagcaacaacataagtgggacaatacctaatgaactgggaaacttaactaacttggtcagtttggatctttacctgaacaacttcactggttttattccggaaaccttggggcaactctacaagctgcgtttccttcgtcttaacaacaacagtctttctggttcaattccaaaatccttgaccaatatcactactcttcaagttctggatctctcaaataacaatctctcaggagaggttccgtctactggctccttttcactctttacccctataagttttgctaataataaagatctttgtggcccgggtactacaaaaccctgccctggagctccacctttttctccaccacctcctttcaatcccccaacacctactgtgtcacaaggtgactccaaaactggagcaattgctggaggtgttgctgcagctgctgcattgctgtttgcggttccggcaattggatttgcatggtggcggcggcgtaaacctgaagaacacttctttgatgtccctgctgaggaggatccggaagtgcaccttggccaacttaagagattctcactccgggagcttcaagttgctactgataactttagcaataagaatattctgggaagaggtggctttggaaaggtgtacaaaggtagactggcagatggctcgttggtagcagtgaaaagattaaaagaagaacgtacccctggtggtgagctccagttccaaacagaagttgaaatgattagcatggcggtgcataggaacctgcttcggctccgtggattttgcatgacgcctacagaacggttacttgtctatccctacatggctaatgggagtgtcgcatcacgattgcgagagcggcagccaaatgatccgccgcttgaatggcaaacaagaactcggattgcgctgggatctgccagaggattgtcctacttgcacgaccattgtgatcccaagatcattcatcgtgatgtcaaagctgcaaatattctgttggatgaagattttgaggcagtcgtgggtgactttggactggccaaacttatggattacaaggacactcatgtaaccacagctgttcgtgggacgatcggacacattgctcctgagtacctctctactgggaagtcctctgagaagactgatgtttttggctatggaatcatgcttcttgagctcattacaggacaaagggcatttgatcttgctcgtcttgcaaacgatgatgatgtgatgttgctcgattgggtgaaagggctcctgaaagagaagaaggtggagatgctggtggacccggacctccagagcggcttcgtggagcatgaggtggagtcactcatccaggtggctctgctctgcacgcagggctccccgatggaccggcccaagatgtcggaggtggtgaggatgctggagggcgatggcctcgcggagcggtgggaggagtggcagaaggtggaggtggtccggcaggaggcggagctggccccccgccacaacgactggatcgtcgactcgacctacaatctccgggcaatggagctgtccggcccgaggtaaaagaaacgaaagacaaaatcacaaagcatccaacctttgctcgacggcttcctcgcccttgtttgtgtatatgacagacagatcgatagctggcaaatctggagggaaaaatggtttacttgtaaccctccctggtgcctcggtaattttcaagtaggctctgcacttggttgtcgttagaaatgcatggccgggcggaattgcaacacattgttgtggcggctctgcgtctgtaatggctgaacaactgatgcctctctctctgctgtattgtacgtacaactctctcttttgacggtgctaaacatcctaggcaatcttttttggtcaaaaaaaaaaaaaaaaaaaa

SEQ ID NO: 36625 - DNA, 273 bp, Oryza sativa
  Clone ID: PAT_MRT4530_40432C.1
acctgacatgccgatggcaatgcgatcgttgcctcgtgtttggctatttttgcgaaaaaaccttatgaaccatgaggataaggtaaaaatataaacaaaccaaacctagcaaatacatacaaccccagagcaagaaagatcacatatgtcagtcggtcaaagatccccattcttaatcttgcgcacatgagtgccgttaaagttaatttatgtcaaaccgcactcctttcacttttttggaacatcaacgcttatagtggaaagactttactc

SEQ ID NO: 36626 - DNA, 474 bp, Oryza sativa
  Clone ID: PAT_MRT4530_40433C.1
cccacgcgtccgctctgggtcacccgccccaggcacccgcctcacgaccaccagccgccgccgcactccgccgccccccacacctgagatcaccgccgccggcaacgcatgcaaacaccgtagctcttagctagcagcttagagatatcgagagatcagaaattaagcgatcgatcgagagaggacgacgactgtgaaaccccccatggaatggatggatggatggatggatgaaccgatgtgtactgtgtttgggcattaaccctttgatgtaaacaaagtaggcgtgtttgactgcttggtcgatcgatcgagatctctgtcgataggatcttgaattagcggatcttacctcagcagctggttcatcaagtgttgatgcagctcaatcaaactttttcctgatgaaaaagaaaccatacaaaaaaatggaggagacaaaaaacaaggaggggtaaccttgcccatcgaact

SEQ ID NO: 36627 - DNA, 368 bp, Oryza sativa
  Clone ID: PAT_MRT4530_40434C.1
ccacgcgtccggacatcaactggcgagcagcttgataggcgtgctctaacatcaccctctaccttactgatgatcaggcggaataccttgaagagcgccgactcaagacctgatcaataagcactctgagtttactagctaccctatctctgtatggactgataataccactgagaatgatattactcgtgatgaagatgaggattagactaatgatgctgatgagggcacggttgatgatgatgttagagatgaagactaactggagaatacgaaaatgaagacactggagagctgatcatgagtggtcttatgcactgcgttaaacatgcctatcgtggatgacgtgacgtagctgagatgactac

SEQ ID NO: 36628 - DNA, 441 bp, Oryza sativa
  Clone ID: PAT_MRT4530_40435C.1
cactctgggttttgtgagccagggaaacgagttctcgtattacatgatgatttgttcaaggttcgttctaaaccacacgcgaggaaaccaatgagtggactatatatccttggatacacagcaactgcaattctctttcagacaatgatcaacttcggcctgtttcatttcctgatattcacccctcaagctcagggatcacagaaggattttctatgtgtgctggtgattttgtagaggtctacaatgaagaaagccaagaatcttcatgggatgctgttgtaacatgcttcttcttggatacggcacacaatatcgttgaatatatagagatcatatcaaaagttctcaaggatggtggggtctggataaatttgggtccgcttctgtatcacttcgctgactcctatggaccagatgatgatatgtctattgaactga

SEQ ID NO: 36629 - DNA, 1819 bp, Oryza sativa
  Clone ID: PAT_MRT4530_40436C.1
tcgttgacgcgtgggcggacgcgtgggttcggaggcccaccaattcatctggagaaagctgcgctcctccgcctcgccgccgccgccgccggggaggatggccgaacggcggtacaccgagcaggaggaggcgctcgagatcagctcactccgccgcatcatcgccgcctacgccaactaccacgatgctgcagaaagggatgtcaagagatatgagcgatcattcaaaaggcttcctcctgcccacaaggaacttctttttaaccttggtctgaagtaccaaaggctgagatggtgtatatccatgaatgcatcattcatcatggacatgcttgaggcatttgagcctcctttcgacatgagtcagcatgtagatatggatggtcatgattgcgcagagaacatgcatggacattgtcatgcagattgtgctcattctgtcgataggggtgattgctttagaagttctatctctgtaagcaattccgagttgcatgaaccagacggttgccccaggaaagacgacaagactcatgaactctcaagagaaactgacaacaaggacgaggtagttgacatggaaagttgctcccggccggttggtgacaaattgggggcatctcaggttgaagataaatcatgtaatggtgataaagccatggatgcagcagctaactgtcaagatacagattgtgttgcatgttctgctgatgagaatgtgataccgcagcaattcatggctccatccttgcagttgaatgttcctccaattgatgttgacaaggttagatgcatcataagaaatattgtcagggattgggctcaggagggtcaaaaggaacgtgatgagtgctataagcccatcctggaggagcttaatcgtctatttcctaaccgaagcaaggagaggcctccttcatgcttagttcctggtgctgggcttgggagattggctctggagatatccactctgggttttgtgagccagggaaacgagttctcgtattacatgatgatttgttcaagtttcattctaaaccacacgcaagaaaccaatgagtggactatatatccttggatacacagcaactgcaattctctttcagacaatgatcaacttcgccctgtttcatttcctgatattcacccctcaagctcagggatcacagaaggattttctatgtgtgctggtgattttgtagaggtctacaatgaagaaagccaagaatttcagatatgtatgattggtaactacgggttttttgccttcttgacattctcacaatactcatattttgctccagcttcatgggatgctgttgtaacatgcttcttcttggatacggcacacaatatcgttgaatatatagagatcatatcaaaagttctcaaggatggtggggtctggataaatttgggtccgcttctgtatcacttcgctgactcctatggaccagatgatgatatgtctattgaactgagtttggaagatgtgaaaagagttgcttaccattatggatttgtgatggaggtggagaaaatgatagataccacatacactgcaaatatgaaatcaatgatgcagaatcggtaccgcgcagcattttggacgatgaggaagaatgcatctcgatcaaaagctcaaaaacaccaggaaaaactgttccagttcgatgtatatcaattggccaatgggagcactaaggtcattttcagggcaactcattggcttcgattttgggcacaactacaaaggtgtgatgaagatgaagagtttctgaatgttgcatgccgaaagttggagactaagctcttttga

SEQ ID NO: 36630 - DNA, 2121 bp, Oryza sativa
  Clone ID: PAT_MRT4530_40437C.1
atgaggccaaatctagtcattgtcgacatgctgtcaaggagcatgcacgtggtggtgctcgaggtagcggcaggcggcactcgaggctgcaacttcatggatgtcgcagtccacgtcctgtcgttgctagtgaagatcttccaagttccaagtctcacttggcacatccctaccggtcacgtcctcttccctgaatgctccgaggtggccaccatcctcggctccgggtcaccaccaccatcgccctgtcggggccatctcgccactaccgctaccctcccgagctttactgttgttggaagtcgtggggaccagcggctattgggtgtcttggtggcgcacaagcgcaacagggcggcgcacgtgtgggcagcagtgcacaggctgagcgtgttccccggcggcgagagcggcaggagaggacgatcgacggcatcatcggagatggcggacgcggacgggggctcgaacctggcggtgctggacgcgctggactcggcgcgcacgcagatgtaccacatgaaggcgatcgtgatcgccggcatgggcttcttcaccgacgcctacgacctgttctgcatctccacggtgtccaagctgctcggccgtctctactaccagcccgatggctcgacggacagtaagccaggcgctctgtccaagaccgccaacaacatggtcatcggcgtcgcgctcgtcggcacgctcatgggccagcttgtcttcggctacttcggcgacaagctcggccggaagcgcgtctacggcgtcaccctcatcctgatggccgcctgcgccatcggctccggcctgtcgttcggcagctcgcgcaaggcagtcatcggcacgctgtgcttcttccgcttctggctcggcttcggcatcggcggggactacccgctgtcggccaccatcatgtccgagtactcaaacaagaagacgcgcggcgcgttcatcgccgcggtgttcgccatgcagggcgtcggcatcatcttcgcggggctcgtgtccatgatcgtctctagcatcttcctcacctacaacaaggcgccgtcgtacaaggggaaccatgacctctcgaggcagatgccccgcggctgactacgtgtggcgcatcgtcctgatgatcggcgcgttcccggcgtttggcgaacctttctactggcggaatgaaagatgccggaagacggcgaggtacacggcgatcatcgatggcaacgcgaagcaaggcggcgaacgacaatgcagaaggtgctgtcgatcgagatagaggccgagcaggagaagctggccaagttcaacgcggccaacaactacccgctcctgtcgatggagttcgcccggcgccacggcctgcacctcatcggcacgacgaccacgtggttcctccttgacatcgccttctacagccagaacctgacccagaaggacatcctcccggctatgggcctgatcagcggcgctgccgaagtcaacgctctcacggagatgttccagatatccaaggcctcgttcctcgtcgctctcctcggcaccttccccggctactgggtcaccgtcgctctcatcgacaagatgggcaggtacatgatccagctgatcggtttcttcatgatgtccatgttcatgctggcgatgggcatcctgtacgactacctcaaaacccatcacttcctgttcgggctcctgtacgcgctcactttcttcttcgccaacttcgggccgaacagcaccaccttcgtgctgccggccgagctgttcccgacgcgcgtgcgctccacctgccacgccatcagtgccgcggcgggcaaggccggcgccatcgtcgcggccttcggcattcagaagctcacgtacaactctcaagtcaaaagcatcaagaaggcgctcatcatcctctccatcaccaacatgctcggcttcttcttcacgttcctcgtcccggagaccatgggtcggtcgctcgaggagatctccggcgaggacggcaacaccggcgccggtggcggcggcgcccctgccgctgccaatgccggcgttggcgtgagcgcttcggatgtgagcagggacgagaagttccctgcttcaagcaccgaatggcagacatccatgcacgcatga

SEQ ID NO: 36631 - DNA, 375 bp, Oryza sativa
  Clone ID: PAT_MRT4530_40438C.1
ccttactgcaggaattgctgtgactgaacttttgatgatgtcccgtggctctgctgcagccgcccgtaaacttggttctcttgtaggcttaactgtttttgcaggttgtcgttctcttctctgaaattgttggtctcgacagtttcaaacttcagtacccgccctgtccggtgttcgtcattcacggataagttggaaggcacgggtaagatatattggcacggtccatggaaacgttgaacagtgcacaaggctactgctgtttgagctccacccattccgccaggatctcctgaaatgtgtttcagggggaaaatgaaccggacagagtggcaccatgcagtcatttagcacctgccagtgcgatgacttcac

SEQ ID NO: 36632 - DNA, 571 bp, Oryza sativa
  unsure (1)..(571): unsure at all n locations
  Clone ID: PAT_MRT4530_40439C.1
aatatcttatgtgtagtgaggctgtgttgaagacacctaaaggccagttggcgcgtcnagggatggggangtagcgnggcgttggaattctcattctgggcccacacagcagncnagcnncctagttaagagttgnccantatagaccccagtaaagtgccntgtgtaaatttgggtgagtgggttggtgtgttgccaaagcttgngggtgagagggtgaccgttgctatgctgatgccttgtgttgcagtgcgattaagaggaagatatggtggagaagttgtgcgcnacccctggatacccctgggaggcctgatacctgtgcacgtggttgcacaaacatgctatgaatgtgncccctcctggagatttgctggccccactttgagtgttgtgtgtgtgtgtgctggaggaagtgatgcattgacccccctccatagcggttngttcgataaataaacagntaccgtggcacttataatgaggcttgtgagggtactgngaaattnctcggacccaaatataattaaaaattanaatcccccctttttaaaaaaaaaaaaaaaaaaaa

SEQ ID NO: 36633 - DNA, 1085 bp, Oryza sativa
  Clone ID: PAT_MRT4530_4043C.1
ccatgaacgtgcaaagcctttaaatgcgggtggcaagtaattcactaacgcgttgtcgtccgctccggcagcgcagaataccgtggagtaaacctaaaggaactcttctgggtcggcgctcccatcgtatttctctattgctccaggtcagaatcttttaggccatcggacattccgaagtgaacaaccgaaagctctacacccaacgctgggggcggtgggttgttggcgatcatgcgtccttcgtggatgtctatccgatgatgaagatgacgaggatgatgacgatgacgatgggtcgtctagttccggcgtacgattacggggacgtcggccgggttctcgagaatcctgtcgtcgtctcccgctgttatctcggtgccgatctccatcatcaccgtcattattgcgacgtcctcgaccagtatcgcccagtacccgccgttcgcgatcgttgtgatcgtggcggttgtggcggttatcatggtctcggtcttcgcttgaatgacctcctcgatcttcgttatcgtgacgccgtgaagagatatgacgccgggaacggttctcgttgtctcgtgtgcgtcgtgcctctcggcggccattcaggtgatcgcggagatcgccggtgccgcgaggtggaggggttgctcgatgaggtgattccgccgttcagggtcttcaccatttgcatcgcaagttggtggctgtttcgggtgcgctgcagcagcggcctcttcgaacgcgttgctgaggttggtcactaattgcgttgacggctctgatgtgttgggccggagtagtcacttgattctccgcttccgcattggtgcgtgctgacgtgccgacatcgtcgatagccaatacctcacgaggcgtactcgttgtcgatgatccatagtcttcgagtaggtgcaagactgatggttcatggggatcgatgtcgattaccccaacaaatcgatctgaaaccggcgtcgctccttgttccttgtcctcatccctgatggggatgcgtgactgctggacggggatcctctagagtcgacctgcaggcatgcaagcttgagtattctatagtgtcacct

SEQ ID NO: 36634 - DNA, 475 bp, Oryza sativa
  unsure (1)..(475): unsure at all n locations
  Clone ID: PAT_MRT4530_40440C.1
tcggacctcaaaaggataccctggatggaatgccttacaatgccaccccaggggttcaaaaggcgacgaggacgacggaggaagtgtcgtgccatgctcgcgacagaaccacagagggcggaggacaggntgctgcgtggcggacantaagcgcccagtgccaagacggaacaacacccacgtgtgccgagtaaataccnnatggctgctggaatgcaccgtgccctgggctggaaattgtaaatggatgcnacggctgatgaaatataatagagtgatggctaagtnaggtnttgtgagtgttcgaccatggtgacattaagtgaaaaggagcacccatgaatggttgttgaggatcgtgttntgtttgacagcaaggagcnatggccaaatatatatatatacccatgggctcccgatgttgctttgctgtatttttcactgttttcctggtgaaaaaaaaaaaaaaaaaaaa

SEQ ID NO: 36635 - DNA, 266 bp, Oryza sativa
  Clone ID: PAT_MRT4530_40441C.1
agtctgtccacgctccggaaacagagagcaataatgtactcctacctagcaacctagagcagtagcagtgcagtgcagcgaaggttaatctcggaaactaccatgggttgcctgctgatgctctgctaggttactcccctaattctttcaaccgcatgtgcccgagcacccgagagctgggtataggtatagcttgcacccgcagatctactaccactcccgccataaggccaaggagatcgagcagtacatcgtaacacagcgca

SEQ ID NO: 36636 - DNA, 1254 bp, Oryza sativa
  Clone ID: PAT_MRT4530_40442C.1
atgtctagccgatatggggtgtccgagggagatgttcttcacgtcatgaacgaggagatgttaaccagggatgaggcaatccattggttactagaggactttgagctgatggaatcccagcgcagatttgatgataaacttgatcggttactacaaatgtttggtgtgaaggaagaaaggatgcccaccaagtgttcgacgccgggaccaagctacgctaccaccaaggcagtgctcaatggcactcctactaaaccagaacgtgtgttcccgggtaccacaagtttgttcgcgccctcaattatctcagctgctagggcaacaacattgccttcgattgagaccgaggaagccgaaggcgacatgactcaggttgaggaggaaacagaagatacccttcatgatctgtgtgccaaggtggagctaaaacagcgggctgattcactaatttttgtagaactaaaggcacctcggccgccaccaactaaatttatctcaacaaagacaccttccattgtggcacaacaaaagctactgctagagacaaatcaaaggacactcatcactaggatctcccctatagaagagaaatgggttgctgggctgaaggacaaaataagattggaagatgttgatttcaattggaaaattcttggtctacatgataaagaagttgtacctaagctcagcttgattaagaatgcaatgggaagggtggctgttaagttgtctatcaaggccatggtttatgacgaaaggacaatgatactagagtcaacaaagaagaaaattgagactaataagctggtggttcattggaatatctttatacttgtattcgatccaggtaaagataatgacacattgggggagagggttgctaattatatgcaagaacttcagacacattgggatcctggtggcactggcaataatttgcatcgactcgaggacaagtcgaatattaaggagaggggattgttaggaacacagttgggctgcagatgggctaagttagtcatgtttcaatcctggcccaaacaagcacaactagcagcatatatatatgagcagcaacagcaagcacttggaggcatcaaacatttggaatcggcaaaggcggcttcggccacgacggcggcggctacttgggtggccgggcttggcacccttcttgatcttcttctctacccttcctctttctctacttgtctagaaactactataaccttctattcagtttgtattctataa

SEQ ID NO: 36637 - DNA, 360 bp, Oryza sativa
  Clone ID: PAT_MRT4530_40443C.1
atgcgagccccacatgtcatcggctccgggacgccggtccacggtggaccgagtccacaggaccggggaaggggtgcaccacgtggcgcgcacacgtggcgccgacgtggcggccacgcgggcaaccacacgggcggtggatggacggccccgatctaccgcccggtagaccggacggcggaggtggcgcgcggctgggcgcgcacgggcggcttaagccgacccggcggccatggtgatgcggcggcgcgacgctcaacagcggcggcgcaaggcggcgagcgaccgatagcggagagcggcggcgacgcagcggcgcgggcggcgctagcagcagctaagcagcggctaggcagctag

SEQ ID NO: 36638 - DNA, 450 bp, Oryza sativa
  Clone ID: PAT_MRT4530_40444C.1
atgggccatggcacccccggcatttctggtttctggtccgtccctgaccttgccccctgtcggcttactcctaataatctggattataataataccaagctgaaagacagggctaagaattggaacacagagaaaaacacagtagtggtcagcatcgctgattgccctgatagcgaacttgcttgcagaacgagtatgatggaaacatttttgctgagaaccaagtactggaatggagttgcatatacctactgctatgcagtagcaggtctaatgtttgttgcccactatactcaggagtcaggtcaaagactaaaagtacgtgaacatggggtagactggaccaatatcgagatcggtaatatacgatttggtagtaggtggatggcacctggggccgactctgacctaaaagggccaaaaaccaaaccaccctgcaccaccttttga

SEQ ID NO: 36639 - DNA, 249 bp, Oryza sativa
  Clone ID: PAT_MRT4530_40445C.1
cctctgcaggaacagcaatctgaactttttaccccgacgcgctcacacgcgggacacaatacgtcaaggcatacaaaaccaatagcattaaataccatgtccaacccgcgcttattccgacccctgaaggctgcggacaaggcattgtccgccgggttggaatccgctccaagcaaggcatcacttgtcggttcccatgcgggtgagaagcagtccccatctggttcatgaaacttatccccaaacctg

SEQ ID NO: 36640 - DNA, 534 bp, Oryza sativa
  Clone ID: PAT_MRT4530_40446C.1
atggcggcacccgcagcaccgcaggagaccaacgccgcggccggtgagatggtcacgctgatcagctcggacggagctcgcttcgaggtgccggaggcggcggtgaggctgtcgcagacggtgctcgacgagatgaagaaggacgactacaacgccatcaacggcatccctctccccaacgtcgccggcgacgtcctcgccaaggtggtcgagtactgcaccaagcacgcctccgccgccgccgccgccatcaacgccgacacggcgaagacgagcaaggaggaggaggagctgatgatgaagagcttcgacgacgagttcatcctggtggacaaccacatgctgtacagcttgctcacggcggcggacgccatgcgcatccaggggctgatggacctggcatgccagcgattggcggacatgatcaagggcaagacgtcggagcagatgaggcagacgttggggatcaccaacgacttcacgccggaggaagaagaggagtttcgccgggaggacgaggaacaatggctctga

SEQ ID NO: 36641 - DNA, 1351 bp, Oryza sativa
  Clone ID: PAT_MRT4530_40447C.1
gcacgaggcgctccttgcgccaagacgagtagcggctgaacacaacaggcgaggggcggcggtctccatctggcgagcagagcaggggatgggaggggactcctggtgagcatccacatcctctttctgattcatctctcaatcccaccgggactacttttgtctggaattcgcttgcgtttgttaaccctagcttctcttctagatctggaagaagcccttctcttaatttcagagccttaaccttaatacaagtagcagtttgtttgttccccccaaaagtttcccaagttggatccgcccctggttgttaacatagtagcaaatacaatatgaacaatgagagtcgaccaaagtggagaaaagttgcctatgggggaaggcagccaggctatgacgataaccacacggacgagtcattccttgaggagatggttatgaacgccaatgttgtcaagagggacctcctgaaagtgatgatcgactcggtctccatatctcagtatctctgcattgttgctcttgtggtttcaacatggacctatacactgaacttggtcattgatgaggtcactcttttgaagctagacactagtctacttcttgccgggttttcgatgctcttgctcacggcaagtccgttctcgctcaagcttctctccaagtatgtcctcaatacatcattcttcatcagtggtctgtatgttttggcaccgatttatcaaaccctcactaggtccatcagttcagattccatatgggcacttgctgtatgccttctgttggttcacctctttctgcatgattattctggttcaactataaggccacctggtgcactcaacaacccaaaattgaccagcaatatctccttgaatgcatcgatagtagcatccgtccttgtagcttcgcgcctgccatctaggctgcatgtctttgcaatcatgctattctccttgcagatcttcctgtttgtgcccctcgtcgcgttttgtattaagaagttctctcttagacttcatctgctcttctcctttgctctgatgatcatgaccctaggcgtcacataccaattgcatcacatgttcttcatcctactgctggcactgcttgtttttatctcaattgtttgcccttactggcttataagaattcaggaatacaagtttgagatcaatggtccctgggatgaagctaaactctgctttgatataactgaataacagaggaaagtgcatgtgcagaattttggtttcaatgttcattatctataattgatgtattaccattagtcttattattctggacatttatgtgccatgtatatgcttttcttaaaaaaaaaaaaaaa

SEQ ID NO: 36642 - DNA, 385 bp, Oryza sativa
  Clone ID: PAT_MRT4530_40448C.1
tttgtttgttttttgtgggcggtttttttttttttttttcattaagtttttttttgtttttattaccaatttttttgttttttttagcacccccgcaattttattaaatgcttggggagcccaaacaaatggccccccccccccaaattaacttggggggtaaaagtttatgcttaaaaaaaaaccttttttttggaaacaaactggcatggcggggaattttttggaaaaaccccaaaggtttttaccaaacaaaccttggggggggggaaattttctttggttaattcgccgggggggtggggggggggaattttgggccaggttggggtttgggctagggcttaagcttaagtttggggggcccgggctttttggggaaggg

SEQ ID NO: 36643 - DNA, 410 bp, Oryza sativa
  Clone ID: PAT_MRT4530_40449C.1
acaaaccaagtctggcaaacatctcgcgctgtgtggcgcaacaatcttcactatcaggacattgacattgttcaggccatagcgcatgcagcgttacaactgccagcaagttgttcggtgatgcttctacttgggatcgggaaatctgggctgcaagctgcaaggctgcttgttgggctttttaacgttgccaatgctgagataatgggtatgctaccctaaggtatctatggtgcacctgagtgaccattaccaacccttggcggtgtccttgtaatggagttttaacagtatagtggttcggaagttaaaataagctcagatatcatcatatgtggacatgtgaaactttgggtatataaatagaaacaaacgtggtctttcatatttaaaaaaaaaaaaaaaaaaaa

SEQ ID NO: 36644 - DNA, 624 bp, Oryza sativa
  Clone ID: PAT_MRT4530_4044C.1
cccgggctgcaggaattcggcacgagggagcaagagtgcttatgaatacgattcaatgcacataatattagatccataccacctctccatgtacatgtttgtagatcccctgaagaaacattttcttttgttatgatttgcatctttgtaggctaactatgtttgctggcttcaatttgaattacactcatttgattaggcccttaggaagacttcacctgaagcatgcacttaaactaaaaaatgttaatgtcagtaaaagggatctatatttttatcttggataatccaaagctgcatcagcttgagttgcaaggatcagagattgcacgcattgatttgatccaatatttgaagaaacctcaactttgtaacaaaacgcagcaaattcatgttttgtttttggataccttttgtcgtttgttagattagagttgttacgatcacatgaatactattgggaatgcttctgttccatacctcaggtttggtccagtccttgctcgtattgcccagttctccattgtatctgagtgcagtaaattcagatgaatgcttcttttgatcaaacgccaatttgaattcattgatcatcacaatctaaaatgataaatttctccctca

SEQ ID NO: 36645 - DNA, 1246 bp, Oryza sativa
  Clone ID: PAT_MRT4530_40450C.1
ctttctccaccgccccgggagccccaaaaccttatcttcccaaagcctcatctcctccttcctcccaccacctcgcctcgccatggcggccaccctcttctccacctcgctcacccccaccttcctcccggccgtcccctgccccaagcccgcgccgccggcctcagcctgcttcccctgcgcgctgccgccgcgcgccgcgctagcggcgccaccggcgccgctgcggaggcggctttctcccgtggccgtcgcggtgtcgtcggaggtggaggaggaggagggtggcgcggagtccgagggggagttcgccgaggacctcaaggtgtttgttggtaaccttccgttcagcgtcgacagcgcgcagctcgcggggctcttcgagcaggccggctccgttgagatggtcgaggttgtatatgacagacagaccggaagaagccgtggctttggattcgtcacaatgtctacagctgaagaagctggtgctgccgtcgaacaattcaatggatacacattccaaggaagacctctgagggtaaactcagggccgcctccgcctcgggatgatttcgcgccaagatcacctaggggtggtgggagcaactttgattcatccaacaagctctatgtagggaaccttgcttggggtgtcgacaactcgacactcgagaacctgttcagtgagcagggaaccgtgctcgatgccaaggtcatctacgacagggagagcggcaggtcgaggggttttggttttgtcacctatggctccgctgaagaagtcaacaatgccatatcaaatcttgacggcgttgacctggacggcaggcagatccgagttacagttgcagaatcaaagccaaggcgccaattttgagattttttttttggttatgttgatttagaggttgatgatgtgcttccaagatgttagtttgtagcttctactattgtacaccaatatggcgaaaaggaaaattgatgcggttgatgagagactgaaagtctgaaattgtacacgaggggaagatttttccccaaagatgcaatatgcacagatcctcttgttagaaagaccatctttatctcttccaatcttgtttgatccccaatttggtttcatctcagccgttggcatgtatacaatgtacatgtgcggtggtagcatatatggattgatagttggacccctaaaaaggggggggggggggggggggggggggggggggggggggggggggggagg

SEQ ID NO: 36646 - DNA, 529 bp, Oryza sativa
  Clone ID: PAT_MRT4530_40451C.1
tagtgcagtaaaattgcactttgatgcacccacacaagattcagtgcaaacccaaaaaacagaagagaaaaaaaaattcctctaatcccattttatttgtaaggaggttgaaatggcctggattagtccaggctagcttttgcagggaaacaaaatagagagtacttgagaggctaggcccggtaaccccatcttttgaatacgtgttagtgatgcatattttctcttgatttacactgcagatctggcttaggatgataagtgtaccttattttatctacctatctgatgtcttgcatcatagttaattatatgaatgaattgacaactcgatatttgtctacaccctgcattttttcccgtattcatccattgcctgactgtttacatggatgcatgtagaaccttgtgctgttttggttcataagtttagtagatagaatcttatgatgcagaatgaaatttcccttttccttggatgatataaaagtaacatactctttggatgtgagcaattagacatgtcact

SEQ ID NO: 36647 - DNA, 619 bp, Oryza sativa
  Clone ID: PAT_MRT4530_40452C.1
gtgcgctcccgtccaaagccgccgccgagtccgattttgattctacctggggtgaatcacgccaattcttgccgcacggttgaattgaagatagacggtagtttcccctctcacaaatcaaaccaatcacccctgagccggctgttttaaccctcgttgtcagccgtttctaaccgcggtcaagccaatccttcgccggtaagtattcaaacgtggcctcccgccactcaaatgcatactaagttctaaccaaagctctgcatcgagttttacctcgccgcaccaagccgagcactgccgcccccgcgctgctctgttcttcgccgccgtgaagtttttccggccgcaacccgtcgtttcaaccaatctcgccgctagcccaaccacatatcaaattagctcctcctctgccgctcgccgtcaccagagaaccctagctccctcccatcctcggccgcaaccccatttcccctctaacgccgcctttggggaatggctggaggtagaagaagagaagagagagagagagagactgacaggtcttgagaattcttctgacacactagataatatcaatcaatctcaagagattgagcaaggcaagttactatataccttt

SEQ ID NO: 36648 - DNA, 2321 bp, Oryza sativa
  Clone ID: PAT_MRT4530_40453C.1
ttatggagccacagaaaggctagagtatacagattcgttcctattactgaattctcctctaagaatatcagctggtcttttgcatgcgctagagattttccgcaccacatgccgctccgacgcctgctgttctttcgcgcttcgattgcccgacagggagatggagtacgccacctcagggaaaaccaagtggtggctttgaaagtcctccgcaggcgggtacgtccgttgcaggaaccataccccatcccgaagtgcatcttcttgcagaatcgatcttacaggatgtagttgccgggagagcaacaagtcgcctgcgaatatcgacagtatacttcagttttattgtggacctgtaatatctttggctctttcagaaattctaagcctgcatcagaaagatcttcaatggatcaagttaacaaataaacggattttcaatttttcattctaaaagggttgtaatgcgcgctaaccccgcgataacccgactttataggccaataataagccaccaaactcgctttattttgacctataagtgggttcgcggcattacccacattacacccagtcagaagacagaaattatgacaccccattattacccatggattccatttaacagccagtaaataactgggatatatttttcaataataaaaatcaatacaggggatcccagcatgatgtagaaatggagcaaagtcagaatcagttctggcaagtctttctatattgatgcctccggtcattttattccatgtatcatggactgtttttccttcaacatctggatcttttacctgtcttgtaacatcgaccaagaggttgtccaactggggggtagaaccagcaaaaagcccaattccttgcaccgcacaatcaacatttaagtaagctacagctttcgattgcagatcttcgaggttctcttcgacccattcagttgatccgatctggaaaaaagaaccttcaaaatgtagaaaagaaataaacgggacacaaataaatgagatctttgagaacattccaaactcttcggcatcccaactacaaagaatgatggtcctccgtggtgtccagcctgactgcagcattattccaagacgccgagcaatatcaagaagcgcagatgtcccgctgttagggtcaactgctccataggtccatgcatctcggtggttaccaaggataacgtaacgatcaggttcttcgtaccctttaataatagcaaaaatatcctgtatcatgcccatcttcctgtcctcctgatatgtgaagttgaccagagtgggaccaggtccaacgccgccgacatccaccgggagtccaactccggtctgccaatccgccggcaaagccgggccacctagtgtccgtatgatagccgaagccgtcttgcccgacaccggcatagatgggatggccggaaaccgccgcttaacatcctcgtggtcgaaatccaggcgctccgccccggccgtggcggcccacccgggggtgagcgggtcgccggggcctccgaggattaccgtgcccctctcgaccccgccgtccgcgtggccggcaatgagaacggcagcggcgctcctttccgcggcgcggcgcaccaccccgccgcggtagcctcctcctcggatcgccaccgcgacgcggccgcggacgctcaccccgagccgctccagcgtgaggtagtcctcctcgcggccgaggttgacgaacaccgcctccgcgacggccccgccggacggggcgtacgcgtggtacggccgcacgaggcggcgcccgacgtccgccggctcgtcgagggacaggtgcgcgaggagggtccggtcggcgcggagcagcgcgagggaggcgtgccccgggtacgagagcagcggcgtgtactcccgcgttagggttcggagccccgcggcgcggaaccccgagagcacccgcgcggcggcgccggccgccgcgcccgtccccgcgaggtgcggccccgcggtgagcgcccgcaggtcggcggcgatggtcgcgttcgccccctcggacagggccaggaaccgcgcggccgggtcgtactccgcggggccgccgccgcccgccgcccccctcgcggcggggcggcggtggaggacgacgagcgagacgagcagcgccgccccgaacccgacgaggacgcgcaccgacgcggggggcaagcgagccagcgccgcggcgggctgcgacagcatttcgccgtgagaggcgaatgcgcggcgtgctttctcgcgtgcgagtgccacccgtgcagcgagcagtgcacagcgcagcgctctagttaatgcgggcat

SEQ ID NO: 36649 - DNA, 191 bp, Oryza sativa
  Clone ID: PAT_MRT4530_40454C.1
ccttagcttgatggaactgacgtggtggatgtgtgtggctggcctgtggtgaaatgacccagaactggaaaattattctggcctcctgggatgggatggatgacgatatgagaaaggagaaaggaaaaggatggaacccccgatgatggtgtgaataattgtgatgcacgggtggcttggaaatgttgtta

SEQ ID NO: 36650 - DNA, 474 bp, Oryza sativa
  unsure (1)..(474): unsure at all n locations
  Clone ID: PAT_MRT4530_40455C.1
caggttggggagtcacaagcnncctgtagcactggggacaagaacacaaccngtgattgtagagcgagtatgttgcatagaaagttttccttgacntattcagcggaattcaggcaagcatgggatgtgcttttcggtcggatgaggccaacnaatgttccatatcnatgagtgcggcnccaaatgctagatgtagggcataatcttggctcatgagacntaacacattctgtttagaccggtttgtttggaggggtatttgttntgcacatggctcatgttgatgttnatatattgccactgttcagtagtgaggagctcttttnatntcccagccagccatgggggagaaatggttggtgtgtcagactttggaatcccctacttttttggagttgcgtgnattcnaaaggatatgggcttggccataaaggngngggnattttnttgtgccaaaaaaaaaaaaaaaaaaaa

SEQ ID NO: 36651 - DNA, 1698 bp, Oryza sativa
  Clone ID: PAT_MRT4530_40456C.1
tcagagctgagaatgctcaacccccatctcagacaagcgcgaaagcagcctcctctccagcttcacgccggccaactccgcctccctgatcagcctccggcacctgcccatcctcccctccgccgcgtagcctccgatcaggccgccgtacatgtcgccggtcgggacgaacccggcgtccttcatgccagaacccccattcgatggctctgtgcaagaaattcgacttgttgatgggagattgccatctctgcagagccaccaagctctggtcttcgccgaggccgtgcaaattccatacagtgcagggagcgcccggttaaccagccccatgcttcctgtgctttgtcgccagatggttctcttcccccgccccggcgaacggcgcgagcaagctcactggctggtatagctctccacggcggcgtaccgccggagcttcacgcacaccttcatcacggccgtgcagtcctgctgccgaacgtgcagctccggcctctcgccgagctcgtccagcagcgccgcggcgagcccgtagccctcaggcgtacggacggcctccagcatcagcttcacgtggacgctcgggctcagtgtcctcttgttgatcgtggcgaactcgaggagttttcgggcaaggcctactttacctgccctgatgaacccactgaccatggcttcaagaacagcacggctcgctgaagggacgcactgctctagcgcatcctccatcttcagctggtcgaagcgtgccaagacctcaattgtcgaagcgagaatccggtcgtcggggaagagtggcacgacagtctgcctctgagcccagcaaagtgtctgcaatgccctctctgggagccccatgtgcccaagctcccgaatggtcattgacaaggatcctttccggaggaaccgaacccaccgatcgagcacaatggacacgtcagactccggtggcagcgctgcaatctcccgggcaatcccaatgaggacctccgggttcttgcacacctggtcactgaatgaagagcgtgaagaaagtgcagcccttgctgccagcctgatatgctgctttggtgcaggagcattgggcagtcgtgtcttgtgaggcagtggcagcgggagaggtcgctgcctcaccgggtttggcggctttggtggcttctggcgcatcggccggtcaaagagtgccgagatggcatcaagctcatctttgctccactctacagcctcttcctcatcatcgtcctcatcctcagaagcagaagaattctcatggtatgtctgctcattgcggtccattacctccaactccatgacagaacccccattcgatggctctgtgcaagaaattcgacttgttgatgggagattgccatctctgcagagccaccaagctctggtcttcgccgaggccgtgcaaattccatacagtgcagggagcggccggttaaccagtgacatgcttctggctggtataggttgctgacagctgcgctctccctggctggtctctactctgccacacgcagcggctgcagactccagcgcggcctttcttcgcgccgctctgagcagccgagtcgccggcgaggccgccacgcgtgtgcggcggcgccgacctgggctcctggatgagatgccgtcaaaaaatgcagaaatacagttcaaatcagggagcaaaatgcaaaaaatatccat

SEQ ID NO: 36652 - DNA, 2230 bp, Oryza sativa
  Clone ID: PAT_MRT4530_40457C.1
cgcgtccatggccaccgccgcatccacctccgccgccgccgtcgccgccgcatcgcgcctcctcgtccgccgcgcgccgccgcgcctgctgcgccggttaccccgcgcggcgctcgccgcctctcgcccgtcgccgccgtcgtcgtcgtcgtacggtgcagcagccgtcgccctcggccggcagccgctcggccaccgcgctaggatgggacacaccgccgccgccgccgccgccgcgggccccgcgctcgggctcaccaagcccaacgccgtcgagccgccgcaggtttcatttgctgctaaagacgtcgaattctccgaatggaagggagacatcctcgcaatcgcagtgacagagaatgatctggtcaaaggatcagactccaaattcgagaatgcggtgttgaagaagctcgacggccagctcggcggcctcctgtcggaggcatcggcggaggaggatttcaccggcaaagccgggcaatcagtggtgctccgcctcccggggcagggtttcaagagggtgggtctgatcggccttgggcagaacgccccctccaccacaacggcttgcaagggcatcggcgaatccgtcgcgtcagttgccaagtctgctcaagctagcagcgcggctattgtttttgcttcagtgggtgggatccaggaagattttaagctgactgctgcggcagcaattgcttcaggaactgtgcttgggctgcacgaggacagcagatacaagtcggagtcgaagaaggtgcatcttaaacaagtagatcttatcggatttggttctggtccagaggttgaccagaaacttaagtatgccaatgatctctcctcgggtgtgatattcgggaaagaacttgtgaactcacctgcaaatgttcttactcctgctgtgcttgccgaggaggcatcaaacattgcttctacatacagtgatgtattcactgcgacaatattagatgtggagaaatgtaaagagttaaagatgggctcctacttgggagttgctgcagcttctgcgaatcctccccacttcatccacttgtgctacaaaccacctggtgggaatgccaagagaaagctggccattgttgggaagggtctaacttttgacagtggtggctacaacattaagactggaccaggctgcagtattgagctgatgaagtttgacatgggaggctctgcagcagtttttggtgcagcaaaagctttgggccaaatcaagccccctggagtagaggttcattttattgttgctgcttgtgaaaacatgattagtggcacaggcatgagacctggtgacattgtgactgcttctaacgggaagactattgaggtaaataacactgatgcggagggaaggcttacacttgctgatgctttggtgtacgcttgtaatcaaggtgttgacaagattattgatctggcaacacttactggtgcatgtgtcgttgcacttgggcctagcattgctggaattttcacgccaagtgatgaactagctaaggaagttgctgcggcatctgagatatcaggagagaagttctggagaatgccactcgaggaaagctactgggagtcgatgaagtctggtgttgctgacatggttaacaccggtggccggcagggtggttctattactgctgcactcttcctgaaacagtttgtggatgagaaggtgcagtggatgcacattgacatggccgggccagtgtggaacgacaagaagcgggcggccaccggattcggcgtctccaccctggttgagtgggttctcaagaactcatcttaaatcatttattcccttgcattctcatccccctgaggatgagatgacacgaggatttcggaggagtttggtggtggcaaagcggccagctagggccaatgatatacaaaagtttagtgggcaatttagaataagaaaactggtcatcgtcgtttccttttcagttggggtgtcgaattgtttggtgaaatcatcatcatcatcatcatcacattcacaagatgttttggccaggacaagtctgttcgtgccgtgtagctctctcccttttctcttttgtcaaatgtggaataacgctcttccttttgatttgtgccccgggataatctgagtcataaatatttcgacaataaactgaaaaaaaaagtttccgctgtgctagtgactgaacaggggaactttctgactgacaaaaaaaaaaaaaaaaaa

SEQ ID NO: 36653 - DNA, 1886 bp, Oryza sativa
  Clone ID: PAT_MRT4530_40458C.1
ctaaagagacgatagcatggaagtcagagcatttggatgttctactgtctttacggaactggtgatagcaaactgaacatatgctgcattctgttcttgtgattggaaatacatgaatggagtataatgtagaaaatttgaaacccttgatgtgtatatatcagcatatcttttattgaacagctctccatctgattctagcattggtgcaattttttcatctaatctctgcataacaatgagcaacttttgcatactttctgtaagctcctgatcatccatacaagtagcagcaagcgtctgtgctgggcgtgaatttgttcgtctctgcagagccagccgaagctggttaaaaaaaagaagaaaacgaccgcacgggcttattccaatcgtgttattacatgctaatgactctacttacaccccaagtacacacagctatacacgacataatcgctacgtaacgcgaaaacgttccaaatggcctgcctcgctgcatcaagatcaatcgccacggctcacacactggcacaagcacgtccatccagctgcctttctatctctaccgatttttctcccaactccaccacatgaatgatgaatcgaacgaatgtcagtgttgttgcctccgggaataggaatgcacgtcatgcccaagcgtctgttcttgtgattggaaatacatgaatggagtataatgtagaaaaatttgaaacccttgatgtgtatatatcagcatatttttcaatttgcctcgtcagatgactcttatcccataggcccgtacgtgatagccaaccccatcttttattgaacagctctccatctgattctagcattggtgcaattttttcatctaatctctgcataacaatgagcaacttttgcatactttctgtaagctcctgatcatccatacaagtagcagcaagcgtctgtgctgggcgtgaatttgttcgtctctgcagagccagccgaagctggttaaaaagatctcccacgacttccttttgttgtataagtgtcgaaacgctgttctttctggacatggcttcgataaggtgcacccatctactctcctaccgtagatccaccaattctcttccatatatttcactcacagcactagtagaaagcatctgggtgccatgcatggcccttttaatgtaaccaaaacgatcagctttgaccaaattccctttgtctttatccataattagacccctgatgaccaggtcaggatcaaattcaaggtcatctacagggaaacccatgcccttcagattggccataccataatcataagcacgcccttcccaagccatcacattgtagtgaatcaatgtatagtccatatcatagccaatgacactgatggatcgaagatttagtgtcctggtgcaaaatattccacgaggagagtgtcttacggaaaaaggatctgcaattcccaactcacggagcaacgattcagcttctctcgcttcttgccaagctatctcctctatagggccatgcaatgtcgacttgccattcccaccaaacgcgtcgagatgctccctccgcacgttcaaatcccccttggtgctctcccctaggtagtccacccgcgagagcctcgacgaggtcaaggcgaagtacgactccccctcctcatcctcgtcctcctcgtctcccaggcccccctccaccgcgaccggcctggtggagtcgagcgcgcggcaccggagcgacgaccagagggagagggagagggagaggggagggcgcgggacgcggagggagggagctccgaggcggccccgcggcctgcaccttcccgttcccgtcctccgcgccggaggctggaggcagaggcggcgcgcgagctcgatggagtccgccat

SEQ ID NO: 36654 - DNA, 177 bp, Oryza sativa
  Clone ID: PAT_MRT4530_40459C.1
aagtgggagtccaaaccccgagcggggcggcgcgcttgcttccagttaggtatagctatgtggacgccgctggtgcttgctcgcggcggacgggcaacctattggctggagtcaccaccaccaagaccaggtggtacaccctgggccggtctgtcaccaggaatgggctacccggat

SEQ ID NO: 36655 - DNA, 639 bp, Oryza sativa
  Clone ID: PAT_MRT4530_4045C.1
aacccaaagaagggggtcccaaacgggaagaaggtccggggcgaccgccggcggcgaaccggaagctcggcggcgacgcggaaaaaaaagaacgacggcgcgggcttaattccccacggaaaaaaagaccggcgaaccggcggaaaccgaagaagggaggcccggggaacgattatatagcgtcggaaggaaaaaaaaccgcccggagaggaaggaaaccggcgcggcgatctcggctccatcaatgacgccggcgaggatttcgggagggattccaaacgaatccgagggagagagagagggaaaaacgggggaaaagggagagggaatcacggggagtgatttccccctctttatggcgcgcggggacggcgggatgcggcggattcggcggcggcggcggcgctagggcacgggcgggcggcgggcgcggcgcgaggacagggatgacaggtgggccccacccgtcagcgagggtggcgggcgggcccgcccgtcagcggcgcgcgcgcggggaggagaccgatgggccgcgggggagaggagagagagggagggagctgggccgagccggcccagtaagggaaggggggggggaaaagaagactttttaggatttttctttttataaaaccattt

SEQ ID NO: 36656 - DNA, 339 bp, Oryza sativa
  Clone ID: PAT_MRT4530_40460C.1
atgctgcccgcgacatcggcaaatccggccgggatgccttctacaccatcgtgccgtgccgtcttcatcgccacctcgtcactgacgacaccgaagaaagaggtgacgttgccaacacgacaagctctgtacagcctgccacctcggcgaggccgaccgggaggcctcgacaccaccgtgctcatctgcagccgtgacgatagcaacaacaattacggcaaggccacagaggatagcagcaacggctgcgacgagagcatgaagaaggacatccgcacgcatctacgtccaaggcacacacacaagccgccatatatccagcaacgaatgccgcgttag

SEQ ID NO: 36657 - DNA, 1115 bp, Oryza sativa
  Clone ID: PAT_MRT4530_40461C.1
ctagtggatccccgggctgcaggcgctgagccaccatttctctcaaatttctcctcctccaatccaaggccccaaggaattgaaggatgatgctgctcgccaaggagttgggcctgtcgccgccggcagcggtcactcctcgccggaggccgccgcctgccagggtccccgcctctccctccggtggctcgcccgtggccgtcggagacctctggctccggaccaaaggagccggaggaggaggagacgggttcgggagccacagccacgagagcgagatggatttggccatgctcgtcaccgacttccttgagaacggcggcaccggaggcgccgattcccgcgccagcagcgactccgactccgccctctccgaccacctcgccgataacatttctatctacaagcaaggcggcgatgagaaagaaaacgagctactctccatggtccactcgctgttattctcgatccatgagtcagaccttctggctttcaaaagaggtcaatgcagtgccagctgcatccgtcatttacttgtgaagctcttgagatattcgggatatgatgcagctgtttgcgtatcaaaatggcagggattcgacaagatacctggaggtgatcatgagtatatcgatgtcatcatgaatagtgatactgaatatcgtctgatcattgatatcgacttcaggagccactttgaaatagccagggctgttgattcttatgacagtctgctcaattcacttccggtggtctatgttggcactcttcccagactgaaacagttcttgcatgttatggtagatgctgcaaaatggtcgcttaagcagaactctatgcctctgcctccttggagatccttgccttatctccaagcaaaatggcattccaagtatgagaggatagacctgcacattgagcaagacttccacagcacagcttcagatcacgcactatgcattgggcacctcaaaaggctgaaatcctccctgcagtcagaactggataccgaaaggttgcttatgatgccaatcaagactgatatgaagcggagggcaaagtttgagaggcggcggcgccgttccttgctcagcttctgattcatatttgtgctt

SEQ ID NO: 36658 - DNA, 1428 bp, Oryza sativa
  Clone ID: PAT_MRT4530_40462C.1
atggcggtggaccaaccaattaggattaagattatgcttggaatgaaaggggggaggggaagaacgagtaaatttgctggcctcaaaggattgttgtggaaggcgggaatcgctggagacgaggaagttaaaccacggggcaatgacattcatcgtcgctggcttagggtaaggagagtggaagaagattctgagactgatttctctttcaaggatgccaacaaactgtgctctcttgttcggaagcagaaagcacttgccaaaaagaaaaggaagtacttggctgaatcatatgtaaggagtgatgaggtttcttgtgagaaagtcatagcccatgttgaaaaatgttttgatttccaaagcgatggctacagccaccacattgttcaagatggccttcagttttttaagttgcaaaaaggcaaggatggctcactcagtccacaaggtcttgcagacatgcaactcataataaataagttaagcaatgaagcacttcattcagtggctaacatcgtcacccacaatagggttagttttgagaagaccaggccagcgatgaacaagatcatagaagaccacctaccacaatacttggcaaacttgcgtgatgaaaatgacatgtctcaactgtcgcacattttaacaaattcattcagttgccgatctaattccttaaacattgcaacacctatttcaccgaaaatgttatcatccatcaaccaggcattaaatgtacttggtacactgactatacaatctcttgttgcaatgaaaagaaagcttgatgaaatatctttcaccccaaaatttagttttgtacctcgtataagcagaaaggcgcatatggttactgtgattaggaaacagtgcaataagatgatttcaagggttggggaaagtggtgacctgccaaagaatttggcaaaagcactatcagtggtgaatctgtataggaagcaagagttgaaatgcatggacatctcacaggcagagttctttccattctcaaagaaagctattttcttgcaaaatgatgtcctgaatgctatttggtcaattcaaaagttgaagaaaggggatcttaaattgctgcgtcccatactatgtcaaggttcaaacgatgagatgctgttcaagactactgtgagaagggtgatttaccagatgaggcatcagatgcctctacgtcaaaaaattgatttcacagaacaaaggaagggtgcagaggtagaagctgtactgaatttaatgaactgtgggagtgaatgccacagtgatgaacaagtgatgagcttaggttgtgatgactacagttgtgataatgatttcgtgctcacagagggttacaaaaattttggtcatcagcagcataaaatagatgaagcttgttcgagtagcatggccaaccctgtcggtctttcataa

SEQ ID NO: 36659 - DNA, 264 bp, Oryza sativa
  Clone ID: PAT_MRT4530_40463C.1
atgggaagaggagggatgcggcagcaaggtggatccgccgtcctcgtcgccgcgacctccgctgagctcgtcaccgtcaagctttttgccgcctcaccactagttggatctggcagtgctcacaccatcagcggggacgtgtgggcaaggcggtggccggatattgaaggtgggagacggaatgacatcactggtggaggaaccatctttgctcggtccggcaaaatccacgatagtctcggatccaaaaagaaccgggagtaa

SEQ ID NO: 36660 - DNA, 417 bp, Oryza sativa
  Clone ID: PAT_MRT4530_40464C.1
agtaggcccacacgatggtgactaaagagggcatatgatctaacaacaaaagacaccctgcgaggatgagcatccactttataatggctaactatgaagaagcgagccacagcaccttcgagggatgctgtgggctatcggactatggtcatgtgcggcagactccacgaagacaggttcaggggtgcggccagtccggacggcgaaacctggcgcatgcataacaatatgggcggccaaatggtgactgatatggcctcatataaggatgaccagagtatcctttgtctgggggggggtgctccatccaatggacgttggtactgttagttggcaccttcatttgacgacaatgcaattgcgattaggcaaacttaacaggttcatgaacagcatctactctttggaatgcagcat

SEQ ID NO: 36661 - DNA, 301 bp, Oryza sativa
  Clone ID: PAT_MRT4530_40465C.1
gctaatgattattccattttttcttatcctggggaagaattaatagccgggggtcgcatctatggaacttgacataggccttacccaacaacatatatatgaagcacatcccgcttttacatgaggtcaaagagagatcaggtgaaataaacacaaaagccgggctcgggggggaaagtaaaaagagggagaacaacctgggtacacatgcaacatggggggggacatcttgcggctacaggtgaacaattcaacaagggtatttttgacgaagacggcttatttgctcccaaactcacga

SEQ ID NO: 36662 - DNA, 1331 bp, Oryza sativa
  Clone ID: PAT_MRT4530_40466C.1
tttttttttaggattaactgttaagtacattatctagggggtaaagtacactttatatgtttatagaaacacatggttgcggaaccaggcttgttctgtttacagataacatcacaggtcaacacaaagctcgtcaattccagacataaaccagggttgcatagaacatacaagcaaccaaataaatacatacaatagggttaccgtttatggttactgagtttatcgaatcacagacccaagttaaaataactgttaaactcgtaacattatcttttgtatgtcaggagtaacagcaacgtatgcatacttttaacgaggtacgagaaccatttaattctttactttgagccactatctcacaagaaagaccaaatatagttactccacaaatcattctattgtagtggcaaagtagattgctgcaagttctccccagaaggccagtacagtaaatgcggagatgacacagacaagaaagtcgaattacatcagttcagaccttcggtgctacattgagctgctaagaacatccatgccatttgttgattaacggtatcagtttccttcaagctgatactgatagaaatccacccgtgaatgatctcagtttgctgcttgctctactttcctctgtttgctgctatgtctagtcagttttaagtttgctggttcactttggcttcttcaagataagctaggaaataacctcttcagttcataaaattgcatcctccatgcttgtttcacacatgcattgagcttgggaagaaggaaacagagtaacctcatgaggacaaaagagctagccaatgcaaggcatgtatcctggtgaagcaatctgtctggtgatcgtgcaaacatgaacagagaatccccttgctcagtctttttgtcattctcaattatatttaccacttcttccatcctctctagggatattgcatccagtgacacaggattcatacctgtaacatctttataaaacatagcaagagagttcatcgtgcgagatccatgatagcgcacacgcattgtagagttcacaaggaaaagtgtcggaaaggcacgaactccatatcttgacaacattctaggtttgatacgagattcttcaaaggaaaaatgagcgattgttggaaagaaggatgataacttttgaaaatctgttctgaagatcttggagaaaggacaccatgaagcatagaaaagaattgcaacaaaatcctccctgttctgcagcacaagagtaactgccttttgcagaacaaaatcatccccctccacgacgcccacgtggtgcgcccggtggcccggcgaccccgccgcgg

SEQ ID NO: 36663 - DNA, 305 bp, Oryza sativa
  Clone ID: PAT_MRT4530_40467C.1
cctacgcttccgttgcctgtggtcttcttctacaaaaattccgccgttgccgccaccattggtggtggtcaactcttccggacagttgggacaccctaaccgtccaccccaggcgtcggatgcggcgtttggggaggagagcgcttcgaccagtctcgtagtgaggtcgttcaaggaggcttcccattgcgtcgtgcttggtttcctcttatggcatgccaagcacccaccgagggtctagaaggtactcaagagcgtgtacaaggatgcgacctacgttctcaaatacctgatcggattcatta

SEQ ID NO: 36664 - DNA, 222 bp, Oryza sativa
  Clone ID: PAT_MRT4530_40468C.1
atggacgagccggaggaggggatcgatgtggcaaagacgaataatcgacgacagagcgatggccgacggagcttcttgggtaggctcttctcccccgtccatcccctttccatcttcttcctcgggggtcacgcagttttgcttgggtgcggtcccatccgagctgacacgaatattcctctcaggctgtcggtgacatggaaccgggagtatcatgactag

SEQ ID NO: 36665 - DNA, 612 bp, Oryza sativa
  Clone ID: PAT_MRT4530_40469C.1
atggacatccttactatcgtgtgggcatatgaagatgggtatcacccgtcagcgacccaggtcagcggcggctctacccgcggacgccacagacgccgttgtcgccgtcgacgctgccgtagggacggccgtcgccgagggagcgcggaccccgacgatgtcgccgcgctccccgccgtcactcgcaccgtgctgatgagacaggagggagaggggagagggagctgtccgccgtcgccgctgcaccccgccgtcgcccacgccgtgccggtgagacgggagggagaggggaagagggagcggcgccaccggaggggaggggaggggaagcggcatcggtggggagaggcggagggggagaggcggcgttgggggcgggggaggcggccggttcggctggggggaggggaccatcggaggggagcgggaaaggcggcgtcgggggcgggggaggcggccggctcggctgtgggggagggggcgcatgaggggaggggaggggaggggaagcggcgccggagggagacggggaggaggagaggcagcgttgggggtggctcggctgggtggagggggagggttagggtttttaacgatttggaattgatctga

SEQ ID NO: 36666 - DNA, 486 bp, Oryza sativa
  Clone ID: PAT_MRT4530_4046C.1
atggcggccggacctcccgcgccgatttccttcccctccggccgctctctcccctttcaaccctatttaaacctttcccgcgcctccctcgcccgtttccgccccttgccgcaccgtctcccaccggaatcgagctcgcgccgtcgccctctctctcctccgtcgccgacgacctccggccggccttctccgctcgccgggaccgtctcccgccccggcgttgccttctccggcttcgccgcaccgccgtcgaccccgtccacccccttgtttcgctcgccgaccaccggaacgccgtcgaccccgtcgaccctagccgcgccgccgccttcctccgctccggccgcctttttggtcgtcgccgtcgacctagggggcgcgggcgccgcctcccgccggccgcgccgagtggccgccttcgggcgcgccgagtggccgccgcgtggggcccggccgtcagccgcccgcgcccttaggtgcggctga

SEQ ID NO: 36667 - DNA, 707 bp, Oryza sativa
  unsure (1)..(707): unsure at all n locations
  Clone ID: PAT_MRT4530_40470C.1
cacgcgtccggccgcctcatcctcctactactaccccaccgcggtctccgccgccgcctctgccggccagtacgacccctacgcggcgtaccagtactacgctgaccccgccgcggccgggccaggcagcggcggcgccgggggcctgccggggtactacttcggcgccggtgaggcgtttcaggccccggcatcgtcggcgtcgcagggtgctccggcggctaccgcggcggctggcaaggaggccgggaagcactttgggttcgatcctcagcgctacgcgcaggcagcagccgccagatcttcgaatggagtggcaccagcaattgcagccccaggcatgcaccctgctcagtggaatgcccatttcgggcatcctgtgccgaaaattgtttcaagaaagcatataaagaaaaagccaaaggttgtgcaaccattgacttgtgaagtttgcaagattcagtgcgatactccagaagttctaaggatccataagacgggaaagaagcacaagaaaaacttagagaggctacaagactctatcacacctaaaccagtaaagcctccaagtactccaaacactgttgctcttgcagcanatatggcacctgatcctgtcactactagtgtcactaccagtgtgattcctgctgcacaaacgaagaagaagaaaagtgctgcagcaaccccagaggaactggaagtga

SEQ ID NO: 36668 - DNA, 2074 bp, Oryza sativa
  Clone ID: PAT_MRT4530_40471C.1
cgaattgacgttttgtcattaaacaacagggctaaattcacatagcgagggcaacattctgcaatcttggattggtcaataaacaactggaagacaggcacaagacaaccttcgctccaaactccgactacttatctgcggcaggcacaaagagcccaaataatcttcaagcagtttagctaagttacattcattaggagtacaggagcttgtgcattctgttctctgttgcaacaaaatagaaccggagaaaaatgagcaagcatagttgctttccacctcaggctataggtggctgcgcttgctgtttctgtaccatggccttatgcttctgaccaattatgtgaaactcataaactttctggctgttgacgaccacattgcacacggtacatattttcacttctccttgagctgctccagcgtcaagtacacgcctcctcttcacctccagttcctctggggttgctgcagcactcttcttcttcttcgtttgtgcagcaggaatcacactggtagtgacactagtagtgacaggatcaggtgccatatttgctgcaagagcaacagtgtttggagtacttggaggctttactggtttaggtgtgatagagtcttgtagcctctctaagtttttcttgtgcttctttcccgtcttatggatccttagaacttctggagtatcgcactgaatcttgcaaacttcacaagtcaatggttgcacaacctttggctttttctttatatgctttcttgaaacaattttcggcacaggatgcccgaaatgggcattccactgagcagggtgcatgcctggggctgcaattgctggtgccactccattcgaagatctggcggctgctgcaatcttcaaatccagcgttgatctgggatctatagttgtaccatacatgaccttaaataggtcacaactcttgctttctgctgacactatggcagatagggaccaaaaccacttgaatttattgggacctccagaaaacacgtcaataataggaactacagtagttgctgtctgaggagcataagcaaagttcaagtaactaagatctgactgcaagatgagagatgcttcaacttttgcctttgctgccttctgcgcgtagcgctgaggatcgaacccaaagtgcttcccggcctccttgccagccgccgcggtagccgccggagcaccctgcgacgccgacgatgccggggcctgaaacgcctcaccggcgccgaagtagtaccccggcaggcccccggcgccgccgctgcctggcccggccgcggcggggtcagcgtagtactggtacgccgcgtaggggtcgtactggccggcagaggcggcggcggagaccgcgggatacacaaaacaactagagatgattgtgcacaacttcaacatcttcattaagacatgaggacattgagatatgaggaccgaccaacattgggcatataagatatgtgatgatgttctacataaaatcattagtacactcatattttgaaggaaattacctcatgcttacattaaatgggagctagcaatagataaagaatttcaaaagcatgatttgtctaaaaaaacaaaagctttggtgttctaattttaaaaaatgcttcatatgattgagaatatttttataggcatgataaaatacctcaaccttggaaatacatgaaacatatttgagatatatttatgtttccatggattatgccaatattttgttcattgaaccataatatttcgaacaagagagccaaatcgttacatcatacaccatgatcttctttactacaatgtggtttacacgaatgcaaagaaactaaagaaatgaggtttttagggttaacaaagaaattttagacaagattgctcgttgaagttatagttatctttctcatttattacaacttgcttgcaatgctgaagtaaaaataaggaagacataaggtccttaagtgccatgggcgcgactagcaaaaccatgcacccacagcccaccatttaacatattttaatgaagcaacaccaggacggtggctctaatccaatgtcaacact

SEQ ID NO: 36669 - DNA, 597 bp, Oryza sativa
  Clone ID: PAT_MRT4530_40472C.1
atggagagcagcgatctgggagtagacggcattcggttgtgggaggagctaggcccgactggcgaccggcgggggaagagcggggcacggccggcgagggcggagatgggcgcggccggcagctggcgggggaggagctggacgcggcggtgggggctccgcggcgacgacagcggtggaggcgggggcgggggcggcggcggaggcaggggtgggggcgccgtggcggcagcgcgggagcgcaaggccgggagctgggtcgcgcagggcggggaggagggcaaggcaaggagcgtgtcccgcctctgctcgaggaaggaggggtccgggagcgacagctgcttgacgtcggctgatgggcgcgtccgcgtgtgggcgtgcgagcggtgggagcgcgacttcctggcggagctcggcacggtggggcacgcgcggcatcccaacgtgtgcgcgctcctcggctgctgcgtcgaccgcgacctctacctcgtcttccacttctccggccgcggctccgtctccgccaacctccacgacgagaatgcgccggcgatgtggtgggcggatgccgcgtcggggcgggggacgtcgcgttga

SEQ ID NO: 36670 - DNA, 483 bp, Oryza sativa
  Clone ID: PAT_MRT4530_40473C.1
atggctcgacccttagcaatggcgatgagtcagggagcctgggtgtgccacttcctcgcggagattgtggagctcatggccttcatcttctctcttcctttccgcctcctcgccgaaatcctctccggcggcggcggcgacggcgacctgcaggacgcccacgattacttcgtcgaggaaggcaggaagcacctcgccgggcctggggcgctccacttgctgggcgagcgccgccgcgacgcgctgagcgccctcgacgcagccctcagcacaggctacggctacggctaccacgacctccttccgctggaggagcgcgccgacgcgctcgtggcgcgcgccgagatcgagctcgtgcgctatctccgctgcaccctcctcaactccggccaccgcggccaggccatcgccgacctcagggaggccgtccgcatctgccccgacaacggccgcgccaacgcgctgctcctgaagtacaattaa

SEQ ID NO: 36671 - DNA, 283 bp, Oryza sativa
  unsure (1)..(283): unsure at all n locations
  Clone ID: PAT_MRT4530_40474C.1
gttgtgttaggccttggggttttctatctctttgcatcgttttcgctctcatttgtttagagatttgttctttgaacaaagcatgcagaaatctctgaggactgaagtgtttctctctgcttgtcactttctccccaattgtggaataactaacaggaatcgacatggggtctatgctcacattccacatgatatgcatcttgcccatgaatcttncaagaaaatctggatctcttacttcctttctttttctttaggtcttggcttgcaaactaggataaag

SEQ ID NO: 36672 - DNA, 807 bp, Oryza sativa
  unsure (1)..(807): unsure at all n locations
  Clone ID: PAT_MRT4530_40475C.1
aaaatacgacttcactatngggcgaattggttaccgggccccccctcgagttcgaccccgctccttgcgccgccgccaagacgagtcgcggctgccgatctccatctggcgaggagagtaggggaggggatcctgttaaaagcttccatccaggaatggcaatggcattgagaagagtactgaaacatggtgtaatcccaagagatgcagctcaagtagttggcataagaggatttgcaattgcaagcaaggcaaagaagggcggaaagggtgcggccgatgctgctaaaacccctgtgctcagcaaagaacttaagagtacaacagtgtttggggcaaatatcctcaaggaggggtctgatccgaaactccagccagattctgaataccctgagtggctgtggcacctgctcgacaagcgccctatgctgagtgagctgcggaggaaagatgccaagacgctcccctatgaagacctgaaacggttcgtcaagctggtgaaccgagctcggatcaaggagcagaatgccctcactgcaaagaactgatctggatactctctggaggttccatcatctgtttttcactacatgatttactgttgaaatatgctaagctgtgcactgtaataatgtagtgacctggaacattagaatatttaagagatgcttcctaatttttgttttctggcaaaatgctttagcaaattacttcctccgtttcacaatgtaagttattctagcattttccacattccctttgatgttaatgaatgtagacatatatatctatctagatttattacct

SEQ ID NO: 36673 - DNA, 401 bp, Oryza sativa
  Clone ID: PAT_MRT4530_40476C.1
aaaaaaaaaaaaaaaaaaatataaaaaaaaaaaaactaaaaaaaaaaaaaaaaaaaaaaaaaaaaaaatggaaaaaaaaaaaaaaaaaaaaaaaaaaaaaaaaaaaggggcggcctttttaaagaatcaaagctcccgtacccggccttgcaagttaaaaccttttttatagggccccaaaattaatcaactggcctttttttaaaaacgggggggattggaaaaaccctgacttaaccaaactaaatggctttgaagaaaatccccttttcgccagatggcgaaataaaaaaaaggcccgaaccaatagcctttacaaacagtggcccaacctgaatggcaaatggaaccccccttgtagcggccaataaaccgcgtggggtggggggataccgcccagc

SEQ ID NO: 36674 - DNA, 375 bp, Oryza sativa
  Clone ID: PAT_MRT4530_40477C.1
ggccggcgtcgccgcagcgggagaaggaggtctccgcgcgacggattccggagacgccgcggtcttctccctcccgcgtggtccctccatcaccaccgattgaccgcctccacgatgccgcctccacaggagcaggggaacgccacggccttctccctctcccgcgcggtcctccccatcaacgccgtttcaccggggtccaccggtcgctgtccaggccgccgccacctcagccgggtattatctgtgtctgatgatttgatgaatgttggatcgaaggtttgaatagaacggtgattagctgctggctgtcgggtacttctccagcagccgccgccgctgatcttcttcccaggacaactttctgcagccgcc

SEQ ID NO: 36675 - DNA, 228 bp, Oryza sativa
  Clone ID: PAT_MRT4530_40478C.1
ctcgtggcatgggcgcatccgcgcacggcgcacgccgcaaccgcgggggtcgtcggcggcaggcaccacccaaccgagcgcactgtgctgcgcggcaccagtgctgtgcaccacggtcttcgtctgaaacattgggcagttccccaggaatctcacgagcccggcatggccaggaaaaagacagacagcgttccaaacattagccttgtccgcgcaacaaaaggctaa

SEQ ID NO: 36676 - DNA, 567 bp, Oryza sativa
  unsure (1)..(567): unsure at all n locations
  Clone ID: PAT_MRT4530_40479C.1
caacattaaagatgattttgtatcgacaaccatggaagagatatttaggttgttactcaatactaagaatggtaatgaattcatagtctatatggagcagtaatgatttcttaattatgtctgcaaatgagattatctgattcttccactttcaactgagttgtttcttctatgcagtgtatgggttgctagaaaaccaccaggttttgcctttattgactttgatgaccgcagggatgcagaagatgcaattcgtgatttagatggtaataagcgtagatatttgtctttgtagttcatgcaagatagtttcatgttatgcacttctctaatgagttatctatttcaacttctggcattacatagttttgccattaaaatggctattacattatttctttagtcaagtgagtccccatcaatttttatcttggttatagtataaataactgtctgaatcatgattcaagcaacttataaatttaatttggataaacaatagacacntgaattatagataaaatatgttgtgtccaaacatatagttttagcttaccatcatgaatg

SEQ ID NO: 36677 - DNA, 305 bp, Oryza sativa
  unsure (1)..(305): unsure at all n locations
  Clone ID: PAT_MRT4530_4047C.1
ccgccgctgggtgggtgaaacaaggttgatgcggcanctggtgaactccctgaancgcatccacggcaccggcatcgtccaccgcgacatcaanccgtccaacctcgtcntcncccggcgggggcaggtnaaactcatccanttccgcgccgccaccgaactccgcatcggcaaaaantacntcccnancgcccctcctcganccggantactgcccgcctgaactctacntcctcccccaagaaaanccccanccgcccnccnaacccatcnccccatcctctccccnatcctcttggnanatt

SEQ ID NO: 36678 - DNA, 243 bp, Oryza sativa
  Clone ID: PAT_MRT4530_40480C.1
atgattgatttcgtggagatatcaggcgtaagggtgcaaggggtgaggatgtatggatatattaggtgcaaggtgcgcatgtcagccgtaggtgacggcgcatttcttgcatgcaccctggccggttgttcagccactgtcatgctatcgtgcttcgaggtcggtaatggtcaggcgcccactatggccgcaggtggttgtctgctgcacgccggacgacggctgctggcgatcgtctcatcg

SEQ ID NO: 36679 - DNA, 1574 bp, Oryza sativa
  Clone ID: PAT_MRT4530_40481C.1
atggataagaagaaagctgttgatgacactgagcctgggccagcgccttctcggcctgtggacagatttggtttcattaagccagaacagggtacctctcctgatgggatttcgaagagtaaattcatacatgaacgtgagcgtgaaagtgggtactggcttactgtgcattacttcactaacctcacagctgacatatttttgggtaaccatagggacggaaggaggataaaaaaatggaggaagatgataggtgttggtggtagtgactggaaacattatgttagaagaaaccctcatgtggttaaaagaagaataaggaaaggaattcctgattgccttagaggacttgtttggcagttaatttcaggcagcagggaccttttgctaatgaaccctggggtttatgagacactggtcatatacgagacatctgcatcagaattggaaataattcgtgacatatcacgtacttttccatcacatattttcttccaacagagacatggtccaggccaaagatccttgtataatgttctaaaagcatactctgtttatgatagggatgttggatacgtgcagggaatgggatttttagctggcttgctacttctttatatgagtgaagaagatgcattttggttattagttgctttgctgaagggagctgttcatgcgccaatggaaggtttgtatcaggctggtttgccgcttgtgcagcaatatctgtatcagtttgagaaattagttctggagcaaatgccacagttgggacagcattttattgaagaaatgataaatccaagcatgtatgcaagtcaatggtttatcactgttttctcgtattccttcccttttcatctaactcttagagtttgggatgtcttcctgtatgagggcattaaggttgtattccaagttggattggctctattgagattttgccatgatgaattggtgaatattctctttgccctttttttggctgcttttgttttaagtcttatttttggagatgtgctgaagtttgtaacgtgctgccaggtcaaattgcctttcgagaaacttctacatgctttcagaaacttcccagaagaggcaactgatcctgatgtattattgccaattgccttcacattcaaggtgtctggtcgtcttgaagagctggagaaagagtatcagaaaaaattagaaggatccaatgcaagcacaagtactaagcggtctcatcctctcaaattgaaaacgatgagcaggattggtagccgtgccttaagcaactttactaatagtgaaaaatgagacaaatcttgtgttgtataacgagtcacaccttgttttattacactgtaaagaatgacaattattcgttcatctctctgttatattattttttttaaaaaaaagaaagttcaaccagtttccacaagcacaaaggtgcagatgcatcgtcaactttgtagttcttgatgttgtttttctcacgctgaaaaattgtaaggaatgccaattgtaaatactatcttggtgaatgagatggaatacctgttggtgaaaaaaaaaaaaaaaaaaaa

SEQ ID NO: 36680 - DNA, 525 bp, Oryza sativa
  Clone ID: PAT_MRT4530_40482C.1
atggcgtaccaatcgttcggcgcggtggacttggcggcgagcttcttcttctcctcctcctcctcctcgccgcagcctggattggtcggtgtccatggcgatcggttcttgggcggcggcggcggcgacggcggcgacggcgggagcagctacgacggcggcggcgatggaggggcggcgagcgggaaggggacgaggcgcgacgagaggaaggagaggcggctggcgtcgaaccgcgagtcggcgcggcggtcgcgggtgcggcggcggcggcagctggacgagctgtcgtcgcacgtcgccgagctccgcgccgccaaccaccggctcgccgtggagctgaaccgcgcggcggcgaggcacgcgcagatggcgcgggagaacgcgcggctcgccgaggaggcacgcgcgctccgggagaggctgcccctccgcggcggcggcggcggcggcggcgacggcgaggcggaggaggaagcgggaggaggctgcggcgcggaggcaattttggcgccaatggattaa

SEQ ID NO: 36681 - DNA, 1256 bp, Oryza sativa
  Clone ID: PAT_MRT4530_40483C.1
attgaaatgcgaaatgtgtgaacaagacatttttggtacttcctccgtccccctaatataagagattttggcatttgcttgcactgtttgactattcgtcttattaaaaaatttagaattattatttattttatttgtgacttactttattatccaaagtactttaagcacaactttttgttttttatatttacacaaattttttgaataagacgagtggtcaaacagtgcaagcaaaatgtcaaaatccgttatatttggggacggagggagtagttggtggcagcgtgacttaaactgggattgctgtgtcatgctagatatctcaggagacggtattgttttggtcagagttaggggaaaagacaaatttcttgatgtactgatggttccttttgcaggatttgcccgatgaggttggaagcgttaatgtcttttcttggataagctgtctggatcttcggactcttgctgtgctgacaaattccaccatatccagctcaagtgatccccataacatatccttcaatttcttaatacctgaaagaggcacagataaatcgccctactacaagctaaaagcagtactgcctgattcgaatgttactgttgctagtcaaaagaaaattgaggacaagctaaacgttgccactccagaaggaaacctcttttggtcattccccaatgaattgtcacccatcattattggaacgactcaattctcgcaaaagagatatgtctatatctcagcggactcaattgtaaagggaaaaattgaagatcttggtcgcatcgatttaggcacttatgctattgctgctgttgaagattgtaccaagcgcattggtgactatgttagtatagatgttctgaatgccgttcagaaaacagctccgaaaaatttggtgtataccgaaccttatgacaaggatgcatgcttacttgattttgatgtgcttgtggtggagccacgcaaactacggaaggaccttattgattctatcatggtgtggttcagggctttcagtctagccaatccaagggatcaaattaggttggcaataacattggccttgtatgacaattatctgaagctcccttccaattggaagcgcgcagatgctaactcagacatactgaactacaacgggccaaagaatgtttgctctgaaggtggacgtcagcttcaagaagaaggcaatggcgatgagtggcaactgtaccttgatcagaaatcccttgccgtacttagttaa

SEQ ID NO: 36682 - DNA, 141 bp, Oryza sativa
  Clone ID: PAT_MRT4530_40484C.1
atggcgcgcgacgtctttggcgctgcttccttccttggagatgttttctacatgtttgggttgttcgatgaggccttcgcattcgtggttctagttcttgcttgcggcaggtggcttgctcacttcattggtctctgctag

SEQ ID NO: 36683 - DNA, 1790 bp, Oryza sativa
  Clone ID: PAT_MRT4530_40485C.1
aaacatgaaatattcaaaatactaacattttttctttagcctttctgtaacactggactgagttacagtgcggttgctattgtgactgcacaacactaaccgcacgcaatctcagccatccatttctcaatcagagggttcaaacccacactactgtctcatcatcacctataggatcattagctacaacatttttttttctatggtacatagagccatcacagctttcattttactaccttcgttctcaaaataaagctatcttcaactatgaaccatgaaaacaaaacttgtccaagattcatagccagaaatagctacattcctgagacggaggtagtagattcaactgtcactcaaacctcggctttcttcgtcgtcgtcgtcgctgtcgcggataccttggcatcctccattgatggctgaacacgtggatgatgcctatacgtgtacctccatgcggagtagaggtagaggaagaaggcgacgagctcgaacacggcgagcagccagtagaaccggtcgaggtggctggcgtcgaggtcggcgccgtcgagccaaccgccgtgtccggcaccgccggcggtggcgcggttgaccgcctggatgagggcgccgccaagccacgacgcgacgccgaggatgcagaagaagacggcgccgccgatggacttcatgccggcggacgcctcgctgtagaagaactcgaggaggccgacgaaggaggtgacgtccatgacgccgaggaggaagaactgcggcgtcagccagaacaccgacatggccggcgccgcgacgccgaggcagcggcggcggcgcgactccacggcggctgcgagcgcgagcgcggcggcgctggacgcgaacccgaggccgacgcgctggaggtgggtgacgcccgcggcgtagcccgtggcgcggcggagccacggcacggcggcgcggtcgtaggcgacgaggatgagcatctggaagacgatggggacgacgaagaggctcgccggcgggacgctggtgccggcgaggcgggtgtccatggcgccgccctgctgcacggtgaaggtgaggaggagagggatggggacgtagccgaggacggaggtgaggaagacggggagcatgcggaggatgatcttcgcctcctccacctgcgtcaccgtgcacgccgaccatcgccgccggtcgccgtcgtccaccgccgccttgtccaggaacttgaagtctggagttttatccagcagctcgatggtcgagccgtcagaacactcctgcatttccaccaagctctccggcatcgtgacgttcctcttcctgaacgccgccacaaaaacctggaggattctggtgagcgggctgccggtgggaacgcggtggcggtagaaggggaggccggcgaggacgacggccatggcgacgagcgccatgagcgcggcgagcgcgaatccgaggtcccacccttcgttgttctgcacccacaccacgagcacgagccccacgagcccccccagcgagatgcagaaggcgaaccagttgaagaagctcgccttcccccgggcctccgccgccgccgccgccgccgggtcgtcgccgccgacctcgccgccgtcgaactggtcgccacccagcgccgccccgcacacccgcagcgcgccctcgccgagcgggatcacgtacaggcccagccggagcaggctcaggttccgcccgctcaccgccgcgcattggccggcggcggcgtcgcacggcggcgggtgcagcgacgggaagtgcgcttggcatgctagcagcat

SEQ ID NO: 36684 - DNA, 1850 bp, Oryza sativa
  Clone ID: PAT_MRT4530_40486C.1
atggaggctgtaatccttgctgtctcaaagattggttcagttttagtggaggaagccaccaaagctgctatagccaagctatctgaaaaagttgcaaatctgaaggaactaccgacaaaggttgatgaaataaagaaggaactggagacaatgaacaatgttataaaaaagatgagtacaacacatcccatcgatgaggttgtcaagggttggattgtagaggtgcggggcctggcccaccatgttcaggatgtaatggacaaatattcataccatgctcttatgttggaagaagaaagttccatgaaaaaggtattcactaaaaagaaatatgtcacagttttcagtgatattgcggaagagattatccagatagagaaaaagattgaaaatgctgggaagcggaaagaacggtggctgcagcagcctgaccttattcctaacccgcttacttatattgaaaggaaacagttccaagactgcctcctggcacaagattatctagtggggattgaaggcaacaggaagctgctgactgaatggttgtactccagtgagcaaggtaacacagtgataacggtatctggtatgggtggattgggcaaaaccgctctggtcaataatgtgtatgagtatgagcgggagaagaacaattttgatgctttttcttggattgtcgtgtcacagacatataatggggttgatctactgaggaaattacttaggaagattggtgttgtcgaaacgacgccaacaattgggtaccctgaacagacaaatttatcagatttggaccctcgtgacttgaaaaatataataaaggaaaggctaaaggatagaaaatttctggttgtattggatgacgtttggaaccgggaagcatacactctgatagaggatgcgttcctaagctgccaaacaagtcgcataatcatcacaacaagacaggacgatgtggcaactcttgcatacccaacacaccgtctcaaactcaaaccattggagcacaatgatgcatttgatctcttctgcaaaaagaccttctataacagcatgcacagcaagtgcccacaggatcttgagaagttggctcacaatatagtggacagcaaaagaggagaaatttggctttcaaatgattatggcacaatgatagaaatggaaagggatgttcgccgtctgtcatcttgtggatgggaaaacaatgatgtactaaaacttaaatttccacgtctgcgaaccctagtatcattgagagcaatgtcaccctccacttatatgctgtcctcaattttgtcagaatcaaactatcttacagttctcgagcttcaagactcagaaatcactgaagtgccagaatccatagggaatttgttcaacttacgttacatcggcttgcggagcaccaaggtcaagacactcccacaatcagttgaaaagctgtctaatctccacactttagacatcaagcaaaccaaaatagagaagctaccaaaaggaatcgctaaggtcaagaagctacggcacctgatagccgatagatatgctgatgaaacacagtcgacgttccagtatttcgtaggaatgcaagcacccaaaaatctgtccaatatggaggaactacaaactcttgagaccatgcaagccagcaaggacttggctgagcacctgagtaaattgttgaaattaagacgtgtatggattgacaacataagttatagtgattgtgcaaagctttttgctaccttgtcaaacatgcagcttctttccagcttgcttatctctgcaaggaatgaaaatgaggcactttgctttgaggaactcaggccaaagtccaaagaactccacaa

SEQ ID NO: 36685 - DNA, 360 bp, Oryza sativa
  Clone ID: PAT_MRT4530_40487C.1
atgacggtggtgctccggcgggaaacagcggcaacggagggctggccgaggttcttctcctcctcgcgaacccgatggtggcaacggcaaccgaaggcggcggctgcaacggcggtgcggcgtggctggaccgacgtcgacggtggagagcttcgggtcgatggtgtcggcggcgctccggtgatctgcggcggaaacggaggacgggacgaggacggcggcgacctcgcgatactgatgaaggagacggcgactgacggcgacgaccgaagcgatggcggcgcccgactggacacccgccggcggcagcgacgcaaagaaccacgcgaaggcgacgctagagaaggaattgagctctga

SEQ ID NO: 36686 - DNA, 636 bp, Oryza sativa
  unsure (1)..(636): unsure at all n locations
  Clone ID: PAT_MRT4530_40488C.1
cgcgctctcctccgccttctccctcctctccctcccctcctcntcctcccccgccgccgccgccgccgccgccccanggtccttcgccgtctccagccgcgcccgcncacgccgcgccgtcgccgtggtggcgtccaccnccaccgagtccccnaaggtcctggagctcggggacgccatcgcggggctcnccctccaaggangcgcggggcctcntggaccncctccataancgcctcggngtctccgccgccgccttcgcgcccgccgccgtcttctccgctcccggcncgggcggcgcgggcncctcctccnacnaggcccccgccaataacacgganttcgacntggtctncgaggaggttcccttccngcgcgcgcntcgccagcttcnnggtggtgcgcgcgctcaccaacctgnccctcnaggaggccaaggncctcttcaaggggcctccccaaaaangtcaagggnngntntcaccanggactnaggccnatgtatccccaaaaaancctttctnaggnntgttcnggccccaanggttttccatttgccnttcnccctnagnntnattttttagggantccccccctttttttcnctncnccccnatantnttttttttccccacc

SEQ ID NO: 36687 - DNA, 263 bp, Oryza sativa
  Clone ID: PAT_MRT4530_40489C.1
aaaaaaaaaaaaaaaaaaacataaacaaataaaatataaaaaattatatgaaaacaaaattaaaagatataaaaacaattaaaatgggcggggcgtctaaagggggcgagttttctaatgtttccatgctaacttacacgtgtttgagacgacatacattttcaattgttccccctaatttaattcaaatagcccgctttacacaacctggatgtgctaaaacattggcttacccgacgttaaacgtttcgcaagatatccca

SEQ ID NO: 36688 - DNA, 1077 bp, Oryza sativa
  Clone ID: PAT_MRT4530_4048C.1
atggccatgggagggatggggatggtgaagcttcagtcagtggctgcgccgccgtcgccgccgtcgctccagccgtgcgccgccgccgttccagacgtcgtcgtcgctcgagaagaccgccgtcgtggtcgccaagccgtcgccgtcctcgtccaccgcttcgccaccgtcggagaccgccgaagcatcatcgccgtcgtcaagccgaagaccgccgccgtttcaacctcgtcgccgtcgccgtccgttggtcttccgccgtcgctttggtcgccgatgccgcgctacaagcctgagtacttgtttggtgttgagggatttgtccaggagttgcgtacgatgtcctttgccataggatttgggactgcccctttttatgcccagattcctcatgatcgtcatgaagagaagtgtcgagtcaaagtcaccttgaacagtaatagtgaagatatcccctcagtgatgttcgaagctggaggaagaaactacatccattcatgtcaggaggtggcaaggatcgccataggagagctccgtgatcgctacagtgatcagttggccgacactgagtatcgctaccatcctcgccaaccccagggaagtgaccgtggcagctaccttgagactgaaggaattgagaatgatgctactacaaggcatttggttgagatgctgtgggctatggatgaaagccgtgcagagactgtgttagcggctcaagatcgtgaagaccggaatcgtggtaagatttgcaagctagaggacaaagtggatcgtttggagaaggaactagctgcattgaagggagaagcaccgccgcagaaggccaggattcgtcttaccgcaaggaagagagctctatttgtccctcgctatcaattggcgccaaaggtccgtgtggtggaaaaagaagttgccccagccttaacagatcctccggtcatcattataagtgatgatgaagaagaagaatccaagcgcaaccattccaagattgagtgggtagcaactcaagatgatgaagacgagccttcaatcgaccttcgatgctcggaagaactagagtgccatgtctag

SEQ ID NO: 36689 - DNA, 1591 bp, Oryza sativa
  Clone ID: PAT_MRT4530_40490C.1
gagatgtaacgcagtataaaaggcaagtctatttctgctgatttgagcccctatcacatttaactccatgataaacattagattgcaacctctaactgttacataacaataacaattccatgaacaaaaagaaaagaaaaaaagagtggaaaataaaacaacaccatccccaagtcacaaaatgctctgaccttgaagagagccaaagcaagtatgctattgccataccaactctcatcaggacttttcaagaagtggtcgatatcttggccttcacatcaagattctccttgtcatcaataggctttgtggtctgattcctgaccctcttgatcttggggctttcgagccccttgtgagcaaacccatagagccgcagcacctggttatcggcaaaattaaatgctcgctccatactcctgagacaccgctccacaggataatccccatagcttccacatggcttgcacccgacaaaatgagtcacgaatggccaccgctcatccccgagccccggatggtggttctccatcatctcctcgtacttatctactagaccagcccagaagccatgtaagtagtacgaattctctatgaacaccttgttcatccacttctccttttgcgagagcgagaggtaaatcaaagcagactgatcatcagcctcaaatgccgggcgtcccttgaggttggcagtaagtatcttcccggcttcatctccgatgaatcccttgggacccataggcgcccacgcatcaagaagatcaagcgaccactggcaattccggaagaggaagctgccggtgttgagcgcgatccatgagtgcttctcaaagaggagatcctggtatccatggatgatgaggttgcggtcttggtagcgcgagaggggcagctcgaaagccatgtcggtgaagagcgcgtcgctgtccatccaccagatccactcgacctccgggtgggagagcatgaggcggcggagcagaggcagcttggcccagtacccggcgagctcggtgtcgaggtgggcgaggttgtggacgatctcgatgccgtggaggcggcagtagtcgatcttgttcttggtggtcttgagcaggtagtggtcgccgagcgggttgtcgcagggccccggctgcgagcccgtgacgagcaggatcctgggcttgccgccggcgacggtggacgggaacccagggttctgcctgagccagcggcggcgctgaccgtcccagtcggagatcttggggccgagcgcgtagcgttcgacagcggaggcgtaggccgccgccgcctccgtggcgttgagcgcggtggcgttgaaggagccggcgaggtccccggcggcggcggcgtcgtcgtcggcgccgccgtcggagcggatctcgcggaggatgcggtcgatgtcctcgacggccttggcgccggcgagcgcgtcggcgtcggtgggcttgttgaaggtgcggtggatcttgcgcgagcggtggtggtggccgtggctgctcagcggcgacgccccacgcggccgcggcgccgtcatcggcagcccgccgccaccgcctcctccccccttgccgttgttgtaccccat

SEQ ID NO: 36690 - DNA, 372 bp, Oryza sativa
  Clone ID: PAT_MRT4530_40491C.1
aattcggcccggggggggactccccgtcgcctcctctcctccaaatcccaacccacctcaccgatcccatcgtcgattctcaccgcctcaccgcgcccgcgccagcgcctcgcccatgtgatgtgagtgagccactcacactccccctctctatcgccgcgcccccgattcgcgagccgccccgatccctcccgcgcggctgataaatccgaggcggctaggggtgggggtggaatggggcaggaagggatggggtacaacaacggcaaggggggaggaggcggtggcggcgggctgccgatgacggcgccgcggccgcgtggggcgtcgccgctgagcagccacggacaccaccaccgctcgcgcaagatc

SEQ ID NO: 36691 - DNA, 459 bp, Oryza sativa
  Clone ID: PAT_MRT4530_40492C.1
tttttttttttttttttttttttttttttttttttttttttttattttttttttttttttttttttttttttttattttattttatattgttaaaatttatttatacatgtgtcaatttaattgtgcaaattcggggggaaaaacgagatttgttaatttaaaacgtgccaaaaggtacacaaatggggcaaaaaagacatccaaagatagcaaacccagcggggaaaatccctgaattttataaaaaaaaaaaacccccaacaaaaaaaaaaaaaagagcgggttattttaaaaaaaagcaaaaaaaccccggcccgggggcccccctttttggggaaaaggaaaattttcccccggaaaaagggggggggggggacttttttacaaaaaaaaggggggtttttcctttggggggaaatttccccttaaggggggggggggggccaaaagttttttcc

SEQ ID NO: 36692 - DNA, 650 bp, Oryza sativa
  unsure (1)..(650): unsure at all n locations
  Clone ID: PAT_MRT4530_40493C.1
agcatgagncggcggagcagaggcagcttggcnccagtaccccggcgagctcggtgtcgaggtgggcgaggttgtgnacgatctcgaatcgtggaggcggcagtagtcgatcttgttcttggtggtcttgagcaggtagtggtcgccgagcgggttgtcgcagggccccggctgcgagcccgtgacgagcaggatcctgggcttgccgccggcgacggtggacgggaacccagagttctgcctgagccagcggcggcgctgaccgtcccagtcggagatcttggggccgagcgcgtagcgttcgacagcggaggcgtaggccgccgccgcctccgtggcgttgagcgcggtggcgttgaaggagccggcgaggtccccggcggcggcggcgtcgtcgtcgtcggcgccgccgtcggagcggatctcgcggaggatgcggtcgatgtcctcgacggccttggcgccggcgagcgcgtcggcgtcggtgggctggttggggagggagaggttgaggccgatggtgccgcggaggacgaggatggtgacgaggccgcagagcacggtgatcttgacgttgttgaaggtgcggtggatcttgcgcgagcggtggtggtggccgtggctgctcagcggcgacgccccacgcgaca

SEQ ID NO: 36693 - DNA, 613 bp, Oryza sativa
  unsure (1)..(613): unsure at all n locations
  Clone ID: PAT_MRT4530_40494C.1
caataattgtcggagcaaagggctagccgggaggcgctgcacacctcgtcacatggcgtgtccccgagcagagatgagagatggtgaggatgagatggccccccgcgtcgtctcctctaccggcgcgcgcccgcgntngncgacgcaggtagcgccatccacattcctcgagccgcgccgtgtcatgtggaaacagcgagcggccacaacccacctcgtcgtgctcctcctcccggtttggtttcgtttggtttggtttgttttcctctcctccgctcggacgccgatccgtccccgtggctcgcggcagagtgtgtgactctgcacaggacaggatggccaccctgccaaccgtgtacttgctctggatatttctggctcctccgtcctcccggagctctctctctctctcggctgcctgtagctgtactccaaattgtgtgacgaccaggccaccagggacctggttttcagttgctgctaatataacaaaatatcatgtggtaggctggtggatataattgcagggagatgtattttataaaccctctcctttttcgaggtgttcgccaaaaaaaaaaaaaaaaaaaaaaaaaaaaaaaaaaaaaaaaaa

SEQ ID NO: 36694 - DNA, 1023 bp, Oryza sativa
  Clone ID: PAT_MRT4530_40495C.1
atgcgggccccacatggcagtgactcgggggggggggggggggccggggggcggtccgcggtggaccgggtccacggaccggggaaggagcggcacaccacgtggtgcacacgtggcgccgacgcggcgcacacgtggcagccacgtggcagccacgcgggcggcggggttggacggccccgatctaccgggtagatcggacggcggcgggagcacgtggccggcacgcacgggcggctcaagccggcccggcggccaaggcgcacggcgacgcaaggcggcaaccggcggcgaccggccggcggcggagggcggcggcgtcgcggcgacgcggacagcgacatcggcggcgtcgcggctaggcggcggcgcggcggctaagcggcgtgggaggggtggaaggggaagaggtgtctcaccgacggcgattggcgacggcaagtgacggagggcgatgacggcagcgggacgagctctggaaccacctagcgaacacgaagaaaggggttagagagagagaggaagatggaagagggcgaggacgccggccgaaggtggcggccatggcggagctcaccggcgcgcggtgcgaacggggttcccgcggcgtaaagcggcggcggagaggaggacggcatggccctcgggcttgcaaacccgacggcggcgacggtgcggcggctagcggctaccggagcggcggcggcggatatgagggcgacagcgctagggcgatagagggcacgggagagctcggcgaaatggagaaaaagagagaggggagagcggggatgcttaaataggggagagggggctcggacgtgggtgggcgacgacgtgggcaacgtggccaaggaggcacgggagcgagggggcggcggcggttgcgggacgcgcggcagcggctggaggttgggggaggacccaacaggtgggccccacctgtcggcgaccccgggagagaggagggggggctcggacagccggctggaccgtggccttcggccggcccagcggggaggg

SEQ ID NO: 36695 - DNA, 247 bp, Oryza sativa
  Clone ID: PAT_MRT4530_40496C.1
ggggcagcggcgaggcggggccttcgaagatgatgtcgccgaggccctccgcctctgccgcaccggaaggcggcggcggtgcctccacctcccgctcggtgcccacggcgaggtgagcttttcatctaaccgcttgttgcccgtcgctcctgctcctcggcgcgagatctcgctgctcgtcattgtcattccgctgggtgaaatagcttagccgcaacgcgatcagtgttccattggcattgttgtc

SEQ ID NO: 36696 - DNA, 837 bp, Oryza sativa
  Clone ID: PAT_MRT4530_40497C.1
atggcgtggcagggacatctccccatcaccaccttgagaagaaagagaggtgggaaggaggagcggggaggcggaggagcctcgctaggggacctcactggcgctgttgactccttccgaccagccgacgaggcaggcggcagcgcggtggggcagtggtggcggtggattggaatgctcgaggaagcgaggggaacgggagaagaagaggtagggttgagtgcttgcatgaatcttaaagcatatctgatggtccaaaattcgaatgatagaagccccttctcctcccctgactccctgagagtccatgcaaccatgcccagtttcctccacgcgcttgctctagctggcccttccactgcctgtgtccaccactcccaggcgccaacacccgcttcctatgacagcgtcgagacggagaaggggcagcgcctggcagccaacaggagggcggaggcgggggcgcggcgcggagcgccgccggctgcggagcgcggtcgcgtggagcggtgttgcttcgcagcggccgggcgcgaaagcactggctgcagcagcatgccaagcagcagccagcgtcctgactccagagcaatgtttctcgatttattttggactgggaatggtttgagaatgggttcaacccattttcttgtgtttgttttgaaccgatttggattatctttgttacaaatgaagaacactgaggtaaaaaggccggggaagcttgccggtaggccatcaacaatggagcgacaaattgaagctgaattgaaagggaaaatcatggggaaaatactaaggaataagtggggaatcaatttttgcaatcaattttag

SEQ ID NO: 36697 - DNA, 885 bp, Oryza sativa
  Clone ID: PAT_MRT4530_40498C.1
atggcgtggcagggacatctccccatcaccaccttgagaagaaagagaggtgggaaggaggagcggggaggcggaggagcctcgctaggggacctcactggcgctgttgactccttccgaccagccgacgaggcaggcggcagcgcggtggggcagtggtggcggtggattggaatgctcgaggaagcgaggggaacgggagaagaagaggtagggttgagtgcttgcatgaatcttaaagcatatctgatggtccaaaattcgaatgatagaagccccttctcctcccctgactccctgagagtccatgcaaccatgcccagtttcctccacgcgcttgctctagctggcccttccactgcctgtgtccaccactcccaggcgccaacacccgcttcctatgacagcgtcgagacggagaaggggcagcgcctggcagccaacaggagggcggaggcggggagcgacggcggagcgccgccggctgcggagcgcggtcgcgtggagcggttgttgcttcgcagcggccgggcgcgaaagcactggctgcagcagcatggtagctggctatttggcgagcatagcataagcagcagccagcgagagccaagcagcagccagcgtcctgactccagagcaatgtttctcgatttattttggactgggaatggtttgagaatgggttcaacccattttcttgtgtttgttttgaaccgatttggattatctttgttacaaatgaagaacactgaggtaaaaaggccggggaagcttgccggtaggccatcaacaatggagcgacaaattgaagctgaattgaaagggaaaatcatggggaaaatactaaggaataagtggggaatcaatttttgcaatcaattttag

SEQ ID NO: 36698 - DNA, 378 bp, Oryza sativa
  Clone ID: PAT_MRT4530_40499C.1
agtgaagggtaaagatacagcgcacaaatcgcgcttaaggcgaatctttgcataaacgaatttaacatgtggggttacaatgaaaagaaaaactggtccaacaactgtcttgggcattggtggtggactgaccttaaccacaaccgggttttccttctttcaaggaccaaaattaggttggcaatcccaggcccacggcctttttatttcgggtggaaatttaggtccaaaggaattaaaccacccacatccggtgccaggcttggcttactttggccaacaggggagggaattcttgccccttgtgatctttttttggaggcggagggccaccttccagtaaacttcaagaagtggggggccttcaagggcctaaat

SEQ ID NO: 36699 - DNA, 2660 bp, Oryza sativa
  Clone ID: PAT_MRT4530_4049C.1
cccacgcgtccgcctcccccgccccgcctcctcctcctccgcaccgcacgaaccgacccgacccccacttcgccgccgccgccgcagccgcagccgcgatggggacggagcggaagcgcaaggtgagcctcttcgacgtggtcgacgagacctccgtctccgccaagctcggccgcgccgccaccaccaacggctcggccgccgccgccgcggccaacccgtccatcaatcggtggacggggaggccctactcggcgaggtacctcgagatcctcgagaagcgccgcacgctacccgtgtggcagcagaaggacgatttcctcgccgtcctccgcgacaaccagaccctcatcctcgtcggagaaaccggaagcggcaagaccactcagattccccaattcgtgctcgaggctgaaggcttgagcaaccgctcaatggttgcttgcacccagccgcggagggtggcagctatgtcagtttcccggcgtgttgcggaggagatggatgttactatcggggaggaagttggttacagcatccgttttgaggattgcagcagtcacaaaacagttctcaaatatttgacagatggtatgcttctgagagaagctatggcagacccacttttagagaggtacaaggtgattgttcttgatgaggcccatgagcggacattagcaacagatgttctgtttgggcttctgaaggaggttctaaagaacagacctgatttgaagcttgttgttatgagtgctacccttgaggctgagaaatttcagacctatttcagtggtgcaccgttgatgaaggtgcctgggagacttcatccggttgagatcttctatacacaagaaccagaaagggactacctggaagctgctatcaggacagttgttcagatacatatgtgtgaacctgctggagatatccttgttttccttactggagaggaggagattgaggatgcctgtcggaagataaataaggaaattaataacatgggggatcaggttggcccagttaaagttgtgcctttgtattctacgctgcctccagcaatgcagcagaagatttttgaacctgctccagccccatcaagagagggaggcccagctggaaggaaaattgttgtgtccacaaatattgctgagacatccctaaccatagatggtatagtgtatgtgatagacccagggttttccaaacagaaggtttacaatccaaggataagggtggagtcccttctggtgtcgccaatttcaaaggcaagtgcacatcagagagctggtcgtgctggaagaacgcaacctgggaagtgtttcaggttatatacagagaagagttttaacgatgatttacagccacagacatacccagaaattcttaggtcaaatctggcgaatacggttcttaccttgaagaagcttggaattgatgatttagtgcattttgactttatggatcctcctgcaccagaaactttgatgagggccttggaagttttgaactacttaggggcacttgatgatgatggaaacctcacgcctttaggtgaaacaatgagtgaatttcctctagatccccagatgtcaaagatgcttgtcatcagtccaaaatacaactgttcaaatgagatcctttcaatatctgccatgctgtcagtacccaattgctttctccggcctagggaggcacagaaggctgctgatgaagcgaaggctcgatttggccacattgacggggaccacctgacacttctgaatgtataccatgcatacaagcagaacaatgaagatccccagtggtgttatgagaacttcatcaatgccagagctctaaagtcagctgataatgtcagacaacagcttgttcgcatcatgaccagatttaacctcaagatgtgcagcacagacttcaatagtcgggagtactacgtcaatatcaggaaagccatgcttgcagggtacttcatgcaggttgctcacctggagcgaacaggacattacctgaccgtcaaagataaccaggttgtccatcttcacccctcgaactgtctagaccataagccggagtgggtcatctacaatgagtatgttttgaccaccagaaatttcatccgcacggtcatggatatccgtggtgattggctgattgatgtggctccacactattatgatcttagtaatttcccctcgtgcgaggcaaagcgcgtccttgagaggctgtacaacaagcgggagagggaaagagctgctaataggaactgaagttgatggcgttttccccttgcgctagccttccactcgagaagattcgggtatatcagcttgtcgtgccggcgccaacaatggatgcttcctcatcctatcgtatgatttggcttgatggatgctcgtcactacgtatgacatgccaaatgctgctctctagccgtacaatctaccagcaatggcctaggatcatatttttgtttcttttagaagttgtagcctgtgacgcaggatattatgtaccggtctcccatattttgatggttctggcacccttttatttcggcatatttgtttcgtgtttggttagtcttaaaagtgaaatgtgcatcattgctaccttagcccgactttctttcgatagtgtcacccccccggaaattttacttt

SEQ ID NO: 36700 - DNA, 330 bp, Oryza sativa
  Clone ID: PAT_MRT4530_404C.1
atgcggcgggagaagaagaagcagcagcagcagcagcagcacagcagcagggcggacgacgccagcaccccggtgctacgagggacggggatcggcggcagcggagggggagctccgcgaggatgccgcggaagcagcagcacgcagcaggggtgggggcgcggcgccgccggcagcgggacggagagatcggcgcaagcggcgcggggagcacgcgaggaggaggagagaaaagggagatggacaaggaaggccgggaagttgggcgaaatggcgatacacgggcttttctatagcccaaccaacccaaatagcgaacggaatgtataa

SEQ ID NO: 36701 - DNA, 450 bp, Oryza sativa
  Clone ID: PAT_MRT4530_40500C.1
gggtacttgatgcggttggagtccaccgccgtggaggcgctctaaactagtggatcccccgggctgcagaattcggcacgagccgctcctcataaccaaacggcagtctgctcacccattccctgctgctggggcatacttcataaaacttggcagatatagtggaagtcgttgccgggtttgtgatcgggccaactgaacccttccacctatgccattatttcccggttaaccggcaaccaaccccctttggccccccccaccaattttaattttcccccagttcaaacccccattttcccttaaagggaaacgggaaaaaatttttttaaaaaaaaaaccccccccccccgtgggtttgggggccataaaatttttcccgggaaaaacccatagggggggccccccccgcgatatataaaaaaattttttggggcccatataaatttt

SEQ ID NO: 36702 - DNA, 581 bp, Oryza sativa
  Clone ID: PAT_MRT4530_40501C.1
tgcgttcctatgcctaagccgagccccaatagtagtagagccgcaactacacaagtacctcacgtagggaaatcttcccaccttcatttatggggtagaaatcctttggtttaacgccaccttggccatgagataaccagagatgccccgtgagacttacacaccgtggctacggcatcaactaacaggcggcttcgcggtggcccttgtaacagatgagtggatgccttcagttcagacacgcctctgctggcccacgggaggaatgaggcctttttgcactcactaggctacattaaatggattctcgtagataatatacattcattctcatcatacattggcaaaagtacgtatggatgacgccatctatacgagttctgaaatctcatatgccgacgtgtcggttcatgtaaaatgttgtttctctgatcaacgttgcaagctattatagtgtgtttgacttactctgcagagctcgtttaatttcctgctgccatacaggagtatctcgtgtagtcatgtaaacccttggttacagtaaaaccgttgaacattcatttcataaaaaaaaaaaaaaa

SEQ ID NO: 36703 - DNA, 363 bp, Oryza sativa
  Clone ID: PAT_MRT4530_40502C.1
atggcttgtccagttgttgtcctcctgcccctacagctgtacactgggattgatatcctctaccttcgaactcaccgtgcgacgtacccgtcgacagcgaggcgctgtggtgacttcgtcaatctcaagatatgccggcccagtcttccggagggtggtgacttcgtcaatctcaagatatgccggcccagtcttccggagggtggtgacttcgtcaatctcaagatatgccggctcagtcttccagagggtggtgacttcgtcaatctcaagatatgctcaatatatgctggctcagtctacttcgtcaatctcaagatatgctcaatatatgccggctcagtcttccggaggtgctcatag

SEQ ID NO: 36704 - DNA, 2622 bp, Oryza sativa
  Clone ID: PAT_MRT4530_40503C.1
tcagtccattgtgatccggcctggccctcccttcagtgagcggtacagaggcctggatcgcttgaagccgaatatgtcagtgattcggtaagttttgggtgcatcagcttcggcaatagccttcttgaattctgccaaatgtttgccgccgaagacttgtacgcttaatgtcttccgttgaggtgcaccaattcttatgtactgatcaaaaaattcgatgaattcttctttcttgagctctcttaggagagatacctcagaccttcctctatcaaactggagagttcctgcctcaatctctgcccaatagaagtcggattcctcccacaaatttttggacttctccagtttcgaatcaataagtgattttacatacctcttaaaatccttgtctgacaattcatggattttgttttcaaacatcttgaagaattcatcaactctagcatcaagatatgaaggatcctttactgtggactgaataacaatctcgagtgccctgactcccctatcagatcttacataaagatctgctatatagccaagctgctcaatagttcgtagctggttggcggcaggctgcctcgcaattaaagcgaacagttgaagtttgatatttgaaagagcatcatccagatgaacctgaatatgttggactactgatgaattctcattcttctgatttaagccctcaatttggtggtagcactttaactcattttcaagggtgataacccttctaatcagatattgtgatggagacattgatttgaacacagacttaggggtattgaatatagtatcttcaatctcctggacaatagatgttgcctcatttggttcaatgttcccatgaatatagcattccaaaaatgtcttcgatagcaaatgtggtatgaactttgcaagagaatctggttcaagcttagaaagagcttcaagtttctcaacccaaggccatttttgatcctccaatatcaaggagagatagtttgaagcttgatagtacggttggctgaacttgaaattttggtagtccttgacagcagtttccttcaaggcacaaaatctgttcggtttaacttcaaagttagatatatgcttcataatggcatctagcagaatccgcattttgtcattgtaaccacctactgagacctggaatccagcagaagtgcgatatattgaatagaataaaccagcaatttgagcatcatacgcatatgcattcaagtaatctgccaacaaatcaacaaagagactcgtagaaatgactgcttcgggggaatggcttgttaacggacagtggaaatcaattacaatgtgaacctttggagtggagaacagcatgtcgggcatataccacaaccgtgaaagcggtgtctttctcaatattgctggaaatttaaccttttcatgcgcttctttgagtgaaaaatcttttggaatgaaaatgttaggctttgggatacagagcttctcagtaggagctttttgaatccattgctgtatcatggaaggagtgacattttcaacagaataagctgtacaataccatggctcaacagaatcagttgttccttcaaactttttagattcccagagtatccttactctttcagctgacaactcatcaagtatcatatttattctatttggagcatacttggacggcaatgatgctccaaccagccattcttctggtgggaatgaccgcatggttgttacaatatctgtcacatagctgattggatgaactttgtcctgataatggaattccgtttcatttatcgccacaagctcatcatagatccactcatggatcccattttcttttagtagaagaatatatttgaagaccaagccaatgatgtcttccatgtgttcttctttgtaaaagtggatgttaggtgtaacaggccatgatatgtttaggtaatcgccttcagatatcgggatagctttgataacaagctgcatatgctcttctgaaagaggttgacttgggcatttgaagcttctctgatcagtgtttttgatgtcactaaacatgtgctcaacaaagctttggatgcaatccaggctctcaatattgaatttatgataagggtgatcctttgaagccagatgtttttggagctgatacattctccagctatcagacaacaagtttttcttgtgttcagaatcaacagccttaatctctctaagaacagcatcttgcgacatcaatggcttaataaaaaactgtgcaaatctgtctaatgcttcttcaaaattggccgcattgacataaaaaaagaaagttgttgtctctgaatatgtataggcatcgcaatagccaccgtgctctatcatatacttcgagtaatcattttccccagggtatttctcactggcataaaatagcatgtgttcgagaaagtgggcgaggccctcgagcccctccgggtcgctgaacgagcccacgccgacctccatacacgccgccgccttgtcggtgtcggagtcgctgatgaggaggcactcgagcgcattggggagcaccacccggcggtactcccgcttgtcgctgcgcgagcggatgaactccacattgctcgccgccgccgccgccgacat

SEQ ID NO: 36705 - DNA, 313 bp, Oryza sativa
  Clone ID: PAT_MRT4530_40504C.1
cacagctcttctctccttcctctcctcgatctccctattcgtcgtagcctcctccctcgttcgctccgcccgcaaccatgtctccctactgcggcaagtacaaggacgagctcatcaagaacgctgcctacattggcactcctgcccagggtatccttgctgcccacgagtccactgccaccattggcaagcgcttcgccttttcttttgtctgagaacgttgaggagaaccgcctctccctccgcgagctcctctcctgtacccctggcgccctccagtacctcagcggagtgatcctctgccaggagaccc

SEQ ID NO: 36706 - DNA, 258 bp, Oryza sativa
  unsure (1)..(258): unsure at all n locations
  Clone ID: PAT_MRT4530_40505C.1
tttactgtactttgatatnctcctcgttntntcccttttttaagatatcctcaattttaccttactgcaaatcaaatgtattggacggnttctttgtgncacatctatcggcagacaaagatacatgattcctcttgtattagtcctttctttgatctttcccatatggctgactcggncaggccttaggggntctgacagctggggaggcagagatatatacagacccagttcaatagttcaaaaaaaaaaaaaaaa

SEQ ID NO: 36707 - DNA, 314 bp, Oryza sativa
  Clone ID: PAT_MRT4530_40506C.1
gtaacctatatatactactgatggggagcggaatcaccatcaactgtcatacttgtcgtattttattacactttacgccgaagctagttctcatttacattactctgacgactcgctttacgactcattggataatgctgggtcgtgtgggcgcagacatctaggagtgaaggcaccgtgctcttcttccccgtaggactagaggctgaggccttgctcccttgagatgcgatctgcattagcgactacatcaactggcaaggtacgtaatactgagtttttccgtgcaaggtggctgaccactgcattagcgt

SEQ ID NO: 36708 - DNA, 314 bp, Oryza sativa
  Clone ID: PAT_MRT4530_40507C.1
gccctctatctagggtttctcgactcgccctcgacgattcgttctgtcatgtctaagcatggagggaaggccatgcccctcatggggcccaatgccgagaagaatgagtacgacgagagtgatctcgggtatctgccgaagaagaaagatgaggaaaaggcactgaccgagcttaaggccacggcaggacagaaaggtgcactgtgaggctttggtctgaagtagagccggaagacatgatgctgatacccaatcagaatgccctgacaatgataaaccagctacctgcctgaggtactttactatgtgcggat

SEQ ID NO: 36709 - DNA, 786 bp, Oryza sativa
  Clone ID: PAT_MRT4530_40508C.1
cgggccccccctcgagttttttttttttttttttttttttttgttttttttttaagccgtgtagtaggcccgaggttttggtcgtttttttttttttttttccttaataaatccccaggttcttttttcttcctctatataatataatagggtacgatccggatccttcattctcatacaacaccgcagatgcagatgcagcagattcacagtacaccaccataacattcatattctaatacttagtatgtagaggagttcctaacatagcactgacatatacctcagcatccagcaacatcatttctcaaacaactctcttcctcttacacctacagcaagttagcgcatcgcgttgcattgcatgctaccaagcgcactcacggggattcggggaattccgtcagtcagagatagatatataggtggtgctccttccttccagcaataatacacattactcgcgaatagagttgatgtcgatgtttggagttcttgagtccatctgcctcatcaacccagccgaccatccacccatcgtatgatgcggcatgttgtgatctggcagcgccattgtgggggtctcctcctcaccgccaattggctcttcgttattctccgtctcttgctcagctttcgctttatttttctttgtcccaccatacatgaagctccccactatcacctgaacagttccagctgctgtcaggactcacacctacactccccaccaatcaccctgtgggccgggccacacagagctatgcagaggcctccactccgggt

SEQ ID NO: 36710 - DNA, 279 bp, Oryza sativa
  unsure (1)..(279): unsure at all n locations
  Clone ID: PAT_MRT4530_40509C.1
ctacacccacctccgcttcccctccgccgcgccggccatggccgccgcntccncgcctntcctcctcctcctcccggccgtntccccagccgccccgacccacccgtgcctcctcttctnctgccccccctaccgctcgcggnctcgcnaccgggcacgcttcgcggcctctnggtcgtngtccgatggcgagggcnacggcggcatcgtaacggggccagcggggggagggggaggcgtcttcctcttgccgcgcgcgctgtcgnagcggacgaagct

SEQ ID NO: 36711 - DNA, 594 bp, Oryza sativa
  Clone ID: PAT_MRT4530_4050C.1
atgtggaacctctcggtccacggtggaccgggagcacgcggctggcggcggtcggcgccgtgggtcccgcgcgtcagccgcacccgcgggcgcgggcggctgacggccgggcccacctggcagccgcgagggcgcgccgaaggcggcctcgccggcacggccgacgggaggaggacgcgcacccgcgccccgatggtcgccgccggcgaccaacggcgcggcggagtggcacccgagagagaggagggaagggggaagcgaacggaacggtcttcggctcaccccggtcgacggcgacgacgggaacggcggccgaagcggaagaagacggcggcgcggctcgggatgacgagggcgacggtgctccggcgatgttcgggcgaggaggaggcgcggacggagtcggcggcaacacggcgaagcggacggaggtgtcgccgagtaaggaggaagtccggagcggcggcggcggcggaacggagctcggcggcgacggcggagagagaggagcacggcgcgagcacgaatccgacggcgagagcgagcggcgagcggcggaaacggaagagcgaagcacggggatcgaataaatag

SEQ ID NO: 36712 - DNA, 317 bp, Oryza sativa
  Clone ID: PAT_MRT4530_40510C.1
ttaattttgttttaaaaaattatatcaattcatattggaagtttttaaatcaatatttagattaatcacgtattaataggtaacattgttttcaggcggctcccgaactcagccgaaaggatcagcagatgaagcatgtggggcatgagctcccgtacttaaacccaacaaacaaaccgaggataggaggagatgcaaatcaaaatctcaaagccagcgaggcgcattgctgtcagtgtgagtgacactagctcttggtggtggagacagcgcacgagaggaggggagtctgcctgtgagacagcgagttgacttgg

SEQ ID NO: 36713 - DNA, 461 bp, Oryza sativa
  Clone ID: PAT_MRT4530_40511C.1
aaagaataccattcaaattccaaaccaggccgaagtaaatgtatgtagtactacgtcaaaacatggcggctgtatactgaagacaatttggaaactggctcgtctttgagcagaaacatgttgctacatggttactgtgctcgattacagccaagatcgacatgaaaccacaagagtaacaagtgtgccgaccacaacctttttaggatgacaatgatcgccagttaagctgcacctaccactaacccgtggcaaatgttcaaaggacattgcaaactgggagtactgatctgctaacagagacactatctgaggcttgcttatcgtcaacctgaaggatgacacgccatcagctgaaaatagatctcgcaaagtgttctcttgccgttgctagggcactgctttaacttctgctcagtgagagacccggatccttccccacttgctgacccggatacctt

SEQ ID NO: 36714 - DNA, 267 bp, Oryza sativa
  Clone ID: PAT_MRT4530_40512C.1
atggctgctgctgaggcggcggcggcggtggggaagcagcagcagaagggcggcgggggaaggggaggaggcggcggtgggccggcgccgttcctgacgaagacgaaccagatggtggaggagagcgcgacggacgaggtgatctcgtggggaaaggaggggcggtcgttcgtggtgtggaagccggtggagttcgcccgcgacctcctcccgctccacttcaagcactgcaacttctcctccttcgtccgccagctcaacacctac

SEQ ID NO: 36715 - DNA, 1669 bp, Oryza sativa
  Clone ID: PAT_MRT4530_40513C.1
cgcgcccgcgtcagcgagatggcggcatgagcggccgggaacaggattgaaaacccactcttccgcttctcctcccaatctcgccgcccaagaaaaacactgaaccttcgccttcctctctcgtccgatcgacctttgcatggcagcagtagctagctccaaggggcgggtgatcgctggaagcttcgtcgcccgcgtcctggccggcaaggccgcctccccgaggagatttgtgagcgcttcagcctacgacaagaacgtggaagagcaggtgcgcccggcggtggtgccggacgatgtgatcggcagcgtcgggagccctgacaagtactggggccctcacccgaccaccggcgtgttcgggccagcggcggtggacgccaaggcggcggcggccgttggcgcggcgaaggccggcgcgaatggtggcgcctccgtgctcgaccagaaggtttggttccgccccctcgaggacgttgagaagcctcccgtcgcctgatcgacaggcctaatacgagccttggctctgtgccacctaccattctcttcagctggggctccttgattattattactgtactagtagtgtggttctgctaatatagtatcagcagatcgacatggcgtgcatcggtagttacagtgaggcgatgctgatgcctaaaataagaacaagcaaaagacgtgtgctcatgttgcttgtggctgtaatgtacttctgtcctaatccgtactataagtatttggttaccggtgaaaaaaataaaaaaataataatggaccttacccttatttcaagggcccatcaacttgtgatggaaggcttcaattggtgccaggacaagaacgttgtcacggtgttcagcgccccaaactactgttaccgctgtggtaacatggcagcaattctagaaatcggggagaacatggatcagaacttcctacagttcgatccagccccacgacaaatagagccggacacaacgcgcaagacccccgactactttttgtaatcgtggcgttgatctttttttttttaactcccgctgttgatgttcctctctgctgcgtctggttttatgtagatcttcgtccttagaaaatgggttccctcctcgagccaagctgtaccccccattctttgtttggaaattttgttgcagctcctcaacttccatagaacatgttaaaacgtacatggcgttgttttttcctttttccttttttatgtacctcccattttgtattattctgagacaggagagatgggaagctgcaatagagttgtctcgtgacataaatattaggtctccaaaaaaccaaagtcgacgcgcccgcgattcgcggccgcgtcgacgagatggcgtgcatcggtagttacagtgaggcgatgctgatgcctaaaataagaacaagcaaaagacgtgtgctcatgttgcttgtggctgtaatgtactagtagtgtgggtctgctaatatagtatcagcagatcgacatggcgtgcatcggtagttacagtgaggcgatgctgatgcctaaaataagaacaagcaaaagacgtgtgctcatgttgcttgtggctgtaatgtacttctgtcctaatccgtgctataagtatgtgggtaccggtaaaaaaaaaaaaaaaaaaaaaaagtcggcggggccgtg

SEQ ID NO: 36716 - DNA, 892 bp, Oryza sativa
  Clone ID: PAT_MRT4530_40514C.1
gcgcagaccacacacgatctcactacaatagtgctagctacgaccccacgcgactgggacgatgagccaggagcagccgaggaggccgtcggagaaggcggccggcggcggcggcggcgagcaggggatccggtatggcgacgtgttcccggtgaccggaagcctcgcggccaagcccatcgccccgcgggacgcggcgacgatgcagtcggcggagaacctcgtgctggggaagacggtcaagggcggccccgccgccgccatggagtccgcggcgagtcgtaacgaggagatgggcgtcgtcgggcatgaccaggccacggacgccgccgccgagcagggcgtcaacgtctccgacaccctcgtccccggcggcggccgcatcgtcaccgagttcgtcgccggccaggcggtgggtcactacgtggagcaggacgatggcgccgccgtggttgcaggagtcgtcggcgccgcccccggcgcggtacgggtggaggaacctgcgaagataacaatcggcgaggcgctggaggcggcggcgctggcggcaggagggacgccggtggaacgcagcgacgcggcggccattcaggcggccgaagcaaaagccaccggcacggacacctacatgcccggcggcttggcggcgcaggcgcagtccgccgccgtggccaacctctggacggcgcgcgacgccgacaagaccaagctcggcgacgtcctctcgaacgcgacggcgaagctcgcggcggacaaggaggtggagagcggcgacgcggcgagggtggccggagcggagatgcgcaacaagcccggcgcggcggcgaggccgggcggcgtggccgcgtccatggccgcggccgcgcgcctcaaccgcggcccaacgacatga

SEQ ID NO: 36717 - DNA, 447 bp, Oryza sativa
  Clone ID: PAT_MRT4530_40515C.1
aagaaggggggaagatttcccaaaaacggacatatatacccccggggatgaattagtataggaaaggaattcaaagctcgccggccggagagggccaattgtcgagcatgtcgaggcactccttggggcgggaccccggggcgggggggccaccccccttgacgggggccaaggggaggttggggtccaaaaccgggggaaaaccggcaacctggcggggggaggaccacggactccaggcgggcaccacgttggagcccaacgtccggaaccactggtgggggccaacaaacgccatgtccagggcgggggccccggtgtacaccaaccccctgtaaccccccttcgtgagctctcattggtaagggatgggccttaccaacttctgccggaagagcggaaaccccaggcaatggatccaggaggaaagggagcccttcggggttc

SEQ ID NO: 36718 - DNA, 449 bp, Oryza sativa
  Clone ID: PAT_MRT4530_40516C.1
acacatagttgcctgaatgagaaaatgcagagttagcattatcacaccagacaatagaagtggtgggcaagtggactactgcaagaacgtagagtgtgctgtctgacacgctgacggtggcaaagccaacgccaatagacatagccattggagagaagaaacttgccatcgttatcaatgtaatccatttccgaggcgctgaaccctggcatgagaactttcttctgggtactgctgatgcacattatccagaggttggctgtgacaagcatccatagacatgactgaccattttggtgggctgcgaggttgtctgggaacttccatgagcgcagtctttcacaaccattcactcattacctccatctgaagcatgtaagaatgtgcacagttagaacatcacttgggatctgggaacggaggaagtcttgtatccttatactactaga

SEQ ID NO: 36719 - DNA, 341 bp, Oryza sativa
  Clone ID: PAT_MRT4530_40517C.1
ggatggcccggcctgaagcccctttgaaaaaagggaaattttatcgataaaaaaaaaaggggtcttttatataaggtttgggggggggaccccggtttttcctgttttttggataaaaacactaggggtgggaaaaaggaaattttccggggggggacacgtactcaaaccaaaccggttgtttcaggcgccctttccaaatttttaaaattttttgtcgatgtttccccactggaaaccatggggggggggtttaaacatcccgtcctgttgacccttttaagggggccatggaaaaattttaacattccccttgttcctgaacaaacgccttaaccggg

SEQ ID NO: 36720 - DNA, 381 bp, Oryza sativa
  Clone ID: PAT_MRT4530_40518C.1
atgaaggatggggaggttggtggcagcgaattggcacctcacctgccgctgctgccggatccgctcgaggttggtggcctcctactacacctctcctcgttgttgtcatcgcccggcgacatctcccatgtcgccggtcatcggattgtagctgctgctagcaggatctggttgctgctagctcccttgctcaaggaggccacagtgacgacgggagaaaaagttgtggtggcgatgattgaggaggtcgcaacgtcagagaggaaaccacggcggcggctatctcttcttcattcgcggcctcaatgcctcatcgcatcgaggatcacgtggtggctatggcttgatttgctttccctgctgatggatctactcgcctga

SEQ ID NO: 36721 - DNA, 1533 bp, Oryza sativa
  Clone ID: PAT_MRT4530_40519C.1
atggagacatttttgtccgtgattctgagtgatcttgccagtagatccatatctttgctgatcaacaagtgctcaaagccaacattaccatccgtggaggagagactgcaacgactgctgctccgggttcgtatcattgtggaggaggcagagggacggcttatcacaaaccaagccatgctgcagcaactgaacatgctaaggaaggagatgtacagagggtattacaccctcggcaacttcatatgccatggccatgaagaagacaatgccaaagatcatgaggtgagtaactattttaaaccatccaagttaaatcctgccaagcgcatccgatacttgtgggatggtggccagaccttgcaagatcagctgcagcaagttcttggcagactacaagtcaccctcgaagatatgcgcgagtttgtcatattcttgaacttttgtcctcgtttgtgccggcagccatatagcatgcacttgcttatagacaagtgtttgttcggtcgccaaatggagatggagcacatcatgaacttcctgctcaaagaggatactcccggtgctgaaaatccaggtgtcctaccgatcattggccccgggaaagttgggaagaccaccctgattgcgcatgcttgtgatgatgaaagggtccgtaatcacttctctcaaattgtgtgtttcagtgaggatgatcttgaagatgcaagcatggagactcttagagattctggtgtaatcaagcatcaaaacaatgccactggtggcaaaatgatattaatcatcatcgaactaaccagagacatcgatgagggtgtgtggagaaggttgtactcagtttgcaaatgttgtgttgcaaatggcagtaaaattatagtctcaagccgatctaataagattgcgtgctttggaacgacacaagctcttcgagtaaagttctttactcaagaagcttactggtacttcttcaaactgcgcgcgtttggaagcatggatgcagaggagcacccaaagctggaatcaatagcgatggagatagcaagggaatggaatgggtgcttcatgtcttcaggcatctacaatgaacttctaaaagcaaatttcaacactcggttttggagcacggttctaacaagaatcagagaattcaggaagttgaatatctcactctatgcaaattttgatggtccttgggaggtggttgaatcggcatatgttaggagggtaaacggaatttcctctgaatatattctgattcttcatgattatcagacatgttctgttccaaacatgctccatcgttgtacaaactctgctcagagtgaagttgaagttccccagttgagtttcgaagattttcaatttggaaatgttaggcctcaaggaaaattcaaggttctcggctggagatctcaccttccaccttaccacgactacatgttcagctgtgaggtactgaagtcgcagcatatagttgcaagaaataagcgacctcgggaactttgcggacgcgacttcggattgggtgcctga

SEQ ID NO: 36722 - DNA, 619 bp, Oryza sativa
  unsure (1)..(619): unsure at all n locations
  Clone ID: PAT_MRT4530_4051C.1
ccacccccttcgtgaaatagagccgtttttcctgctacagagtccttcaccctgcgtagtctttgcgaccatgactgcatattgcatatcctaccatcatatgcactgcctctctcgcgctctatgctctatgtttctggtcgtctcatatgcctcaccacctccacaacgtggtaaagattgaggctcaccgtaacaccactagcaacctaatctattacccaacgcccgaactcccatccnactgttcctattccgccacttcggttataaccaggttaccttttcagctgccaatctcctcatcgtcnttaccgtcatgtacccttctcgtgttaagnatagcttaatgctctccccacacatttaactctctctctcattctcgtagcctcctacttacaatcgcatatcatacaaacactaccaaacacactcacctcctatctcccccccccgccatctgcccattctcacacattcccacccctgtctctctgcccgcccctctctcgggtttactacgcgcacatctcccccctcccatagccgagccggtcttggctctgcttcgctaagcaccatgcgctgatttgcacactgctagtccatgcagaga

SEQ ID NO: 36723 - DNA, 216 bp, Oryza sativa
  Clone ID: PAT_MRT4530_40520C.1
ttagccccttgccgccctctgtatgggcggcaagggtctaatcgcaattttggccgacggcggcagacggcgcggtcgacccaccgtctgccatgttagcttgccgccccaatggtgggcggcagggtctatttttgcaattttgttcgccgatagattatttgcgttgcaagcgtcgacgccgatgccatccgccgtcacggtctgcacaagcat

SEQ ID NO: 36724 - DNA, 621 bp, Oryza sativa
  Clone ID: PAT_MRT4530_40521C.1
atgggtccatgtgtcatagtctctctcccctctaacttacttattccccttacacctctctgtatctctctcgggtcggaggctgtgaaggagccccgcgcactagcagaggccgagaatgagccgcgcgccggcggctgcaagcctgcgcagcgggggccggcctgtcaagctcactggtcgtgcctcgtcctcccgtgctcgtggaagcggcagctggcgctggactggcgtgaggaagatggaaagcggcagccccaatcggacttccacggcaggatcgccacgctgcccatccggaagagacagttggcgacttcgatggagagcaggccggcgctgcagcctgcagcccatcctgtcctggctgcagttgacgacgagtacgccaatgtccttggcgctcacgcctgtctggtgcagaagacggcgccgaacatgatggcctcggcctcgatcgagccacacctctgccatgcaagggttcgatggctcgatgagcacggcgatgaagctatgctgaggagggcgcgtctcaacactgcaacaacaagtgaaggtggaccacgggcggcagcactgcagtccgaggtggcaacgaaatggcaacccgaagcttga

SEQ ID NO: 36725 - DNA, 1557 bp, Oryza sativa
  Clone ID: PAT_MRT4530_40522C.1
atggttaaggcctacattgccatcttctccatcgccgttctcttgttgattcacttcctcttccgccgccgcggcaggagcaatggcatgccgctgcctccgagccctccagccatcccgttcttcggccacctccacctcatcgacaagccgttccacgccgcgctgtcccgcctcgccgagcgccacggcccggtcttctcgctgcgcctcggctcgcgcaacgccgtcgtggtgtcgtcgccggagtgcgccagggagtgcttcacggacaacgacgtgtgcttcgccaaccgccccaggttcccgtcgcagatgctcgcgaccttcaatggcacctctctaggcagtgccaactacggcccgcactggcgcaacctccgccgcatcgccaccgtgcacctcctctcctcgcaccgcgtcagcggcatgtctggcatcatctccggccaggcgcgccacatggtgcggaggatgtaccgcgccgccaccgcctccgccgccggcgtcgcgcgcgtccagctgaatcggaggctgttcgagctctcgctcagcgtcctcatggaagccatagcccagagcaagacgacacgtcgtgaggcgccggatgcggacacggacatgtccatggaggcccaggagttgaggcatgtcctcgacgagctcaacccgcttatcggcgcggccaacctgtgggattacttgccggcgctccggtggttcgacgtgttcggcgtgaagcgcaagatcgtggcggcggtgaacaggaggaacgcgttcatgcgccggctgatcgacgcggagcggcaaaggatggacaacaacgatgtcgacggcggcgatgatggcgagaagaagagcatgatttccgtgctgcttactctgcaaaagactcagccagaggtctacacggatactctgatcatgactctctgtgcgccattgtttggtgccggaacagagactacatcaaccacaatagagtgggcgatgtcacttctactgaaccatccagagattctaaagaaagcacaagcagaaatagacatgtccgtcggaaactctcgcctaatcagtgtcgtcgacgtgcatcgtctgggctatctccagtgcatcatcaacgagacgcttcgcatgtaccctgcagcgccacttctgctacctcatgaatcatctgcggattgcaaagtcggtggctaccacatcccaagcggagcgatgttgcttgtcaacgtggctgccatccaaagagacccagtgatttggaaagagccaagtgagttcaagccagagaggttcgagaatggcaggttcgagggattgttcatgataccgtttgggatggggagacggaggtgtcccggggagatgctggcattgcagacaattgggttagttttggggactatgatccagtgctttgattggggcagagttgatgatgctatggttgatatgacacagagcaatggactgactagcctcaaggtcattccgttggaggccatgtgcaaaccacgagaagctatgtgcgatgttcttcggaaattcatgtga

SEQ ID NO: 36726 - DNA, 519 bp, Oryza sativa
  Clone ID: PAT_MRT4530_40523C.1
caacggagcagctcggcgacacattctaggcatcgtcaatggcgcccatcactgcacagcatcgccgaagtcagaagctgacacgatcgtcagtggccggccagttgaactgatctgtgtttttagagttcatgctcatcatttcatcagaagtgcattttcagctgatgcgatgttcagtttggttgtgttgggttcagcatctctcaacagagaagaagatgatcagtagctctgaatgcatcatattcagagtttcagttagtaggtaccaagtcactgtaagaaatcaccaatcttactcaggccattttactgaggtcaagattgtttctggcttgggaagtaagttggtaccttaatttgcattgcatcttagagttggcacatacagaggggtatttattaatcaaaagcagggtgatgtactattatatattcagtttaagatgcaaagtacatcctttgcagatagcttttttaaaaaaaaaaaaaaaagggccggccgttttaaaggat

SEQ ID NO: 36727 - DNA, 450 bp, Oryza sativa
  Clone ID: PAT_MRT4530_40524C.1
atgtccttcctggtcgtcgtgtacgtcgcgacgtcggccggctcgctgttctgcaggctgatgtcgtcgatcgcctccccggaggccgccgccgcccgtcggcgatccggcggcctgaacgacgccgtcacctgcgcggtcttcgcggtgctcacggcggcgtcgcaggccttcatcgcgtgcttcgtggaggaggccgtcgggcccgcgccgccggcgacgacgacgagggaggagaggtgcgccgcgtgggcggtcggcgtcttgaccggcgtcgtcacctcgctgtgcatctccagctacttcttcacctacatcgccgccggtggagtggcgccgacgtcgctgcagtggacgatcgccgccgtcttctccgacgccaacttcgtcttcgtcacgcccaccatcatgcgtttcattggcaggttcaacagtgccagggatgactag

SEQ ID NO: 36728 - DNA, 1171 bp, Oryza sativa
  Clone ID: PAT_MRT4530_40525C.1
cacaagcttcttccctccttccttcgtcttcccccttctccacttcccccattccattccattccattcctttcctttctctctcctccccctcgcgccattaaggctccagagctttctccctcttcacttgggggggactggaagaagaggaggagctcggctcgaggccccaagaatcgagttcgtcggaggcggcggatgccggagaggtccgagctggggcggcagctcccgctgagagggcccctcaaggcactggaggccgacatccaccatgccaacaccatggctaatgctatccagaggaactatggtggagcatgtgtgcagatgaggttgtcgtgcagctcactggcgccattctttctttacctcatccagtggctggattgtggctgctgttatgctctttccagttatctaggcctttttcacattctcatttgcaagggttatgcagatggagatagctcagtatcaacgtatgaaaggcgtgcaagccttagagaattctatgccttaaacaatctctgccttccagcgatcatctaccctatccttcaacagcttgagggtagtttgattgagagggacctgaaagggaaagggcgatgtaaagacatagtgagtaggaagcggctcgaagattggaggaagctttgtaacaaggatgtggaaagggaggatgaatgtgggatttgcatggagacatgcaccaagatggttctgcctaattgcagtcatgcaatgtgcataaaatgctacagggactggtatagaagatcagagtcttgccctttctgccgaggaagccttaaacgaattcgctcaagagacctgtgggtgctcacaaattacaatgatgtggttgatcctgtaactctagaaagagaaaatgtgaagttcattgtattgctcatggtctctttgttatgaatacttccagataatattttcttcttctactatgattacctactctaatctggaaacaccacaagttgtgtgtgtgaaattatgaaaccggagaaacccatttgtagatttttctttgttagagcttagaaggatggtctttccacctctgacaaaacaccttttactttagtgtagctgcataacacttctaaagcacctgtaaataaaatctgcaggtgaagttcattgt

SEQ ID NO: 36729 - DNA, 559 bp, Oryza sativa
  Clone ID: PAT_MRT4530_40526C.1
gatggcggtgagcacttaaagagcttgagaagttgggtcgttaaaaagctagtgaccagtcagtcagtgaaggaagaggtgctaaaacctggtgatcgtgtcttgaaagataaatagggatctcgttcatatccttgtgcaattctaatacatgacatctgctattattgaggaaaccaaattcaaatatatcagttttgtttattttatctgaaatttctgcaaattgttcatttactaaatgtacatattggatcttatgttttgtggacttagagaaatatttgtatgcttgtttctgtccataagcattagggtcctgaaatgtactttcttctataagacttcctggctccttttttgttcaggtatttaaagggaaacaaacttactgtgagacattcccctggagcttgggaacatgtctaaatttagctacctgtaagtgatatttctcttgtgtagaagatgtttttggaactccagttgatgtggagcactatacgaggttttggaaacttttatccatgcaggcaaattaatgacatgaattagtggg

SEQ ID NO: 36730 - DNA, 569 bp, Oryza sativa
  unsure (1)..(569): unsure at all n locations
  Clone ID: PAT_MRT4530_40527C.1
acccgggatctgttaattctggctttttctcccatggtgacacagcattatttttccccttaatggattccttgttgggtcaagacccataccttgtatttgccgatttccaagcctatgtggattgtcaaaaccaagtgggagaagcctataaagatcaggaaaactgggctcgcatggccatcttaaatgtggctcgcatgggtaagttttcctcggatcgcactattcgggaatacgccgaagacatctgggctatcaaacccgtggtaattgaattagaagacctctgtcccgatggtcaatgtttgttaatttctcctaataaatagttaccttaacctgcctctattgcactgtaaaaacccagtcctgagcatcagttacattttgttaagacactgttactggcccttcaatcttcgtttaccgtccagataaagacaactttcgtcaccttttatcactggattgtgattattccagtatcaccatggtncaactcgtaataagatggttgagaccgcgtttttactagtaggattgagtgtttactgatacttttttag

SEQ ID NO: 36731 - DNA, 450 bp, Oryza sativa
  Clone ID: PAT_MRT4530_40528C.1
agaagggcgttatgaacactaaacctccaggtgcaacccaaacacaaaagtgagcctaaaaggactgacgtaaggcacatagggctaatattgtacgggggaaagcatcctgtgatgtggcggctgaaaaagcttaatgagcactaaatgagctagatttctgacttgccctggtggaacgcaccccttgaacgagggtcttttgttgttggtggcagccttggcctccttggacaggccgggccctttttccccaggttcttgaagaaccccacagccaccgtttgcttcatgtaccgcaaggaaaaacgcaccgaataagggggcactgaaagaaggtcctcacaaccatggacttggcgggaaatatcttaacaataccactctcaccgtacttgatgaacttggggtcattactgaattccttaccagatcgcgtgcggatcttgg

SEQ ID NO: 36732 - DNA, 426 bp, Oryza sativa
  Clone ID: PAT_MRT4530_40529C.1
tctttactgtgtcaccgacctcctccccttcggggggaaggtttacgtgttggggggcaacaacctccacatgaacatgcacatcattatcaacatggaccaggtcgcgatccatgtcaccaacccctgctgcgagctctataccatctaccatacgatccacgctgagggccagatgatccccaacatcatcgacgagctagaccatcatcatcttatctacatcctcatcatgactggcattaactagcatgtgcctcgggttgacaaggggaaggggctctacttcctgatcgataaggcggagactaatacctaccgagggctgtctgacagtgccgagctgaccagctactacaagagcgaccacttcaagaaccggccgggcgactagaaccacaactacacgagccctactgtgggcat

SEQ ID NO: 36733 - DNA, 498 bp, Oryza sativa
  Clone ID: PAT_MRT4530_4052C.1
gtgtcacaaaacacgatgcaattaaaggtagaattgaaatatcgggtaggcaaatataccaatcgaaccagaaaatttctttcttgtccaataaggactagtatctacccatgggtataaatatgtacactaggggtcattataaactatcttccgatcaataaaattactctcgatgcatcgccaccctctttcccgaggtttttacttacacgactgaacttggcacctgatgcggggttacatcggctttcgatctccggcgaaggggcaagtcctacgttccgccagccgtagcaattgtatcggctacattggtgttgttcaaggttgcatcgcttcgacctcttggatcattctggttcggttgatatttttgcctacctatttatcatatatcttagttgatctagtttagcatcttaatttaatcatatcggctaagattcgttttagagtttatgctggtatcagctaaattatcttgctagattagat

SEQ ID NO: 36734 - DNA, 245 bp, Oryza sativa
  unsure (1)..(245): unsure at all n locations
  Clone ID: PAT_MRT4530_40530C.1
aactccgtcacctcacgcccacgcgtgtgtgtctgtnatagggtagagtgtanaaagtatgtgtatagtgaggttagtgtatcgtgggtccaagtgtctagaagtagtggggtttaaggtgtctcgagcgtagtattttagtctatgtcggcggtcgggcggggtaaaagaatctaaagagtagtagttanctgtaggtagtctgggtttggggttgtccccaccaaaaaaaaaaaaaaaaaaaa

SEQ ID NO: 36735 - DNA, 661 bp, Oryza sativa
  Clone ID: PAT_MRT4530_40531C.1
ctagtgctcgaagagaccccttcctcccgtgtcgctctcgcacgggtggctcggggggcaaaaccctagccgcccgcgccgctgcaaccccgccctctcgtcgacctcagcgtcggaggcggagatggcggggcggcgtgggaaggtggcggatccagtgcctctgaggttggatctagcgcccagatctggccaatgcggcaacaacaacccaggcatggcggcagcgcgacggcacgatggcgacggcgtggcggcctggggatggtgtggtggaggcgcagccaaggactccccggcagtggagcggcctccccggtggagctcaggccatcggcacgacgtcgtccagtcgcgggttctcctttggccaaaattggtgagggggctggcaggtggcgggacagaagaggcctgggccagcttccaggggtggcggcagggtgtagcagcatgtgtgaaagtcggtcggcggaggggtgccagtgcggtggggtggagacctcgtgctgccattgccggtgcggtggtttctgagctaatgggcaacaagcttcaaagcaaggttgtaggggctccaggcgaaagcctcgcatggtggttcatcgggccggcaacggcaacgcctttggcgtcgcaaccccccttggggcgctgttga

SEQ ID NO: 36736 - DNA, 426 bp, Oryza sativa
  Clone ID: PAT_MRT4530_40532C.1
atggagttgacatcaacgatgacatcatcaccgaaggtggctcaggaccctatgattgccagcgatctagggcatggcgacgctaaccgagggcaccagaacgaggggagctcactgaggggcggcaagacgaaggacggtgacggaaaacggccggcgtcgaggttggagtggcgacggggtactgatcgacggtggcggtggcgtttcggcaacgggagacgacaaccgaggggtggacggccttcacctcgcagctgcaaacccaaaggaggcggtgacgaaacttggcgacaatgggaggtgcagcagggcctcgctggagatcaaaacacgacgacgaacttcgggttgacggcgacgatggtgccctggtggatttacgtggcgatgaaggggcggacggggtgcagctccttcttgtga

SEQ ID NO: 36737 - DNA, 1178 bp, Oryza sativa
  Clone ID: PAT_MRT4530_40533C.1
atgcgtggccgatcgtcaccgggcctatgacaacactacaaaagacgagactctgaaaacgatgccccaaaggaggtcacgacatcaaggatgctgccatcgccatcgcccatctaaaagatgtggttttcacccagagaaactccccaaggaggagaggaatcctcaacagcgccccaaggggggttgcgacgccaaaggcgttgccgttgccggcccgatgaaccaccatgcgaggctttcgcctggagcccctacaaccttgctttgaagctgccgccacccctggaagctggcccaggcctcttctgtcccgccacctgccagccccctcaccaattttggccaaaggagaacccgcgactggacgacgtcgtgccgatggcctgagctatccccgttaaccggctgccgcctcaatctaacttagaaactccccgcaaagaaggggaggagctccaggaagggtgagggtgcccatcagcaatgaggaaaacaacccaccgccgccagctccttttgcactgccaccactcccttgcacctttgcactgccaccacatcgccagtggcgtcagcgccggcgccaccaccacagcagccgccgcctcgggtcgccacgccaccgcaacagccttgccgccgagccctcctcagccacacctccaccggggaggccgctccactgccggggagtccttggctgcgcctccaccacaccatccccaggccgccacgccgtcgccatcgtgccgtcgcgctgccgccatgcctgggttgttgttgccgcattggccagatctgggcgctagatccaacctcagaggcactggatccgccaccttcccacgccgccccgccatctccgcctccgacgctggtgggtctccaagcttgattggcctcgccgctggcgagcttcggcggcggcgaggtgaaggagagggcggggttgcagcggcgcgggcggctagggttttgccccccgagccacccgtgcgagagcgacacgggaggaaggggtctcttcgcgatccacaccttcttgtgcatcttcccgcggatgtggcacagccgcttcgtcccgtcgatgcactgcgcctcgcaccgcccgttgcccagcatccgcgccacctgcgcgtactcctgcccgtcctccttgaacaccagctcccgct

SEQ ID NO: 36738 - DNA, 224 bp, Oryza sativa
  unsure (1)..(224): unsure at all n locations
  Clone ID: PAT_MRT4530_40534C.1
aattcgatcatccctgggaggcggcctacaaattacattaaatctcnatccaaaaaancaaanattatnacacacanaaattaattaagctagaaatctcctcgatcggtcacacacacacacacaattaangtacatacatacatacactgctgcaactgcaactgcagggtccgtgctttgctactacaaatgtacacatcgtaccttggtttgcaccatct

SEQ ID NO: 36739 - DNA, 2346 bp, Oryza sativa
  Clone ID: PAT_MRT4530_40535C.1
atggagaggttttataaacctaaacggaaagctcaagatatgatcgatggtaacggaacttcatgtccggaagagatcaattgggatgaggagattaaatatgatcccggattgaggaaagaaattgatgcttaccatcctaaccacagagaaaaggtgagaagaaaatacttggagaatggaccttgtcagcctcgcacatttgattttcctattacacaacttggggggaaagagaaacctagaagatttaatccagaatggtttgatgagttctcttggcttgaatacagtaaggaaaaggatagagcatattgcttttattgtttcttgtttagagaaaagaaagatccaggatatgatgcatttgttgtcaacggttggaatgggtatcataggaaagaaaggctaagatcacatgttggtgaggttggtggtttacactataatgcaatgaagaaatgtgatgctttgagaaatagaaagcaacacatagatgttgcttataatcagataagtgaagttgctaagaaggcctattttattcggttgaatggttccattgatacagctagagtattgttgaagcaaggattgccttttcgtggccatgatgagtcaaaagaatcctacaatagagggaattttaaggagttctatgattgcttagcagaacatgatccaattttacacaaagccgtgactacaaatgctgcaaagaatagttgtttgtatgctcctgaaattcagagggacattgctgaatgttttgcaaatgagattgtacagtctatcctggatgatcttggggatgatttcttttgcttgctagttgatgagtcaagagatgtttcttgcaaagaacaaatggctgtggtcttgaggtatgttgacaaatttgggatggtgaaagagagcttcgttggccttgtccatgtgactgaaacaagttctgcccacctcaagtcagccattgattctcttcttgcaaagtttaaactaagtttaaagcaatgtcgaggccaaggatatgatggtgctagcaacatgcgaggtgagttcaatgggttgcagtcattgatcatgagagatagcaaatcagcttattatgtgcattgctttgctcatcaacttcaattagttattgtggcaaccgtgagaaaacataagggcgttagcaattttttaaatatgatttctatcttattaaatgtggtgggtgggtcagctaagagaagggacatgattagagatatcaatcatgaacaagtgcagcaagcattaggttgtgggcaacttgagaccgggacagggttaaatcaagagcaatgtcttcaaagacctggagatactagatggagttctcattataaaactctgaaaagtttgcttaatatgttccctacaatagttcaagtgctcaaggttgttgagaaggatgacagagattggaaaaatagagatcaagcatcaaatcttttggtatacttccaatcttttgactttgtattttatttgcacctcatgttgactacattagctgccacaaatacattgtcgcaagcattgcaacgcaaggatcaagacattgtaaatgccattggatgtctgaaatcaactaaactccatttggatgatcttagaacaaatggttgggaaaagttattagatgatgtgaatcagttttgtgacttgtatgaaattgatatgatggaaatggaaagtacatatgttgatcccagacaacctaggaaaaaatcaggaattacaaacaagcatcactatgcagtggattgctttaatgatgttattgattggttggttcaagagcttgatagccgttttagtgagacaaccactcaattgcttgtttgctcagccgctttcaacccaagagactcatttcatgctttcgatggagagacttttatgagcttagcaaaactatatcctgatgatttcaacaatgatgatctgagggaccttagacatgaccttcgcctttacattggtgatgtgagagaagacaacgaattctccaacataaacactattgctgagctatctcaaaagatggtacagacaggaaaacatcaagtgtatagattggtctatcgacttttgaagcttgtgctagtattgcctgtcgctacagcaacagttgagagatgtttttcgggcatgaagattgtaaaaacaagcttggctaatcgtatgggtgatcaacaattgagtcatagacttatttgctatatagagaaagaggaaatgaaaaaagttagcaatgaggctgtggttcatcgtttcatgaccatggaaggaaaagggcgcaaatatgatctctaa

SEQ ID NO: 36740 - DNA, 237 bp, Oryza sativa
  Clone ID: PAT_MRT4530_40536C.1
gggacccgtggagggacacctgatccgccggggcatgatcggcaaggtcacctaccccgtctaccacgggggcagcttcgaccccgtctgccttgggctctactgggaggactagctttaacaggaagcgtacgaaaacaagaacggcctcctacacatggtgtccatgttcggcttcttcgggcttggcatggaaatcggctagggccctgtggagaacctggccgaccaccttgt

SEQ ID NO: 36741 - DNA, 129 bp, Oryza sativa
  Clone ID: PAT_MRT4530_40537C.1
aaggacgcccgcggggacgtgaccgggaacggaatggccggttgacccactttttttgtagaaaggaagctaaccccaacttgggggggataatcaccaagagagcgctctcctcggccgtggcggcca

SEQ ID NO: 36742 - DNA, 690 bp, Oryza sativa
  Clone ID: PAT_MRT4530_40538C.1
gaaaaaaaaaacaaaccacaacgaactaccccctcctcgtcgagccgacgcgagagaggaaagtgggttgcggcttgctgcgcgtgtggagtcgccattccccaattcgctgcgccgcccgccggatctcgtcttgccccctgcggcggcggtttgggcccccccttccgatcggtttccccccgcacatggtcgtggcggcggcggaggtggtggtggtgcgggagtagggaggcgggcgaaccgaggcggcggcgccgatggcggacctggtttccagctgcaaggataaactggcatactttagaataaaggaactcaaagatatattaaatcagctcggcttaccaaagcaaggaaagaagcaggatcttattgatagggtgttggcactcttaacagatgagcaaggtcaaaggcatcatggatggggaaggaaaaattctctcaccaaggaggcagtggcaaaaattgttgatgatacatacaggaaaatgcaaatccaatgtgctcctgatctagccaccaggagccacagcggatcagatttcagtttcaggcctatagaggaagcctatgactcttttccgccagaggccaaagttcgctgcatttgcagtagcacaatggttaatgacagcatgatccagtgtgaagatcagcgatgccaagtgtggcaacatttgaaat

SEQ ID NO: 36743 - DNA, 758 bp, Oryza sativa
  Clone ID: PAT_MRT4530_40539C.1
atcttcccagttcataaacaatatgtgggccattgatttacgcacagtccaattcagtatccagacaagctcagcttgaacttcaattccttatggacaccttagctgatcaccaacttcaacatgagagaccagatgagagggccttcatccttacctccgcaggaaccacaacagccgcggcttataatctgcacacatatcagtatcacggcacactatagaaactggcagtctttatctttctttttttttatcaagggctgcatggcccccatttccattaccagaaatgacaatcagagttcttacaaataaaaggaagaagaggttaaaaaaaaaaagagacagcaagagagagggctaggcatagagggtctgggacagacagagtgaacaggcaattactgaaacagaccacaccctcaaaatctattctatgaaccctgagccagccaaaacaaaactacccaagttgacagattacatttttgtgcccagattgaaacaaaagcaaccagcgtctggtatgatcttcagtcctccagtcttctgattcccgtcccccagccaaacttgggacaaaccaatcccaaatacttgcataattttcatgtggctagtctttagtgacagactaaacactaatggaaacagagtccacaaacaacgggcatcggaccctcactgcagtttctgcctgggcaactggacctgcagatctatacaagcaagcaacaattagcaaaaaatccgac

SEQ ID NO: 36744 - DNA, 232 bp, Oryza sativa
  Clone ID: PAT_MRT4530_4053C.1
atgcaaatgctgatgagcgtctttgtcattatcattggttgctacactgctattggctggatcaccgacatcgtcatcttcatcatgtcggttgcgttttgggggccttcatcttcattgctagctgacctgattgctgccgactggtttcttcgcctctgcggctgtgcaacttcatcacttttgattggaatcactatcttccctaccaccaatatttttgccacctctg

SEQ ID NO: 36745 - DNA, 1646 bp, Oryza sativa
  Clone ID: PAT_MRT4530_40540C.1
acaaattcaagcatcctcttcttctcaccaaatcacaaatacaagtccacaatcacaaattcaagcatcgattcaaatatgttgggcctcacaggtgcaatttcaccatcacaaaaatcaaaattaattttgccaaccatgctgtcgatcctgcggaacaaaaaaaatgtttcaatcccagcatgcatcacccatggcctcaccacgagaagaactagcagcggttgctgaacccaaggctccgagctcccggcagcggctcgatgcgaaggaaggagctccacggcggtggaggacggagctccacggcggcagctcgtcacggaggaaggagctccacgccgtcgtcgatccgaggacttggggctgccggattgcctaatggcttgccgatggaggacttgccaatgcaggacttgaacgagtcgccgccggatccgccatctgcctcacgcaacctagctccgctgctcgcacgtctctccgtccgttcaccgccgaccaccgccgccaccagcgcactgccgagcactgctgccgcccaacagatctggagctctcatgtacccccgtcgctgatccgcactccccaacctttcctccaccgcgcctccccttcatcctcttcctccaccgcgtcatcacctcctccgtgccgaccactcccttccaaccagatctggaagattggacttgaacttgaagatgagaggacaaattttaattatggccgatctcagaaacttgcatttggaacctcggcatacgtgactcaagacaacgtgctaatgacaacgctgacggtgcgcgaggccatttactactcggcgcaaatccagctgccggacaccatgtcgacggcggagaagctggcgcgcggtgacgacacggtgagggagatggggctgactggcgcgctggacatccggatcggcgggcggtcgagcaagggaatcagcggcgggcagcagaaacggctgagcatctgcctcgacatcctgacctgtccccgccttctcttcctggatgagcccaccagcggccttgacagtgctgcctccttccatgtcatgagccgaatcaccagcctcgctgccagggagggcatgaccatcgtcgccgtcgtgcaccagccgtgcagcgaggtcttcgagctcttccatggtctctgcctgctcgcctctgggagtaccatcttctttggcccagcttcaactgctgccgaggagagtgaagaaggactcccgtgcatgccagaagaggaagcaatagacattttggtgaactcatacaaatcctccaatacatcagaagttgcgaaccaggaaatgcgttacgtaaacgaggatcgggcgatgattggaagaaaccgacctggttttgttactaagacacttgtgcttactagatgttcatttgtcaatatgtatagagatattggatattattggttgcggttggccatttacgtttgcataactgtttgccttgggaccatattttaccatgtgggctatggacccgattcaattcaagctagatcacacatgctaatgtttattgccacactgctaacctttatggcaattggagggttcccctccttcgtggaggacatgaagagaactccaagtgagtacaactag

SEQ ID NO: 36746 - DNA, 3314 bp, Oryza sativa
  Clone ID: PAT_MRT4530_40541C.1
tcgcgatctagactttttttttttttttaacggtatggtcatattctactggcattgcagtgtggtactggtacatcataattcttcgcatatcatttttacagaaacttcagagtacatgactgaaatttgtacagggtagcttgtacatatgtgcaagcttttcagaggctgctaaaacctcagtttattaccagcctactagttactattcactagtcaggcattctaattaaggtcctaattggcagcacggcagcacccagactgttgctactgggtgccttttgatctttctggcagcagtttcttacaaagaaacggggcatctgttcttacttcttatcattcttgttctttgccttcccgtttgctgagatagagtcgatgtcgatgagcattttcacgacttctctcatggttggccgttcagaaggcagttgaacagtgcaaaggatggcaatgttcaagacctttgtcatgtcctctgatgcatggctgctaacctttggatcaagaacagctgcaggattctggttggccaaatgggatgaaacccaggagacaatgtccagttcaccgtcaaactgttggtctgaagggctgcgtccagtaagcagctctaacagcacaatgccaaagctgtaaacatcactcttctctgtcaccttgagagaataagcaagctcaggagccatgtagccatgggtaccagcgaagcagctgagtggtgaaccttccaccaatttggcgatgccgaaatccgcaagcttcgcttcatactcctcatccagcagtatattggtggattttatgtcacggtggattatggccggggagcaatcatggtgaagatacatgatgccctttgcggttccaaccgcaatccggtaccgcttctcccagtccagctccggctgcccagccttgaactcacggcggattgcatcgtagagattgccatttaccacatactcatacaccagaaagtttgattccccaccggtcaagaatgcatggagtttcaggatgttccggtggcgtattttcccaagtgtgttgatctcagttctcatgacctttgcatcatcacgcttccatagttgcttcacggccacaacacccctccctttgctcaattcaagcctataaactttgccagtgcctccacagccaatcagattgtccacatccaagttgcaaatctcctcaggatcaagctcaggggggtggaaggactcaagaacccactttgagtcactgtcgtcgccgctctcgatgtctcccttgctgtggaactgctcaagcttgtaattttcatatctcaggcatgccaacccagataggagaaccaccagagatgtcactattatcagcacgacaaatagccttctctgcgagaagttctgatggttgtcgttccacgggcagtatcttaaattggtggcattttgcctccaaccttctgaaactccagcaatacaaaggccgtcgttttcagagaatgcatcatctccagctatcatcaggagagctggagggactggtccagataaattgttgtgggagaaatcaacataactaagcttcagatattgcaatccttcagggatttcaccagagatcatgttgtgagataggttgagtgaattcagagtgaatagagatgctagtgtgtctggaatggtgccagtcaaagaattgtctgcaaggttcagatcaactaggctgttgcacataccaatatcaggtggtatcgatccttccagagcattttgttccaggtgcaggaatgacagctgcttcaaacttccaatctgtgcagggatttggccagagaatctattgttgaaagcaacaagcttctgaagcagggaaagcttccccaactccattggaagttcaccagagaagacgttattatgaacatacagttggttcagagaagccgaaatgcctatatcagaggatatgccgccaacaaatttattgttggcaacatcgatgatcacagcattaggcaatccccatatgccactgtgaattctcccagtgaactgattttgacttattctaaacctctgaagtgttttgcaagaagagtaggagctggggaattcacctgagaagttgttgtccaaagccaacaagaactgcaatttgttgttttggcacaggaaccttggaaattcaccagaaaaataattctcagatatgtcaattgcattgagtggtgagaatcggccaaggtttgcagggaactttcctgagaattgattttcataggttgaaaatgactcaagaaactccaagtcccctaatccttcaggaagcacaccagagaagttgtttcggtaaatatgaaagatcttcagcttcttcaggtttgctatctctttgggcagaataccacttagctgattctgggacacatcaaattcagataacaatgtcaaatgtgcaagttcaggaggaatttcaccagtcagattgttttgatagagctcgatcttccataggttacgcaggttggatattgctattggaaacacaccaataatctgattgcgtgagaagtctagggtcccaagtgagaccagatcaaatattgaaactggtaattctcctctaaggttgcattgccccaagaatagccatgtcaggttcttcagctttccaatactttcaggaacatcaccttcattgaagttgttctctcctagacctagttcagttaggcctgataatttgccaacccatgctgggaatggtccagaaaaattgtttgttgacaggtcaagaacttgtagattgataaatgttgaaagatcaggtaattgccctgtcaaactgtttgttgacaggttaagaacctgcagatttgtgcagttagctagtgcagcaggaatagtgcctgagatggagtttgcaccaagctccagcgtacgtagttgggaaagaagagaaaacgacgacgatatagttcctgatagtgaggcgttggagagtgatattccaatgacaccaccagaagtttggtcacatgtaacgccataaaattggcatggtgaatgagactcatcccaattgcctaggtaattttgtggatcctccagatgactctttatgtccaagagagcatctgtttcaagaggtagagatgcagatattccgaacttcagagacagaaggatgaagcacaaatatatctgaagttgctgaggcaacattgtgttgttacttgttagcactgtgtacctgctagaaggtcgcaggtagcagcagcaaccgcagaattaaccgtgtagtgtccg

SEQ ID NO: 36747 - DNA, 3192 bp, Oryza sativa
  Clone ID: PAT_MRT4530_40542C.1
atggccacaagtgatgacaaagcaggtgtaaaagaaattcccaggtctgatatcagcaaacgggagctccttttccatgtttttcaagaacctgcagtcatcggcagtgcatgtgttctcctggagtctgctgcttctgttcattcatggtgccccttacatcctagcttgaggcaggaagcaaagtttaagcagaagacaaacaagttctgggagtaccaggaacagagtaatacctgggtggaaataagcatgcctttcaatttgatgtcctgcatcaacgatacctgcacgaaggtaggatcaatcgagcaaccggaaaggagacatggccgtgcttcaatttctagtcaggaggagaaggatgcagagatcgatgacaatgatcaagcagatagaaatgatccagtcctgcccataagaaaaaggatttccttgacgcgcatgtcagaatcatctgtgtgggtgacagggcaaagtggatcaatttatgagaggttctggaatgggctggcatgggtgattgctcctcatgaactaccaatttcagttggctatgctacagcaactttcattgtgaatacaactattcttgctctctcagaggctggaatcctctatcagctacagctaaatgaacatgcacaacctatctggacagaggtaatattcaactttgaacaacaattcatagtccttggagaaaaaacacaaagtcaagctatgcacataagaaatgggatagtgtcctatgatggaaggaaacttttcctatctattacaaatggatccctagtggaggtcacagaacttcagcccctaaggtggacttaccatggccacccaccaggaggagatgtatcatatatatctgatgctggaaatgcaagaccagggacagtgttcacagtaagttctacaggagacttgtatgagttcgacagagaatcaagaccatcatggaaaaagcacatatggagtgaagaaacagcagagaatgtctcattaagctcatcagttgggtgtgctttacatggcctgctaggatctaactcagtatcacttttcttgataacaaaggatggtttattagtggagcggcgcttgcatagaaggaagtggaaatggtataaacatggagctcctaagagtcaaagacttagttcgatcacagaagtgcaacaagatgaatctaatgatgcaacttcaatgtattttacaacaaccacaggaaaagtattcgagtatcagtttccaaaatatacaggtggagctcaaagcaataagatcagaggactctgggtaaatcacatgtctcctgagaatacaaaggtagcaagaaatgtccgaggtgtacaggttcaagttggccgagtaatattcccactggatgatggtaggcttggggagctgcatttgcctggtatgggtggtgatgattttggtccaagtcaacactatagcatgagaaggaaagtgccaaacaagtatgagtggtccattctagatgcaccagaaacagaaggttggaatgcagaatattgcacagaagagcatggtccaacaaattgtattactggagcaaagaatgtagctgcagataccaaatcaaatgacttgggcaatatcccaccttccagatggcgtaaagaagataagcaacaatacctgtacgttaatacccatgagagggatgaaatcgaatcgtataactttctatcaagaagtattgatattaacttccacatgcgggtgatgcatgcagatagatcactttttctcataacagataacggcttaacttttgaatatctaaacaataatggtgtttggttatggctaagacatgagcacactacttccatgaaaggtacagtaggaagctataatggcagcttgtatcttgtcgatgttcacgggaacttacatatcagagaaagaaatggagatgacttattatggatcaactgcacagcaatgaggaagggaaggcaggtcgcaagtgggtctccatgggatggcattccaggtttaccacgcagagtgacaacagatgacgcactcttctttgttaacaagagaggcaggctactacagttcacggttgcattaaggaaattcaagtggaaggactgccagagccctcctgataccaagattgcattcatagtggatcaggaagtgttcagaagaaacgtcatctttgcggttggccgcaacggccgcctgtaccagtacaacagaatcacagagctatggcacaagcactaccaatcaccccacctcgtcctctcacggtcaccggggacagcgatgaggccgtcccatctctccctcgccggctccatcttcatggtgtcggagcacggcggcctagtcgagtaccatttcagcccgcaggacgggtgggagtgggtggagcacgggacgccccaccgggacgtggccatcgtcggcgccccggggccgtgcttcgacggctcccagctgttcatcatcgggtccgacggcgacgtctaccggcgacacctcgagaactggacgtggaggtggacgagccacgggcacccgtcggcaccgtccgccgtggcgatgaacgcggccggcggcgacaagagctgcgccaccctgggctccgccgccgacgcgcactacgcggacggcttcgtgggaagctgcgacgagaaggtggcggccgcgcggccggtgccgttctcggaggacgcggtggtcttcgagctacgggacggcaggctggcggagctgcggcgaggagcggacgggtgcggcggcgggtgggagtgggcgcggatcatcagcacgccggccagcgcctgcatgaccagctactggacggccgtcgccacgtagtccgccgcccggcggcgccgccgccgccgccgtcgaagcggggtcgctgaaatttttggtgtgccgcgtcatagcgggaaacggggaactgtaaaggtatactacacacgtgtcatagatctggtacttgtaccgaactactgtaccagtacactagtactaaggccccgtttggcaactttccagctcctaactccaacttactttgagcaggagctattccaaatagtccagattctccatttttgggagcggagttggcagagctactccacaaatttgtactacgggggttgagctgggtttttgctgctccacaac

SEQ ID NO: 36748 - DNA, 354 bp, Oryza sativa
  Clone ID: PAT_MRT4530_40543C.1
atgcgcatgactctaagggcaattgcagtgccccgtgtgattttggcgaacttgggataccagctagatgaagaaccccatttgccacacacggcactggggcagcgtcagcgaggcggcactagggcgatgacggcagctggccggccagatccacccttcctctccatccccgaagcagcggcagcatcggcagcgcgctgcggctgcggagcagggggcggcggcgccggagaggaccggccagatccacccctcctcggtcgaggccgcccctctcctcttgccgcgttggcttctcccatcttcggcaagcgggctccacctctacctccgcacccaatcgccggctaa

SEQ ID NO: 36749 - DNA, 135 bp, Oryza sativa
  Clone ID: PAT_MRT4530_40544C.1
atggcgaaagtcgccggagaggagattaacgtcgtcgtcgtgggggagcggcagctttgcacccacgggttcgccgtgctgtacgtttacgggtatttactccgcgcgcagcgcatcgcagtcgcagcgcgctag

SEQ ID NO: 36750 - DNA, 291 bp, Oryza sativa
  Clone ID: PAT_MRT4530_40545C.1
ctcaaggattctcttccagatgttccaatggctgttgctcatggaaagaaagtttcaaagaacatacaacttgctatggaaaaatttgcttgtggagaagtcaaaattctggtctgcacacacatcattgaaagtggaatagatattccaaatgccaacacgatggtagttcagtatgctgaactatttgggcttgcacagctatatcaggatagacttggagctattgaggagcatacagatcttggtcaaggttttcatgttgcacagaaggatatgggtatcaggggg

SEQ ID NO: 36751 - DNA, 2848 bp, Oryza sativa
  Clone ID: PAT_MRT4530_40546C.1
atacttcgtctcttctctcccccttccctcttttcttctgtcttcttttgttgtttcgtctctcttgttttctttgttgttgtcgttggtgctcggcggggagctgcgttgggtcacacgggtggacccgccgggagctggaggcccggggagtacgtcgtgcacaagaaggtcggcgtcggcaagttcgtctgcatcagcgccgaggacggtctcgactacgtcttcatacagtacgccgacgccatggccaagctcgccgtcgaccaggccgcccgcatgctctacagatacaacctacctcacgagaagcagagaccacggaatttgagcaaactgaacgatccttccacgtgggagaagagaagactgaaagggaagcttgctgttcagaaaatggtagtcaatttgatggagttgtatttacaaaggatgaggcagaaaaggcctccttacccgaagcctgtgggaatggatcagtttactgctgaatttccctatgagcccactccagaccaaaaccaggcttttatagatgttgacaaagatctgactgaaagggaaaccccaatggacagattgatttgtggagatgttgggtttggtaaaactgaagttgcaatgcgtgctatattcattgttatatctgctggatttcaagctatggttcttgctccaactgtaatactagccaagcaacattatgatgtaatgtctgagcgtttctccaattatcctgatattaaggttgccatgtttagtggtgctcagaccaaagaagaaaaagatgagctaataacaaagataaggaatggtgatttgcatattattgttggaactcatgctgttcttacagaacgtatggcatataacaatcttggtctcctagtggtggatgaagaacagaagtttggtgtccaacaaaaggagaagattgcatcatacaaggcttctattgatgttctcacactgtctgcaacacccattccacgtactttgtatctcgcgttgacaggtttccgtgatgccagtttaatgtctacgccgcctccagaaagagttgctgtaaggacctacgtgtcaggatttagcaaagaaagggctctatcagctattaagtttgagttggcacgtggtggtcaagttttctatgttgttcctcgaataaaagcaatagatgatgtgctgcaatttctcaaggattctcttccagatgttccaatggctgttgctcatggaaagaaagtttcaaagaacatacaacttgctatggaaaaatttgcttgtggagaagtcaaaattctggtctgcacacacatcattgaaagtggaatagatattccaaatgccaacacgatggtagttcagtatgctgaactatttgggcttgcacagctatatcagttgcgaggtagagtaggaagatccggcacagaaggtttcgcatacctcttctacactgataagtctttgctctcaaagattgcaacgttcaatatctccatctgcaggatagacttggagctattgaggagcattcagcatctggtcaaggttttccatgttgctagagaaggatatgggtatcagggggttcggaagcttgtttggtgagcaacaatctggagatgttgcaaatgttggcattgatctattctttgatatgctttttgatagcttgtcaaaggttgatcagttttgtcttattcccgtcccttacaaagatgttcagctggatataaacatttcttcacgtctctcctctgaatacataagttaccttgaaaatccggtggaattgcttaacgaagctgcaaaagctgcagagaaagacctatggaccttaatacaattcacagaagatcttcgtcgacaatatggaaaggagcctcgtgatatggagttgctattgaaaaagctctatgtaagacggatggcagcagatcttggtatcagtaggatatattcatctggcaaaatgatcatcatgaaaacaaacatgaacaagaaggtatttcggctcatgagagaagcaatgtctttggagactcatcgaaattccttatcattcactggaaaggaaattaagggtgaactacttgtcaatctgccggacactctactcctgaattggctttttcattgcttagcagactgctatgctgtaataccagcacttgtgaagtactagaacttgtttgtgaaaaatgaaggttttgcccgcagcttatacgtgagaacatgatacaatttgtgagaaggcagtctcggctatcttgatagtcagcaacggatagttcttgattgcttatggttgttatggctgttcttgttatacgaacagcaaggtgttggcattgatggactaacctatacacgaactggaagatagttggtggaatgaagagctagtgaaaattatgttagatagcaatggctgattgatagtaaatccatcaacttggactcagcatgacagttcaaacaaactggaagccttgaaaaactcggttaaaattcttcctgacataataagttgccttcaaatatcttacaggatttttaacagaacccccaaagtctccatatatttttttcgactgcatgtatatatgtgatgtcatgcactgacccatttaattaccataaatcatggtgtttgataaagaaagtgttagccagtgaattgacatattttgttcgacatgtttttttgtccaaccagatgatgatgatagtttagtttagtgcaacaaagtgggattcctgtaccataatgcagataaactggatatgcatttataagaatgaagatgaagtcttgtttttgttaaaaaaaaaaaaaaaa

SEQ ID NO: 36752 - DNA, 627 bp, Oryza sativa
  Clone ID: PAT_MRT4530_40547C.1
atgccccgtccgttgaaatttggtctgcagaccaacttgcaagcgctgtgggaagaaattgattgtctagaagattggagttttcaaaccgaaagaccgaaggccgaggaactcgagtggccgcggctagcgacgggaggggaggaggtcggtggggcacggtcccacgccgccggccgccgcttgctccgcgaagtgggccgcgacggccgcgccgtctccgcccagttcgccaccgctggcgcggacctgtcctctggcgccgcggcggcgtcggcggcggggaggcgggtgcacaagcgaggtcgctggtgcctggtggcgccgtcgtcgccgacgccggcggagacgctgccgctgtcggtgatcgaccgagtggcggggctgcgccacctggtgcggtcgctgcacgtgttcgaggccggcggcggcggtggcgagccggcgagggtggtgagggaggcgctggggaaggcgcttgtggagtaccacccgttcgccgggagattcgtggaggtggtgggggtcaacggcggcggcgaggtggcggtggtcggacggtggcttgccggctgcaatgatgtggtgccttgccccaccggcctcctgcaagtgtgcagagaatga

SEQ ID NO: 36753 - DNA, 1285 bp, Oryza sativa
  Clone ID: PAT_MRT4530_40548C.1
ctataagacatccactatgcatagttaaattcgtaaattctttagtagtgttgctatgcatgatcttgagcttcagtagttagatgtgaagataacatttttacatggagagcttgaggaggagatatacatgaaacagccagaagggttcatagtacctggtaaggaggattatgtttgtaagttgaaaagatccttatatggtttgaaacagtctcctcgtcaacggtataaaggtatgattcatttatgttgtcacatggctttaagaggtctgaatatgatagctgtgtatacattaaatttgttaatggatcacctatatacttactgttatatgttgattttatgctgattgctgccaagagcaaagacgaaatcactacattgaagaaacatttgagtagtgagtttgagatgaaggatcttgatgctgctaagaaaattctaggtatggaaattactagaggccgacattctggtttgttatttcttaatcagcaaagttacattaagaagtttgttcagcgtttcaacatgcatggtgcaaagcccgttagtacttctattgcacctcattttaaattatcagctttacaatgtgctagtactgatgagggggtagaatacatatcaagggttccacattctagtgatgttggttcttttatgtatgccatggtttgctttcgtccggatttatctcatgctatgcggttggtcagaagatacatggctaatccaagtaaagaacactggaaggctgttcagtggattttcaggtacttcgaggcatggtagatgctttcttgaagtttgtcaagactaataagggacttgttggctttgtggattcagattttgctgctaatttcgataagcgaagatcactcacaggttacgtgtttactattggtagttgtgttgtgagttggaaggtaacattgcagcctgttgttgcccagtctatcactgaagcagaatacatggatattgctgaagcatgtaagtaatcattttggttgaaatgattgtctgctgagctttatggagttgattcttgcattagcctattttgtgagagtcaaagtgctatatacctcactaaagatcagatgttacaaatcacattgatatcaagtatcattatattcacgatgtagtcgcacaaggtagaaggattgattaatgctacaagaagaaatttatttcaaggtggagtttgttgagttgtgatccaaactccggatggagcgaagcggaggcccgtcgctagaggcttggg

SEQ ID NO: 36754 - DNA, 584 bp, Oryza sativa
  unsure (1)..(584): unsure at all n locations
  Clone ID: PAT_MRT4530_40549C.1
gaaaatgatcacaagttagacgcttggtattgaagatggatgattgattatgcataaatacttctatgcactaattatcttttattttcagacttgcccttgcccttatgttttggttgataaattgtgcacatgttctttttttagagtagtaaggttattgctttccagttcacaaaattttaagtgtaagccatcctttttgtgaggattcctcagatccttttcaaatgaaaggttttcatgtactttatgatgaatttactttttgtttgaatcatcttcattagaaaatttctgatcaaattcatttcaggatacaacattgtatgtaaccctggagccttgtgccatgtgcgctggtgctattcttcaagctagagttgatacggtggtatggggagccccaaacaagcttcttggagctgatggcagctgggttaggcttttccccggtgatggtcaaacaagcagtttggattcagcanacacanaccagggggcctggacctgtccaccctttccatccgaagatatccattaagcgcggcatttctctccgctgagtgctcagaaataatgca

SEQ ID NO: 36755 - DNA, 313 bp, Oryza sativa
  Clone ID: PAT_MRT4530_4054C.1
tcgcgtacgcttactaagaacgcaaggaaattgtgtctaaaactctattcatcatgggtgcgggagctggtaatgacatataatgaccccttccatcagaacccaaaattttccactgagatgaaatcatcgtggacgaacggcataatcaagaatgaaaaaacgcatgaaggtcctgaaagatctacgagccaatacgattgtagttattggaaaatgtactatacgatgtgctgcaagttagactactatgccccaaagtgcgtcaagtgggtaagactcttatgcgtccagctgcataaagcggttgaac

SEQ ID NO: 36756 - DNA, 488 bp, Oryza sativa
  Clone ID: PAT_MRT4530_40550C.1
ttttgcatgttttgttaaacaaagtcatatatagcactggatcaccagctatgtggttgccaaaacattgcattcttcattatttgtttagatcactatctcgctgcgtgcgacacagaaccggcgtgatcctactggctgtgagggacgccggctaagcctaacactggccggaggtgaatatgctgcactgttggggcttaaccccgcacatcagacagaagttgctcggcgtactgcctggtcatggtgagactgacgcggatcatccccgtgtgctgttgttgctcgcacgtgtatgcctcctcctaggacccctagccgtattacctgtgatacgaccacgactgctgggcgacgtatgactccgacgacgacgacgacctgccttgctcgaggcgcattggcatgctctaatggtagctgctaaccatgcggaggatggaggggcatcgggactctcggataacgtgctgcaactgctggca

SEQ ID NO: 36757 - DNA, 331 bp, Oryza sativa
  Clone ID: PAT_MRT4530_40551C.1
gacaaaaaaaaggtttttttttggtgggacacaaatcccggtcttaattcacgagttccggttgagttcattccagctacaacagggttgaaacaccgacacttcactgtttaattgaattgggccccaccttaaattcccctcctgacatcacaggtttatgtcacactcctacgggggcccaccaaccccacccatgggagcagcaggggcatttgggacgccctttttccggggggttccctcccacgacgaaaaatttgcccgcggggaacacgccccaaaagggtccgcacggcattcaaatgggcctgtgtacctaacaaatttt

SEQ ID NO: 36758 - DNA, 360 bp, Oryza sativa
  Clone ID: PAT_MRT4530_40552C.1
gcttgtgaacaccgacccgcatcgcatctgatcggggtccgcttaatcctcgacctcggtatcagccgcagcaagggaagggtaggaatcctcgcccaaaaggccgtcgtctacccttgcggattcagaccaggattttctatgtacgtgtctggtcgactccggcacggtggacgcttccgtctccgggatcgcggggaccaccggagcctgagggacgttccatggctaacaggaccgttgcaaagagcctgccacggtgcgctgaaccaggactcctcgccgcccacgacacaatactggctgcacgtttacctcggccagggcttttacatcgtaacctacagactttggacctac

SEQ ID NO: 36759 - DNA, 506 bp, Oryza sativa
  Clone ID: PAT_MRT4530_40553C.1
ccaggggagccagtcaactcatgacatccacttatatccaactcaatgagctcaacaagatcctccaaacccttcaagcttgacgaagctacagctcatccagaaagaaatcgaaacatgttccaagcccttcaccaatcctttcaggcttccttctgaggtatacaacaacctgttatccatccacaagatcatttttcaattgatggaaactccatatgcactgctttcaattttgggcactgaatgatgactagttctctgagacgaggaaacatattttccgtgggtgtttgtccccaaattactaagttaggcatataagagaaagttagcctctctagtgaggggaatgtaccttgtgaccatagaaactatctttgatacagctgactgtttcagctccactaatctcagcaatctttaggcatggtagctgtcccaagggagcagcaagttctagatcgcgacgccgctctagaggatccagcttacgtacgcgtgca

SEQ ID NO: 36760 - DNA, 2001 bp, Oryza sativa
  Clone ID: PAT_MRT4530_40554C.1
atggcgacgacgagggttcggtgcagcgcctgcctccacgagtttgacctctgcgtcgccggcgccggcgccaacgtctgctcgacgtgcaaaaggccatggaccaacccgccgcccgcggcgtcgtcggcgtcgagcaccttgtccttcgcgacgttctcatccgtgaacccgccgcccgcggcgtcgagcccctcgcccttcgcgacgtcctcatccgtgaacccgccgcccgcggcgtcgtcggcgtcgagcaccttgtccttcgcgacgttctcatccgtgaacccgccgcccgcggcgtcgagcccctcgcccttcgcgacgtcctcatccgtgaacccgccgcccgcggcgtcgtcggcgtcgagcaccttgcccttcgcgacgtcctcatccgtgaacgcgccgccacagcccgcccatggaacgaccacgagcggcttgtttggacgatctgggccaccgccgccgtggagctcgtcggcgacgagcttgccaaggaggccactgacttcgtgctggccgccggcgccatcaccagtaccagtccagacgccgccggtggcctatccagcacagccatcggtttttgcgacgcccttcaggagggtcacggaggagggccacgcgtacgacgacaacgagccggtggagtcgccggcgtcgaggggggggggcgaaccaggtggcggcgaggccgcggcaaacgatggggagctcgtcgtcatcaagacgcactgcgagttcccggccatcgcgcggagcacgccaagggacaacttcgccgttctcctccacgtcaaggctcctagcatcgccgcggaggcggcgccggcgcgcgcgtcggtcgacctcgtcacggtgctcgacgtgagcggcagcatggaaggctacaagctcgcgctactgaagcgcgccatggggttgctcggccccggcgaccgccttgccgtcgtgtccttctcctacagtgcgcggcgagtgatccggctgacgcggatgtcggagggcggcaaggcgtcggccaagagcgccgtggagtccctccatgcggacggctgcacgaacatcctcgagggccttgtcgaagccgccaaggtgttcgacggccgccgctaccggaacgccgtcgccagcgtcatccttctctccgacggtcaagacaattacaatgtcaacggcgggtggggcgcctcgaactcgaagaactacagtgttctcgtgccgccttccttcaagcgctccggcgaccggcgcctcccggaggcgcgcatcgccatcacctgcccgcacgccgccgtgcgcgtcaggtctgtcaactccggccgctacgacagcgtcattgacggggacggccgggccgcgtcggtggacgtcggcgagctctacgccgacgaggagaggcgtttcttggtgttcgtggacgtgccagcagccggcgccggggaagacgtcacagaactgatcaaggtgagctgcacataccgcgacaccgcgagtcggcagcagatggtcgtcgccggcgagcacgccgtagtgcaaagaccagtggaggtggccaccaacacggagccgtccattgaggtggagcgcgagcgtttccgcgtggaggcaaccgaagacatcgcggcggcgcaggaagcagccgagcgcggcgcgtacgcggcagcgaaggcgatactcgaccggcggcaggaggcgctcgcccggtcggcgcggcggctcgcctgcgacgccaggtgcgcggcgctggtgtcggagctgcgcgagctgagcgcccgcgtggcgaacaggcgggagtgcgagcaggccgggcgcgcgtgcatgctcgccggcatgagctcgcacgctcagcagcgcgccacgtcggtgcagctgttctcgccggcgtcggcgctttcctccggcgccgtgccatttggttactcgacgccggcgatgcagagcatggtggagtcgtcgcggaaggcacgagagagcggcagcgggggcaactga

SEQ ID NO: 36761 - DNA, 1717 bp, Oryza sativa
  Clone ID: PAT_MRT4530_40555C.1
ttttttttttttttttttatcagagagaagatgtcaactcagatatacacgggcagttcaagccattgtgaagacaattacaggcttagatacataagaacagttatgcaatcaaccggtataatacaggcccaagttcaggctatctgataaggaatacaaatgttgtttctttagacaggccttaagaaaaattgtcactataacaataatccatgctcattcgcccaacaagtgggcataaaattaatagatgcacaaagcaaggggatttggcttttctagagctaccgatcttcagatgccagcattgataaattgctctgagctcttagtagggaggatccggattaaatgccaaggattccctccagatgagttcttttatatgttcttcagtaaaggatggttgctcaaaatcaaagctgaaaggtgctgggcaggtgggttcttcattgatgtcatgaagagaagccaagtatgggtgatgaagagcctcatcaacagttatccgtctgcttgggtcaaacaccagcattttctctaacagatcgactgcaccagcagacatgttgcggaagcgcaagcggaagtcctgccttgggtactgtggtagctgtttcatgtatcttcttgcattatcactccgaagaaaccctaggcttgagtcatctggcgaccctatcagctcagtgatcaattttagttgctgaatgtaatcccttccaggaaacaggggttgacgagtcacaatttcaccaagtatgcatccaactgaccagacatcaatagcagcagtatactgcgagcagttcaacagcagctctggtgctcgataccaacgagtgaccacatactctgtcatgaggtcagtctccgtagtggttcttgcaagcccaaaatcagcaatcttgagatcacaatttgcattaaggaacaaattgcttggcttcagatcacggtgcaagacatttgccgagtgcacatattttagccctcgtagcaactggtacaggaagtactggcagtggtcatcagtcaatggttgatttgagcgtatgatctgatggagatcagtatccatcaactcagaaacaatgtaaacatcattaaagttgtctcttcttggggggcgaattatgtcctttatggcaataatattctcgtggtccatgtggcgaagcagcttgatttctctcagtgtccgcttggcatcgatatggttgtcgaatgcattgccaatcttcttgatggcaacttcctcgccgttctccgagttaacagccgcgcagacaatgccgtaggcgccccggccgatggggcggatgggaggggcgtacttggaggagacctcgaagaagttcccgtacacgttgtacagcacgtagcggcccccgtgcgtccccatccccttgatctgcgcgccgccgccgccgcccgcgccgccggaggaggaatccatggccgccgccgctcgcggggaggacgaggtggagggggaggggaggaggcgtagggtttggctcttggtcgccgcgactagtcgttgatgggagtaggaggaggaggaggaggactatggtgggagaagcttccccctctttttgactcgggcggcgaccgcggaatggggatcggagcgaggcggaggcggcgacggacggtgttgcggccttgcgggaaagggatgcgggtgcgggtcaatcaaagggtgaac

SEQ ID NO: 36762 - DNA, 2274 bp, Oryza sativa
  Clone ID: PAT_MRT4530_40556C.1
atggcgacgacgagggttcggtgcagcgcctgcctccacgagtttgacctctgcgtcgccggcgccggcgccaacgtctgctcgacgtgcaaaaggccatggaccaacccgccgcccgcggcgtcgtcggcgtcgagcaccttgtccttcgcgacgttctcatccgtgaacccgccgcccgcggcgtcgagcccctcgcccttcgcgacgtcctcatccgtgaacccgccgcccgcggcgtcgtcggcgtcgagcaccttgtccttcgcgacgttctcatccgtgaacccgccgcccgcggcgtcgagcccctcgcccttcgcgacgtcctcatccgtgaacccgccgcccgcggcgtcgtcggcgtcgagcaccttgtccttcgcgacgttctcatccgtgaacccgccgcccgcggcgtcgagcacctcgcccttcgcgacgttctcatccgtgaacccgccgcccgcggcgtcgtcggcgtcgagcaccttgcccttcgcgacgtcctcatccgtgaacgcgccgccacagcccgcccatggaacgaccacgagcggcttgtttggacgatctgggccaccgccgccgtggagctcgtcggcgacgagcttgccaaggaggccactgacttcgtgctggccgccggcgccatcaccagtaccagtccagacgccgccggtggcctatccagcacagccatcggtttttgcgacgcccttcaggagggtcacggaggagggccacgcgtacgacgacaacgagccggtggagtcgccggcgtcgaggggggggggcgaaccaggtggcggcgaggccgcggcaaacgatggggagctcgtcgtcatcaagacgcactgcgagttcccggccatcgcgcggagcacgccaagggacaacttcgccgttctcctccacgtcaaggctcctagcatcgccgcggaggcggcgccggcgcgcgcgtcggtcgacctcgtcacggtgctcgacgtgagcggcagcatggaaggctacaagctcgcgctactgaagcgcgccatggggttgctcggccccggcgaccgccttgccgtcgtgtccttctcctacagtgcgcggcgagtgatccggctgacgcggatgtcggagggcggcaaggcgtcggccaagagcgccgtggagtccctccatgcggacggctgcacgaacatcctcgagggccttgtcgaagccgccaaggtgttcgacggccgccgctaccggaacgccgtcgccagcgtcatccttctctccgacggtcaagacaattacaatgtcaacggcgggtggggcgcctcgaactcgaagaactacagtgttctcgtgccgccttccttcaagcgctccggcgaccggcgcctcccggtccacacgttcggcttcggcaccgaccacgacgcgtcggcgatgcacaccatcgcggaggagaccggcggcacgttctccttcatcgagaaccaggccgtcgtccaggacgcgttcgcgcagtgcatcggcggcctcctctcggtccccgtgcaggaggcgcgcatcgccatcacctgcccgcacgccgccgtgcgcgtcaggtctgtcaactccggccgctacgacagcgtcattgacggggacggccgggccgcgtcggtggacgtcggcgagctctacgccgacgaggagaggcgtttcttggtgttcgtggacgtgccagcagccggcgccggggaagacgtcacagaactgatcaaggtgagctgcacataccgcgacaccgcgagtcggcagcagatggtcgtcgccggcgaggacgccgtcgtgcaaaggccagcggaggtgagcaccagcacggagccgtcgatggaggtggagcgggagcgcttctgcgtggaggcaaccgaagacatcgcggcggcgcgggaagccgccgagcgcggcgcgtacgcggcagcgaaggcgatactcgaccgccggcaggaggcgctcgcccggtcggcgcggcggctcgccggcgacgccaggtgcgcggcgctggtgtcggagctgcgcgagctgagcgcccgcgtggcgaacaggcgggagtacgagcagaccgggcgcgcgtgcatgctcgccggcatgagctcgcacgcacagcagcgcgccacgtcggtgcagctgttctcgccggcgtcggcgctttcctccggcgccgtgccatttggttactcgacgccggcgatgcagagcatggtggagtcgtcgcggaaggcacgagagagcggcagcgggggcaactga

SEQ ID NO: 36763 - DNA, 162 bp, Oryza sativa
  Clone ID: PAT_MRT4530_40557C.1
cgcacaaccctagccatgtctctcagctctaacacctgactgcactaatggttcgcttcaccatgggcctctcctccccggtgagggcccgcgcggcaccgtagagctgctccgcgctcttaagcgagcgccgatcaccatgccaagaccgcggacccaacc

SEQ ID NO: 36764 - DNA, 2115 bp, Oryza sativa
  Clone ID: PAT_MRT4530_40558C.1
atggcatcggcgggaggccgctgcgacggctgccacggcgacttcggcctctgggagcctcccttgacggcggagtgctcgcacaggttccacctccactgcgtcgtctccggcgccgacgtctgcccggcgtgcaacgcgcgatggaccaacgcgccatcgaacccgccgccgcaacccgccggaggcagcacgacgccgtttggacagacgacgggctttcccatgcgcgtccggccatggtcgtcgtgcgacaaatgccgcggcgtcatagaccacagccagcccaccgtcacgtccgagtgcagccacacgttccacctccgctgcttctccgggagcgtcatctgcccggcgtgcaacgcgcggtggcgcgacacggtggccgtgccaaacccttcgccggcgccgccgtccaccttctttcccgccggcgttcccgcgccgccgccgaccttttcgcccttctgggtgagccaagagtatgacgacgacgagccggtggagccgccggtagcggcacacggtggcggcgtggcaccggcgagcaatggggcgctcgtcgtcaggacgcactgcgagcacacggccgtggcgaggagcgtgatcagggacaatttcgtcgtccttgtccatgccaaagctcctagcatcgccgtggcggaggcgacggcggcggcgcgcgcgccggtcgacctcgtcacggtgctcgacgtgagcggcagcatggaaggctacaagctcacgctcctgaagcgcgccatggggttcgtcattgataagctcggccccggcgaccgcctcgccgtcgtgtccttctcctacaatgcgcagcgagtgatccggctgacgcggatgtcggacgacggcaaggcgtcggccaagagcgccatggaatccctcgctgcgggcggcggcacgaacatcctcaagggccttgtcgaagccgccaaggtgttcgacggtcgccgctaccggaacgccgtcgccagcgtcatccttctctccgacggtcaagacacgtacaatgtcaacggcgggtggggcgcctcgaactcaaagaactacagtgttctcgtgccgccttccttcaagcgctccggcgaccggcgcctgtcggtccacacgttcggcttcggcaccgaccacgacgcggtggcgatgaacgccatcgcggaggagaccgggggcacgttctccttcatcgagaaccaggccgtcgtccaggacgcgttcgcgcagtgcatcggcgggctcctctcggtcaccgtgcaggaggcgcgcatcgccatcacctgcccgcaccccggcgtccgcgtccggtcggtcaagtccggtcgctacgaaagcctcgtcaatggggacggccgggccgcgtcggtggacgtcggcgagctctacgccgacgaggagaggcgtttcttggtgttcgtggacgtgccagcagccggcgccggggaagacgtcacagaactgatcaaggtgagctgcacataccgcgacaccgcgagtcggcagcagatggtcgtcgccggcgagcacgccgtagtgcaaagaccagtggaggtggccaccaacacggagccgtccattgaggtggagcgcgagcgtttccgcgtggaggcaaccgaagacatcgcggcggcgcaagaagcagccgagcgcggcgcgcacgcggcggcgaaggcgatactcgaccgccggcaggaggcgctcgcccggtcggcgccgggtctcgccggcgacgccaggtgcgcggcgctgctgtcggagctgcgcgagctgagcgcccgcgtggcgagcaggcgggagtacgagcagaccgggcgcgcgtgcatgctcgccggcatgagctcgcacgcacagcagcgcgccacgtcggtgcagctgtttggagcggcggcgccgacgtggtcaatgccgatgtgtggatcggcggcgccgccatctctctctttcggggggtttggagggttcgcgacgccggcgatgcggagcatggtggagtcgtcgcgaaagagaagaaagggcggcgacggaagcttaagctttttggatctggtccgaactgaggaagaagccggcagctcagatgacgagaaggagaacctgtaa

SEQ ID NO: 36765 - DNA, 288 bp, Oryza sativa
  Clone ID: PAT_MRT4530_40559C.1
gcgacggaaaggtcatatgcagcgcagtcttggacttgtatattgacgacgacattattcatgtctgcgaattcaacgtaaccaagaaccatagcgagctctacctgagacacactttcgaaggttgcggagatgattccgcaccttgactaaagcacaattagccttgtcctgctatcattatggctgaagctctagttcgagatacaggtggacgcgctgttggtgatggattgttacgatcacaactagggccttccttttttgaacacttgagacatgagttaa

SEQ ID NO: 36766 - DNA, 521 bp, Oryza sativa
  Clone ID: PAT_MRT4530_4055C.1
gttgacctcgcagctttaatccccgcccccagcctctgtcccgtggactcgcagcagcacacggcatccgtagccgagggcggagcagggatcgacgagcggcgaggaggcgggcgagcggctggccggcatggaccggaatctgagcgggttcctgatcgggtgcgtcggcgccgccgtgacgctgctggcgtacgagcagacgctggtgtcgagcacgcagtgcatcgccgccggcttcgtcgtcctcctcttcgcgctcttcgtcaaggagggcttcatctcgctctgattttctgcgtgtcagcggcgacttggttggggggttccccttctctgcagctcgtttccgattctttgcttccgtttttctggacctcatgtcctgtagaagtgtagagtagccactagttggaaaaggaatagcttttgcagcaaaaactaatcctttccgactatgaatgccatcttggtgacttggtgatggttgggtcatgtaatcctgcaattgctgatgcttg

SEQ ID NO: 36767 - DNA, 144 bp, Oryza sativa
  unsure (1)..(144): unsure at all n locations
  Clone ID: PAT_MRT4530_40560C.1
cggatttacttaccagcactacaacacgcctctncgccattcattcaccngncaaacttctccncacccgcgcggggggttccacantacacctcccgacctccgtttcaaacttcaaccactacacacctctcccgacaagac

SEQ ID NO: 36768 - DNA, 4233 bp, Oryza sativa
  Clone ID: PAT_MRT4530_40561C.1
ttatccaacatttagttcaatgccaaccatccaagacctgagatattcatctctgatggcatgaatctctgatacagcatctgctaagagcactcggtctctgggttgttgctttgagcaggatatgccaagcctaagaacagccactaaacactgttgaataattcttctttttgtgcttgcatttgtcacatctgtctcatttgcttctggtgcaatatagccaatggagcctctgattccaattgagctttttgaattttgaagagttttagttgtgctgtttgggaggatttttgatatacctaaatctccaacttttgcactcttgtcttcattgggcatgaactcaaacaccagtgccttgaactcttgaccctgttggtcaatactcgaacaacaagtgatgatctttatgagacaacgatggcgtactcttctcaaagcctcacattcagcctcaaagctccttgaagatcctgacatttgaaggttgaacattttcacagccgtggttacacttgcaccctcatcttctaaagcacatctattaacagaaccataatcttcctttgccaagcaggttagcctatcaaggattgggcatggagccaagtgaagctgaggcattccgctgcacaacttgtcatccccagcaattgatgcataagtcaagttccttaaacctgcgatgctgccgatgcctggcgggatcatcccctccaggtggttgccgttgatggcaatgccgggaatgcggtcgccgagctggttgtattggaggtacacggttgtcaatctgacgcaggtggtgaggttggtggggaactcgccggagaaggcgttgtggtccatgtcgagcacccggagtcgccggagccggctgacgctctgggggatctcgctgtggagatcgttggagctcaggttgagccgccggaggaaggtgaggtttccgatggctggtgagagcgtgccggcgagatcgctggacggcaggtccagcgccaccacggacgtcggcctccgccggtgactgcacgtgacgccctcccagctgcagaagctgttggcgctgctgttccatgaccatgaagcggcgctgccaacccgggacttgaaatattcatctctgatcgcatggatctttgacacggcatctgctaacaccattcgctctctgggttgttgctttgagcaggatatgccgagcccaaagagagacaccaaactctgttgaataattcctcttgtcatgcttgcatctgtagcatctgtataatttgtttcatgcagccagattgtttgatcagctatttccagggctctgtcaggaaaagcagcggtagcaaattcgtgcagattaagcgaatccttgaacatgtcatcagtagggcttgttcccgtaaacatctcaagcaatattatgcctaagctgtaaatgtcacctagtttggaggcagcagaaccttcaccgtactctggagcaatatagccaatagaacctctgattccaattgagctttttgaatttagatgaattttagttatgcttttggggaggatttttgatatgccaaaatctccaaccttagcattcatgtcttctgcaaggagaatattgcttggcttcatatcacaatggatgattgatggctgacagtggttatggagataatccattgcttcaaagatatcaataacaatgttgagtctctgtgaaaagctgagtgtgttgctaggactgcatttgctcgatttgggatgaatccaaccatccaagctaccattaggcatgaactccaaaaccagtgccttgaactcctgaccctgtggatcaatactcgagcaacaagtgatgatctttatgaggcagcggtggcgtactcttctcaaagcctcacattcagcctcaaagctctttgaagatcctaattgttgaaggtcgaacacttttacggccactagtgcatcctcattgtctaaagtacatctataaacagaaccatatcttcctttgccgagcaggttggcttctgaaaaatcattacttcctcttgacaatgcataatatgaaaccctttgatactgttcctcaataaccagtgatgttgcttgtctgttttgtcttcgtttgagcttcctgttgtgtaacagaataagaacaataactgaaaccaacaccaacattgcacctgttgttggcagggctattgcaagagactttagatgctggttcttgttcttgcttacatcaagaatgggacatggaggcaagtgaagctggggtattccaccgcacaagttatcattccccacaaccgatgaaaaggtcaggtttctgaaaacacctttaactggtacttccccttgcaaattgttgaacgacacatctaattgcttcaatagtgtaaaattttgtagggctgctggtattggtcctgaaaaattgttatgtgctagacacaggtattgcagattgccaatgttactaatggcattggggatcctaccagataacttgttcacggttaggtttagtacgttgagccctttcagattggtcaaagattgaggcatgtctcctccgaatgagttattatctagcaagaggaattccaacacttcacaatttcctatactgtttggtatttggccagaaagctggtttcctgacagaattaactggtttaggttagctaaagtaccaacttctgatggaaggtgtccagagagggagttgtatgacaggtccaagatccaagctagagaaggcagctctagaatttccctgggaattgaaccgtttaggcgattgaatgacaaatccagattaaacagattttttagcctcccaatggttgctggaattggcccttccaaattggtgtggaatgcaagcagcctattcagtttggtaagatttccaatggttgacggtatgaggcctgacagaccagtgttgtatagggcaaggtcaaccaagtttgttagcttcccaatactttctggaattactccagatatgggattgaaccccaggtcgagtaatctcaagccaatcaaattgctaatgtcgtgagggatggtcccagagaagctgttattctctaaatcgagcatctgtaacgtcattgacagattcacaatcgatcttggcagctgcccaccaaagaagttgtgagagagcatcaattcttgcagctggctgcagtttgctagagaagttacaaattccgaaccctttccgttatctgcctcaagctggtttgttccgatgtatagatacttaagagaatgcaacatccccaaggtgggaggcacaaatccagtgaagttgttatctgcgaggtacaaatctgtgagccttgaaagattggacagagaagatggtatggccccatgaaaacgattctcatgcaatccaaagaagcgcatggcaggaaacttgtcaccaatgttggcaggaatgctcccttgtagcatgttgagccctactccgatcaccctcagtgccgacagattccatagagagtgggggaattcgccggtgagcatgtttgcttccaagctaagctcatgcagaactgggaagttgccgaggcatggtgggatcaggccctccaggtggttgtagtccaagtataggtcctggagcaatgataggttggctagcgagggcgggatcggtccgatgatgctattgttggtcagtagaagcatctgaagctgtgtcaacgtgtttcctagctccaccgggataatcccgcccagctggttatagtcgaggtccaggattttcagactgatgcaggaggtgaggttgacagggaacgcaccagagaaggagttgtagctcaggttgagccattgcaggcgtcggaggcgaccaatgctggtggggatctcgccgtagaggccgttggagctcaggtttagccttcgcgggaaggtgaggttcccgatggctggggagagcgtgccggcgagattgctggatggcaggctcagcgacgccacccgcgtcggcctccggcgactgcaggtgacgccctcccagttgcagaagctggcgccgctgctgttccatgaggcgagcgcgcttgaattactcccggtgagccccgccttgaaagcaagcagcgatgcctcatcgctgcttgacgcagcagcgatcgtcaggaggacggggaggaggggcagtccaagccgcctcatgagacgtatcgccat

SEQ ID NO: 36769 - DNA, 438 bp, Oryza sativa
  Clone ID: PAT_MRT4530_40562C.1
ttaacaatttttgtcggagatatgggcctgggggtatgtgaggtgaggggaatctaccttcccatcctgccacgtgtccctacagcctagtcctatccccgcattctgcgaatcgcaggagcggccgggatggcgaggggcctcggggtgccacgtcatgcccctcaggcccttgcgccgctttgcccagaggccctcgcctagccgccatttggcggggggagcaagcgaggagggggcccaggctgaaccccctttaatgcgcgcagccccccaactgccccctgtcgcatttaatgcagtggggtagacgtgcggcgtgtccgtctggcgcgtgatggttaagaatgaccggtctgtgaccggcctgacgccggtcatgtctgactggactgacaaccgtgctcccacgtcgcatctgctaccggcggagtggag

SEQ ID NO: 36770 - DNA, 253 bp, Oryza sativa
  Clone ID: PAT_MRT4530_40563C.1
ttcaccgcgtagatgatgcacgtcgcccatatcgggaacagccgcagcacgcctctcagctcctctcggtggtcgccgccgtcgtcatcgtccacgacggcaagagcgtcgtctttggatcctctgatgagcgcgacgaacgctctggcgaggcgagcgaaggggctggactgggtggagacgtagtagcggtagttccttgtcccgagcaagaacattgcgagggcgaacgccatgaccaggcatgggatgc

SEQ ID NO: 36771 - DNA, 722 bp, Oryza sativa
  Clone ID: PAT_MRT4530_40564C.1
tgcaggtagcgacttcaaatcgtgacattgcatgagcagtgggtgtgaattatttgtggtgcccatcacctccgtgattccgtcagagacgatctcagacgctcaggctcctgcgttgttgacggtgtcggcgccaaccaacaacttgggtaaatgtttgtttgggccagaaccattaataaaagggtcaccgtagtacaatcatcgacccctgcatccagatgcagcgacgcaaacggggctagcatatgcatttctatccattttttctgctgccattcatttccattgaatctggacgagagaatcatggcattcctgttactccgatacttcctccgtctggcgtttgtaagactatcatacgggtagttgtgtaaacaaactaacagaggtcttttgtacggctctttgtaaagaaaatggaatctgtgtgctcctattaaatatggctttatgagtctaagcacattgaagatcagctcctgtatttttatataactagcttcgtggctttctttagaaaaaaaaataaggtggagtttgtaaggaaggattttttactattatttttttagaaacatagtaaatagtaaaacgtagatgttcacaacatacacacactcatttttatgaatacacatgtacattgtatccttatggtcacctctgaatgactcactgagtcagtatatcttgatattaataaagttatcatagat

SEQ ID NO: 36772 - DNA, 194 bp, Oryza sativa
  Clone ID: PAT_MRT4530_40565C.1
acgggagctaataaacctgaccctcgacagagggatttcttgctagctggaaatacgagaaaccctcaagcctacagcgcgtgaagatgaagagcggccaacaaaacatatttaggggctttagcactgaactgcctagcgaggctttgtggataagcaaaccaagtgcaagggaactccaatgccaaaacgac

SEQ ID NO: 36773 - DNA, 264 bp, Oryza sativa
  Clone ID: PAT_MRT4530_40566C.1
gtaaggatcttggtctcttgtatgctcttctagtatggtgttcatacaccacgcagctcgtggtgcaaaccaaaccatgctatcttcttctaatgttgaggcctctgtgctcattcagttagttattaggttaaaattgcatgttgcattggcactttggcatgtgatgcagtgattatctggttgtcaatttctcttgaggcgtttgccctgagagcaaatgggaaatgtcactgcatactgctaaacaaaaaaaaaaaaaaa

SEQ ID NO: 36774 - DNA, 702 bp, Oryza sativa
  Clone ID: PAT_MRT4530_40567C.1
atggcagtgggctcagcgggctcggcgggcggcggcctgggcgcgatggcgacaacctcggcgcggacagagcgtgggcggcgccctggagcaagcacgacggcctcgacgcttgtggcgatggcagcgcgaggcgatgcaggtcgacgacggcgtgaagtgctcggcctcggcgcggtcgccgcctcctccagctcgtccgcctcccacgatgaccacgacaagcgcggagaagtgctcggccttggcgggctcgaggtcaccgccaccgccgccgccattcgtgatctcctccaccacggagccggacgagacgaggagcacatcctcttcttgcccttggccgagctgacctaccgccagctgcgccagcgcttccctcgccgcgcgccgtgcgccgcaccccgccattgccagcccgcccttgccgctttgtcgagagagaaaaaagaacgagagagaagagataagaaagcaagagaagaaacaagagaggctgacgatgtgagagaggagatggaaatagtgacggtttacacctctcctaacaacgagcgatttgattgcgagatgaaagcttttatcacacagagacagcatgtttgttcgtgggaataccatttcagcccagaaaacaacggtgcccgggaatctcattcttccggccaggacgagatgcaaatccaatgcagtactgctgag

SEQ ID NO: 36775 - DNA, 428 bp, Oryza sativa
  Clone ID: PAT_MRT4530_40568C.1
gggccattaaaaagggggattttttttaaatttttttgaccccaaggtccaaccgccccccctgatgatgcctgaccttttttttaacattggaaccctttttccttttcaattcaggccccgaccccccccacggggggattgccccccggagccatggtgttgtttggatagaccccccctttggggggcaagttttaggcccccaaagcctgagcctgaccccgagcccgatcaaaggaaaccacccccccccgccgcaactgttgttgccgcccaatcccccgaacccctctttaggcccggttgggaaattgttgccccccccccccgagccgggggcaaccccggggccgcatgaccgggggggttttcaattgaaacccacccgggtgcccaaaggggggggcccctttgctttgccgggg

SEQ ID NO: 36776 - DNA, 1275 bp, Oryza sativa
  Clone ID: PAT_MRT4530_40569C.1
atggcggggtgcggcgcacggcgcgcggcgagggaagcgctggcgcagctggcggtaggtcagctcggccaagggcaagaagaggatgtgctgggcagggagaaggaggggaaagacggagaaaggaagaaaaagaagaaggggaggagaacctcgacggcatgcagcgccgagaggctgagccatgtcaagagctcaactcgcacctcctcgtctcgtccggctccgtggtggaggagatcacgaatggcggcggcggtggcggtgacctcgagcccgccaaggccgagcacttctccgcgcttgtcgtggtcatcgtgggaggcggacgagctggaggaggcggcgaccgcgccgaggccgagcacttcacgccgtcgtcgacctgcatcgcctcgcgctgccatcgccacaagcgtcgaggccgtcgtgcttgctccagggcgccgcccacgctctgtccgcgccgaggttgtcgccatcgcgcccaggccgccgcccgccgagcccgctgagcccactgccatcgcacccaggccaccacctgccgagtccgtgccgaagccgccgcccgctgtcgcggctcgccttctccccgcccgcgcacagcggggtgatgtattagtgttctgcatcgggaagggtcgaagggatgatgctggtgctactgagaaatgggtgcagccaagacagcagcttgacaagcttctccaggctccagcgcgtcgttctcgacgtggtaggggccgttgtgctggcatatatccatcgccttcgctggagcatggtacctctgaggaggaactctggcgacggtgcagccagcgtagggctgtacagcggtgtcgctggcagtggcgccgtcgttgtgacgtcgtcctcctcgtttggcgaagccagagggaggagactaggggccacggccggcaatgccagcaccacagcccctgccgcgtgagaatggcgcgccagagcccggagaagcttatcgagctgctacatgaggcgacggagatggcccgcacgaagattgagaggaagagaagatccgacatcgagaggaatggggcgagccatcttacccttcacggtgccggtgagttcttcaccgttcttgctcggttagagcgtgctgatggcgtgttagataacaactccatgctcggcggcctgtgcatacagttatttgtggtcgcccggtccatccccaatgagctctgtaagctgttctcccaatgggacaaacctgtcttggctgcacccatttctcagtag

SEQ ID NO: 36777 - DNA, 506 bp, Oryza sativa
  Clone ID: PAT_MRT4530_4056C.1
tcgtgataagcgactcacagaaaatgttgaataccttgttgagctcaaatgattgttttccagtgaaggggcttctgaacatgacaaatttgggacatcttgttcaacttctgaaaggaacgaacttctatccaactgcctctgtgtgtaatacactccaaaggatgaacatttcggtattgatcctctggaagccacggccggatataaacctgaaattgtatgcaacagtggtggtccagtggaatcagtcctaaatgacgagaccgggtttctctgagagccctctgcccctgaattttcaaaagccatgctgaagctcgcgaacgatcacgatctagctgtcaatatggtgtaaacatgcaaggcgccatgttgtgcagaagttctcaaccaagacattcggtgaccttttgaacagctatgtgcttaatgcgtaccatcagaggattgagcgatcccccaattcggtggatgtaattgcctcggatccactggaatagaac

SEQ ID NO: 36778 - DNA, 234 bp, Oryza sativa
  Clone ID: PAT_MRT4530_40570C.1
atggcggcggttggggatggagctagaggtgataaaccaccaaagttgggaggaaatttagacttaagtgaagaagaattctatccatacaagagctgggctcctaaactccatcaaaacatcagaacatgggcccaactaccgaataaatggataaggcagagcagcgaggaggcccagaccaaatctgggggcccagcccaggttcggctgaaccctggtgatcaccgttga

SEQ ID NO: 36779 - DNA, 249 bp, Oryza sativa
  Clone ID: PAT_MRT4530_40571C.1
atgtggtggtgtggtctgcagctgcttgtcgtcgtgtcgtcgctggcagggggcggagaagccatggcccccaattgggactttgggagcatcatatggcactttgcgatttgcgacgaacgtcggcgatggatgatggggcgatccaattggccatgcttgcgagcagatgggttgtttctccgtggagttgtagtggtggctttcttccctactgcatcggtgatcaatcattggggaatggaatag

SEQ ID NO: 36780 - DNA, 396 bp, Oryza sativa
  Clone ID: PAT_MRT4530_40572C.1
atggccgcggggccctcgctgatggtggctatggccagggagatgtcggcggtagcctcggtgtcgggggtgcccgccggggcctcctcctcctcctcctccggctcctcgctcggtcaccgaacccacatggctgtgccgtcgcggccgtgggagtcccaccaaacggcgtcgagggcgggctaccgggaaaggagggccgtgcggctggcggcggcatcgccatccgtgaaggcctcgcggctcgcccggcggcgccgtggggccgcgggagatctagagagcagcgcgacgacggtgacccctgtgagcgtggcgaggatggtgccgtcctcgaactccatcccgaagagctgcagcggttgtcccgctgccgacatgggccgcgcgaagtag

SEQ ID NO: 36781 - DNA, 133 bp, Oryza sativa
  unsure (1)..(133): unsure at all n locations
  Clone ID: PAT_MRT4530_40573C.1
atgaaacttgaaacactatgtaacacccgtagtaatttatactgggattcatcataagccttaancatcatactataatatagataccggctcgacactaaatataaccaaatacacgatgagaactatcacc

SEQ ID NO: 36782 - DNA, 566 bp, Oryza sativa
  unsure (1)..(566): unsure at all n locations
  Clone ID: PAT_MRT4530_40574C.1
ntgtaaaacgacggccngtgagcgcgcgtaatacgactcactatagggcgaattgggtaccgggccccccctcgaggtcgacccacgcgtccgagatgatcggatcacgatgatgggttgtgggcttctcccgcgcaattcgatccggggaatcgcaaccaacttcaccaacgtggtgaacacgcgcgagacagcgtgaaataaaggagccagcgtggatgagggccggtgcgtctggtttagtccaaatcccacagcctggtgttatatgaaaattagtttgttatcctccggtgtaaagtgaaagtatccgtcgaacccggtgtaaagtgaaaacagtgtcaatctacccggtgcaaagtgcaatttactcttaaaattacagttttcttattctctaaatttatcacaaatgtactgtaatttttgttttcaatggaatgcaactgaattaagattgtcgacatgctttttctttttgattgttgacaggctttgttttgtttatttgagctaaacctgcngatatttcttgnnntaaaaaaaaaaaaaaaaaaaaaaaaaaa

SEQ ID NO: 36783 - DNA, 237 bp, Oryza sativa
  Clone ID: PAT_MRT4530_40575C.1
atgggggttaagattttccttcttttacagaaaatgaggaagaggaaagaagaaatcagtaggagagtcgccagaatctcgacatataaagagaagatcaacaagattcctgataaaaaatcttttacactgcaaatggattatataaactttggtagtatcttgtatgcttctgttattgttacggcatacatccttgaaaggaaagacgaacttgcaagacaaaaaaaattgtga

SEQ ID NO: 36784 - DNA, 477 bp, Oryza sativa
  Clone ID: PAT_MRT4530_40576C.1
gcacgcacagaatgagtgatgatcattatatgatggatgtgcacagcaacttgtttgtactagatgatagatacacacgcacactattagctgtagtagctgatatgccatcaatcaataccaccttacatactgttttctctatgcactataaatgcgaaggggacactcgaacatgagtcatcacaatgcttcaacaggtagcaagccaccgggcctgatcatagcttgcattgatggatcccgtccgcggcctgacacaaacacctatagaggagattgtgcaccttcaagcacagggactgagcctctaattcgagtgacattccacttaattgccttctcatgtgccaaaccatcggcttgaaatgctgacactgcataatgtgacaatacttcagaccactggaaactgtataatgcacctgcatagacttctgcacttatatagctaaagctgcacaagtatgtattctg

SEQ ID NO: 36785 - DNA, 1471 bp, Oryza sativa
  Clone ID: PAT_MRT4530_40577C.1
gtcatcgtcgccgtcatacacgccagcccgcttgctcacgctgtcgtcacccgcgccgacagcaccgacgtcgtcgtggacgccgacgggccacgctggcgcctggcagcggagttggtgtttgagtgcaagacgtgcaacaagaggttcccgtcgttccaggcactgggtgggtacatgacgagccacacgcggctacaggcgaagctgctgagcgaccccgccgctgcggcggccgagaaggacagggcacacgtccacgagtgcgccgtgtgcggggtcgagttctccaccatcaccgctctcactgtcattctatggtctggagagcacgaggaagagagggagaggtggaggaggaggaggctggtggaagaagatgaatccctgatagtaataatattgtacctcccgccttcacctgatcctgtttcccaatcccaattcgaattcgaccaactaaagcttgacgatcatccgccgccaccgcagctgcaccgccgcaggacgaagcggtgcgccgagcacctcaggtgggcggcttccttcgcctttaaacacaatgccaccctcttgctcaccgtcgatcgcaaccaggccgccggttgcgccaacttcaccaggggatcctccagaaggcggtcgacatgcgggcatgcccgactgcgccgccacacgcacgctcatcgccgtggacgccggcatctacagggagaaggtggtggtgtggtccaacaagacggccctcacgctgcacggccgcggcaacctcaacaccaccgtcgcctggaacgccacctccaactccaccggcggcagcaccgtgtacagcgccaccttcaccgtcctcgcccccgccttcgtcgcctacaacatcaccttccagaacacgtcgcccccgcccgagcccggggacgcaggggggcaggcggtggctctgagggtggccggcgacgaggcggcgttccactggtgcggggtgtacagcgcgcaggacacgctgctggacgagtccgggcggcacctgttccgcggctgctacatcaagggctccatcgacttcatcttgggcaacgcacgatccctctacgggagggcgtcgtcgccggagagaacggggttcgcgttcgtgcggtacagcgtggtgggaacgggacaggtgtggctggggagggcgtggggcccgtacgcgacggtggtgttcgcgaaaacgtacctcgtcaacgtggtgtcggcggaggggtggaacgactggggcgaccccggcaggcggcagcaggtgtggttcgcggagtacgcgtgctggggccccggatccgccaccgccgccaccggcagggtgtcctacgcgcggcagcttgaccagcgccaggccgcgcccttcatggacgtctcctacatcgacgccaaccagtgggcgctgccaccgtcgacgccggaactctacggatcgagatatactcccagctag

SEQ ID NO: 36786 - DNA, 582 bp, Oryza sativa
  unsure (1)..(582): unsure at all n locations
  Clone ID: PAT_MRT4530_40578C.1
gcgccggatttcgacggatcggggctcccgccgtgccgcgatntccccacccattgagntacccaaactcttcacgttcggcaatttctccgacgcagtccatgggaaagaggaaacgacatgtggggaggaagcggactggatgaggcgaagcagaaagtggaggcggtgaggacagaagaagatgagggattgagcggactgccgcgccgctcccgccgcccgccgtggccgctcccggcccctcccaagcgcgccgccgctggatctgggaagaggagggcgccggccgtcgagcccgccgttgccgcgccgctcccgcccaccgctgtggccgctgcagacgtcgaccggcccctcccgagcgcgccgcgccgctcccgccctcgccgtcgtcagtaccacgtagaatattacaaaaatattttcggcaaaactgcactcaacgaggaggagcaccacggtgctccggtgacgctcccgatgatgacggagccgcacagcggcggtggaggcggagattggagtcgcgaggactgcggtatagactcaagtgggaaggttggaggcctgttcggttag

SEQ ID NO: 36787 - DNA, 258 bp, Oryza sativa
  Clone ID: PAT_MRT4530_40579C.1
atggtgggttgtgagcacatggttttgatggtcatgctcatgacaattaaggaccggttcacgagtttcggttgtgaaacattaaccgtgccaaccacatgcccgcatgggcaacggttttaccttttgtatagcatggttcattgcggggcaccagactgagaagtggcggagataagcccacgggggtcgctggggagtccatgccttgtttataagggggtgattatgatcaaggaatggtgcgttgtggtggat

SEQ ID NO: 36788 - DNA, 503 bp, Oryza sativa
  Clone ID: PAT_MRT4530_4057C.1
cccacgcgtccgcgatgctgaaaaggatgataaaagaaaggatcccattcaaaatgcaaaccccgaacagaccctaacagatgctggtgatgatggtaaaactgaagatgccgagcacaacgccaacaccgaagctgatgttgattcttgtgccgatggtactgctgagaattagaggaccaactgcaaacggaacagagatggattagctcaagtagcacagatatgcagctttatgttggaaactaccactgatggtgttctaacttgagtaggattagcttgtgcagggtccatgtagaagtcttgctgtagtagatagtagaaatgttcaaactgccatgtaaattatcttagcttgaaggagatgtatattatgtagcagtgcagtgcagaccctggatgctggagcagttcattccagtcgtatttataactgatgttcaaaggttttgtatcaaagcttaaacttcaaatcctacttagcagaagagaagtgctat

SEQ ID NO: 36789 - DNA, 865 bp, Oryza sativa
  Clone ID: PAT_MRT4530_40580C.1
agacattaaaggagcaaacatacttgtgggccctaatggtgaagtcaaacttgcggactttggcatggctaaacatgtgacatctttcgccgaaatacgctctttcagaggaagcccatactggatggctcctgaggttgtaatgaataacaaaggatataatcttgcggttgatatatggagccttggatgtacaattattgagatggcaaccgcgaagcatccctggtatccgtatgaagatgtggcagcaatatttaaaattgcaaacagtaaagatataccagaaattccagattgtttttccaaagaagggaaagatttcctaagtttgtgcttaaagcgtgatccagtacagaggccttctgcagcttcgttgctgggtcacccttttgtccatgaccatcaggctgtaagagcaccaacatgcaatgccaaacagagaatcctcgtcaaggagaaacattgctcctctgcatggtatcgcaggactaagcgcaagggaattcgctggattttccacagcctatccttctcctcacaatacctccagcagcccaactgcagtgagagcaaacatgtctttaccggtgtcgccatgctcaagcccgctgcggcagttcaagcaatcaaactggagctgcctcccttcaccaacgcatccggcgctctcccctggattatcagcagcagcctacccaaacaatcccttgcagaaccagtcgaggcgaagcgccgcagttccagatccctggctggagttgagccagccgagacctccaagcccatatggctctccaaagagattctaggccttctgacctgcagagtttcttgtagcatggctcccccaaagagattctag

SEQ ID NO: 36790 - DNA, 2701 bp, Oryza sativa
  Clone ID: PAT_MRT4530_40581C.1
gattgcaaccgcgtccggaccacgcaaaaaaaaagaaaaaaatctaactgaaaaaaaagaaagcggccttctcctatgcctccacctcacgcgcgcttcgcctcgccgcgcctcgtctcgtgcggctgcggcggcggcggctgctgctgctgctccggcggcggaggaggggggaaaggctcgttcgggaatagggaggaacgagcggaggggatgccgctggggtggctgcggaggaagtggaggcggaggcgcgacaagcccgcgggggacgccgccgccgcctctaccacggcgacctcgccgagggactccgtcgacctggggggaacgtccgcgtacccgtccgcctgcgcgtctccatcctccaccacgccgacgccgacgcggtggggcgccggcgccagcgccgtgcccccgcgatgcccggggccacaggaccagcaccacgggctgccgctcccgcggccggtgtccaagtcggcgccgatgcccctggcgtcccccgccgcggcgccgccgtcgccgtcgccgccggcgtgcgcgtcggcggccgagtcggtctcgggcgggagctcgtcggacgacgaggcggatcaccggaattacaggtatacagatccagttgtccacactagcggaaggactgtgctacctgatggtcataatggcatggtagaagagaagcgttttgtatcatgtggtattctccaggagcatcaaaaattctttgaggttcctattgcaaatgtgaacgaagttcatcacatgcaaatatttgaaccttcaacaagcgaatctagttattctcggggcagaatgttgcctgaggatacatttgctgtaagaccaagaagtcattaccctggtccgagagggcatgcttattctgcttgttgtgcaagagattttgggtttaccccaaggtcaccagtgaaaaggatggatgatcctaggagtccatctcaacccttgcctctccctccagttcctgttgctagctcatccattccttcatcttccattacttctagtcaattccaatcacagtggaaaagggggaagctattaggtagcggcacatttggtcaggtttatcttggtttcaacagtgaaaatgggcagttttgtgcaatcaaggaggtgcaggtttttttggacgattcacattcaaaggaacgccttaggcaattgaatcaggaaatagatatgcttaagcagctctcgcaccaaaatatcgtgcaatattatggaagtgaactgttctcattaagctttggcttgcctaatttaaacaattttgagcaggctgatgaagctctgtccatctatctggaatatgtttctggaggttcaattcataaattacttagagagtacggtccatttaaggaacctgtgattcgtaattatactcggcagattctttcagggcttgcctacttgcatggtaggaatactgtacacagagacattaaaggagcaaacatacttgtgggccctaatggtgaagtcaaacttgcggactttggcatggctaaacatgtgacatctttcgccgaaatacgctctttcagaggaagcccatactggatggctcctgaggttgtaatgaataacaaaggatataatcttgcggttgatatatggagccttggatgtacaattattgagatggcaaccgcgaagcatccctggtatccgtatgaagatgtggcagcaatatttaaaattgcaaacagtaaagatataccagaaattccagattgtttttccaaagaagggaaagatttcctaagtttgtgcttaaagcgtgatccagtacagaggccttctgcagcttcgttgctgggtcacccttttgtccatgaccatcaggctgtaagagcaccaacatgcaatggtactcagttgagaaatggaatttcttcccctgcagcaagtcatagaaagccaaacagagaatcctcgtcaaggagaaacattgctcctctgcatggtatcgcaggactaagcgcaagggaattcgctggattttccacctacttctcaacatggccgtgcacgtgcagcagcccaactgcagtgagagcaaacatgtctttaccggtgtcgccatgctcaagcccgctgcggcagttcaagcaatcaaactggagctgcctcccttcaccaacgcatccggcgctctcccctggattatcagcagcagcctacccaaacaatcccttgcagaaccagtcgaggcgaagcgccgcagttccagatccctggctggagttgagccagccgagacctccaagcccatatggctctccaaagagattctagggccttctgacctgcagagtttcttgtagcatggctcctcaaaagagattctaggccgtctgatctgatctgtgcagagttgttgtagatgatatgtgttgatatctgacacaagatagagagggagtcgcatatgttttttgttgacagatcatttgtaactatatatggcttactctgatctgattcatcattcattgtataccataggaaaaaggagggcattaggatgatctctgatgttctgtaaatctgtaggactagaaatgtggagtggaggctttggaccagtttcagaacttgtaaatttttagaaaatggaataaaatatcccggccgctacacacccgaaaaaaaaaaaaaaaaaaaa

SEQ ID NO: 36791 - DNA, 126 bp, Oryza sativa
  Clone ID: PAT_MRT4530_40582C.1
ctgcaggctgtgcttcgcttcgctttcctccatctgcttcgaacctgccattattgattcttcatcctgcattagcttaaacaagatgtactggggtaaatgacaccattagtagtatgcactact

SEQ ID NO: 36792 - DNA, 1226 bp, Oryza sativa
  Clone ID: PAT_MRT4530_40583C.1
tacccgcgggaatcgttcgatcgatcgggcgagatggggaggggaagagttgagctgaagcgcatcgagaacaagatcaacaggcaggtcaccttctccaagcgccgcaacggcctcctcaagaaggcctacgagctgtccgttctctgcgacgccgaggtcgcgctcatcatcttctccagccgcggcaagctctacgagttcggcagcgccggcataacaaagactttagaaaggtaccaacattgttgctacaatgctcaagattccaacaatgcactttctgaaactcagagttggtaccatgaaatgtcaaagttgaaagcaaaatttgaagctttgcagcgcactcaaaggcacttgcttggggaggatcttggaccactcagcgtcaaagaattgcagcagctggagaaacagcttgaatgtgcactatcacaggcgagacagagaaagacgcaactgatgatggaacaggtggaggaacttcgcagaaaggagcgtcagctgggtgaaattaataggcaactcaagcacaagctcgaggttgaaggttccaccagcaactacagagccatgcagcaagcctcctgggctcagggcgccgtggtggagaatggcgccgcatacgtgcagccgccgccacactccgcggccatggactctgaacccaccttgcaaattgggtatcctcatcaatttgtgcctgctgaagcaaacactattcagaggagcactgcccctgcaggtgcagagaacaacttcatgctgggatgggttctttgagctaagcagccatcgatcagctgtcagaagttggagctaataataaaagggatgtggagtgggctacatgtatctcggatctctctgcgagccacctaatggtcttgcgtggccctttaatctgtatgtttttgtgtgtaagctactgctagctgtttgcaccttctgcgtccgtggttgtgtttccgtgctacctttttatgttttgatttggatcttgtttgaaaataatcttaccagctttgggtaaactgtttattacgtactctatatagcatatgtgaccaacgacaacggtttcattttagatgatgtgtatggatgatttctttccaaaatcacatctttagtataagagcaattttaccatccaaaaaaaaaaaaaaaaaaaaaaaacctgcagcccggggatccactagtttagagcgccgccaccgcgg

SEQ ID NO: 36793 - DNA, 490 bp, Oryza sativa
  Clone ID: PAT_MRT4530_40584C.1
gaaaaaaaaaacccctgtttttaaaagggccaaaacccccaaattggcttcggggcataaaaaaacccccattgggggggggggggtttccccgggggggggattgtttccaaaaaattaaaaaacccttggtacaaaagcggggttgttaaaagggttaactcccaaaatcccgccaaaatggtggggaattttttattggggggaaaaattttttagtttgggtatcccccccacacaccctttggtttggttgggcaccatgaaaacccccctttaattggggggcggaaaaaaaaacccttttttttccaggaacttaaaaaggcccttttgcaaattaaccggggggttgggaaattaagggcccctcgaagggaaattttcatttcctttgggggggggatttcccactataaaaaggggggggggggggaatccctcacaaaagggggggggggggaaactaagttggggcccaaaacccttg

SEQ ID NO: 36794 - DNA, 399 bp, Oryza sativa
  unsure (1)..(399): unsure at all n locations
  Clone ID: PAT_MRT4530_40585C.1
ttccngggctgcngattcggcacgagganaattgatccgcgatggatccggcggntcatcttcancacggngggctccggcgccgggcanatgctcttcttggactgcggcgcttgcggcngcggcntccgcggcggggccatnttccatcnangggcganaccggtgctcggcatggaagaanganggngcggcgtcnaacgggccttcttcaccacccccgacganctcctcnaagangantnctacgacgancagctcccgganaaaaaacggcgcctcacgccggancangtngatactccanctagctanctaanctgtnaagatcggcggngcgcggtgctctgttcccnaattgtgacntnacnactggatctatcggcgtcngcgtntntt

SEQ ID NO: 36795 - DNA, 474 bp, Oryza sativa
  Clone ID: PAT_MRT4530_40586C.1
atggacagcgaaagcattggctggtttcgtgtgccgtcctctgctgatggtggcggatcgatgggtgtctccgtctggaccgtctccattggttccctcggaggagcaaagggatccagcggaaacctgctcgccatccgccaccgccgccccatccccattcgccgctcgccatccgccgccgccactgcttgggctgacctcggagacgacggtagtggacggcaacctcggctggcgacggatctggcgatgacgatggcgacgccagccaacgaccacctcggagacgacggttggcgaggcgccgacgacggctggcaacggcgcaacgacgccctcgaggatctggcgacggcgcgacgacggcggcgcccaacaacagcagatctggtgacggcgactgcgccgacggcggcggcgtccggcaacgacgacctcaactgcagcaatggcatctcgacgacgtggtag

SEQ ID NO: 36796 - DNA, 622 bp, Oryza sativa
  unsure (1)..(622): unsure at all n locations
  Clone ID: PAT_MRT4530_40587C.1
gcacgagggagacaagtattttggattatcatcaactggaataacgcacaaatcgagcgcagcatcattaggcagtggcagctactcatctggtacccactatcggaccacaggacgttcaacggaggtgggatcattcaaggatatacacacaggcacagaatgtataaagaacaagaaggaaacagtgtcaaactacagcagcaatagagaagggtctaaagaaattactaacagtgcaaccagttataagtcaaaaaagagtgaaaggcatggtagaagaaatcaaaattccttaacattacactcgaagttatctgcaaatattagcaccacatctgaagccccaagctcaaagaaaggggaaaatgaggatgatgataatttcaacccacgaggattttctacatctactgcaacaggtaccacaagatctaatcacctggatctctttggtccaagcttgatggatgatcttgttgattctactacatccacttcaacagcaacgccnaatgttagcacacctgctgtgccagaggttgatttatttgcagatgcagctttccaatcagccaatgctccattggaggcagcaacggtttctcacactcaggacaaa

SEQ ID NO: 36797 - DNA, 430 bp, Oryza sativa
  Clone ID: PAT_MRT4530_40588C.1
tttgtttttttaattattttttgtttttttttttttttttttttttttttttttttttttttttttttttttttttttttttttttttttttttttttttttttgtaaaaaaccaacatttcaaaaaagggggccaaaacaggcccccccagacattaacaaaaaaaggggttgggcgccccccccaacctgaaaaaaaaaccaaaaaacaatttacaacaaacgtaagggggacaaaaaaaaaaacctaccccccggggagatagtatgaagtggggaaaaaaaaacaccgttaattaccggcaaaaaaaaggggcctgccctttttaaggggaaacctggggccaccggaaaggggcaattaaaaaaggaaggggaagccttttccgcggggccggcaaccgcaaaaaaaagccccgagaaggtaggg

SEQ ID NO: 36798 - DNA, 417 bp, Oryza sativa
  Clone ID: PAT_MRT4530_40589C.1
atgtggagtacccgctggttgtttctcttggcctgggtgaacatctcccccttgctggcgaaggcactgcccggcgtccggcggcgaggcccggagcttcatcgtggcctttatgctccacgcctcagcctcaccgagaccacggcttgccgctgccaccaggagagggaaagggaggcgcgtacgcacatgagggggctgatgaagacgatggcgatggctggttctcccgtcttcgctgcgtgcgagatgggggagcacacggacgaggttgagggtgggaagcccccccataaaaaaaggtcggccaccaccatgaaccgtcatggtgtcatcatcctcctccctggtgcgcatcgctcgccgaccaccgctgtcaaccgtcggggtgcatcgtcctcctgcatggaaaaatag

SEQ ID NO: 36799 - DNA, 600 bp, Oryza sativa
  Clone ID: PAT_MRT4530_4058C.1
atgctcctccgtggcattcggctccccagcgaatattcggtgccatgtccgcttgcatcgtgccctcctgaagtctgcgtgaccaaacatggtcatgcgttcctcaatccaatccagggcaagtggcagaggggcgtcggcgtggacatggctgacagcgagaggggcgtcaatcaggctcatcatgtaactcccatggataaaatcactagtgctcctgatgagtctgcatccgaagcagagcagaaggcctggtggctggtgggactgtgggagcgttcgctcaatcaacaagagacgccgccgcacgcgcgacggtttgttttcccttttttcatatcgatcgcccgtctactcgtcgtctcgtctgccgtcggcggctgcctcgtcgctggttgctcactcgctgctctcgcccaggcgcaacattacccgctcgacgactcatttcgttgttgttggctgcccgaaaggccctgccggtgtgctgcacctgctgcatctctgcaccacggcaccaagccggccaccaacataccagcgatccagcattccagcaagcacaagctgcacaatacagctgcacgcctcatctggtga

SEQ ID NO: 36800 - DNA, 137 bp, Oryza sativa
  Clone ID: PAT_MRT4530_40590C.1
gaatgagaagagatgggcaaatagtatgaatcctagaaggagatacaagaatgtaccagagggtacattctacggacgctatatgcgaaaaagcacaacaagaagtggtggacgtgaaccaagtgggtagccacacg

SEQ ID NO: 36801 - DNA, 693 bp, Oryza sativa
  Clone ID: PAT_MRT4530_40591C.1
atggaatcacggaaggatgtagtggcgcggtatagagatgagctcggcaatacccataaggccatccatctcaatgtcgtcgccgtggtaaatgatgtggagtacccgctggttgtttctcttggcctgggtgaacatctcccccttgctggcgaaggcactgcccggcgtccggcggcgaggcccggagcttcatcgtggcctttatgctccacgcctcacctcaccggttcaggcagcagcactgcagtgcagtccatccaagaaacgtacagcgacaaaccgacggagaagcgaactccgctggctagagaccatcccctcttgcatccgtcgattgagcatgtctctactcactatccagagaccacggcttgccgctgccaccaggagagggaaagggaggcgcgtacgcacatgagggggctgatgaagacgatggcgatggctggttctcccgtcttcgctgcgtgcgagatgggggagcacacggacgaggttgagggtgggaagcccccccataaaaaaaggtcggccaccaccatgaaccgtcatggtgtcatcatcctcctccctggtgcgcatcgctcgccgaccaccgctgtcaaccgtcggggtgcatcgtcctcctgcatggtgcgttaccgatttatgggttgggacggtggatcgattcagatcccaaaaaaataa

SEQ ID NO: 36802 - DNA, 1368 bp, Oryza sativa
  Clone ID: PAT_MRT4530_40592C.1
atgacccccacactcttggatatcactatgataactggccttgatataacctcatcggctaatccagtcagcttgaacaccaagaacaaattcgacttcaaaaccaagagcataggtggctggtctggatttgtctcaatgaacatgggtgatgggtctgtaagcctgacggatcacacagctttccttcttatgtggttagaaaaatttctattctgtggtgcaaggtgcggccctactgcaaactggcaacatctagccgaaaaactggttgagaaaaagcaattccccttagggaaatatctcctcggctatctttaccaaaccctaagcaatgcatcagctaagattgcttatgggacagtaatcggcacatgtggtccatggtggctacttcagatctggctcaacttgattaccaaggaagttgtcgatcgaccatctttaacagaagaagacttcccaaggtttgagctgatcacggatgaggatggtgaagaagtcacccaccgccgatgcatgtcctttggagaggcagcatcaaggaacaccggggccaagctatctgctgaactgctcaaggactgcttttgcaacttttatgatggtttcccgaagaacgctagagtctggttcgcatatgctgattcggctagctttcaacttccttcggattttagatttgatgagatcaactctgagaagtttgagaaatccagaaaagtctttactatagccatcaccccctgcatacttctagtcggcatccatcagggcaaaaacatccagatatcttatgagttttatcacccaatgagtgctgcaaagcaacttggattgggacaactgtcgattgggttgtactttgccgacaggatccaaagtaggggagaaattacattggctctgatgatggatcggctactaaacattgaaggaccttcacttggcagtatagagaacatcgaacaagccttgttcgggagcaaatcttttgaccaatggtgggtcgaatggaagaaacacctctttcatcagacaacttcgatgtatatgactgatctattctctgatctgatccctcaaaccacagagacttctccccctcatcaaagtgagagtggtcgggagatcgattatgcagcaagcctccttccaaacggtggtagattagcttcccctatcatcggcttccatgcccctaagacagcaagccttctccaagggcagatgagagagccaatcccagctgatgctggaaagaaaaggaaaaccaaagcatcggttgcggatccatcggctgcagaaaaagaagtccaggaagcaaaagataaagtgtcacgtcctgataaattcatcccgaaataa

SEQ ID NO: 36803 - DNA, 1422 bp, Oryza sativa
  Clone ID: PAT_MRT4530_40593C.1
gtggatccccgggctgcaggaatcgcggacggcaccacccaacacaagctcagccagtttaccactcacactagctgagctagaactcaccactcactgcagttgcagcatggcgcctttgctgttcaaggacatgaagagcctctcgtgctcgtcgccggcgtccacggcgatatgcccgagcttggagcggcagccgatggtccggccacacaagggcggcgccattgctgcgagccctctctgccaggtccccggtgagccaagaacggttcacaggcaagactgcaggagagggcagcagcatcagcacaaggcggctgccgcgaatggcggcgagctcgtcagccccgccggctcatccaggtacctgctcagcagccgcgccgccgccgccgaggagatccaggaggtggaggcttcggctgctccggccgtcgatgccaaggtggtcagggaagagcaagctggtagtgatgtgaagaacactctgacgcaggagcaggtggttgtactgaaggtatcactgcactgcaaagcgtgcgcgggcaaagtgaagaagcacctcgccaagatggaaggagtgacatctttcaacatagacttcgcggcgaagaaggtgacggtggtcggcgacgtgacgccgctgggggtgctgaacagcgtgtccaaggtgaagaacgcccagttctgggcggcgccgccggcgatagccgcctgatgagagatgaaaacgcataggatcctctctggttaattaggtgcggaagcatgtgggtcactgatgctggaccagctcgctctgctgtctgtgtgatggtggtggtggtgtctcctagatcgatgagagcatgcgtgtgtgtgcgcgtcgtcctgactgatcctgaagcaaagcatgcagatgcagctttgcttcttactgtgatccttttggtttcttgtggttggcaccatgctgagctacatgcccgtcactgtgcttcttcttccgtagactgatgagagtgtttgtgactatatatctgctctaagtgtaagtggtggtgttgttcttttgcatgctcttactgtaatataaacgtttcactgcaagtctgcaatactgcattattgttgtgtcgtactgcaactgtaggtggtgatcgcgtaggttgaggtgcgcgcgggggcccctgccttcaaaacaccatacttttatcgctgaaaggtgaacctatgattcatcaagttcatatgtcagtgataaagacatgtacatttgaaggtagaggaacatgatccgttgtggtggtgagtaaacagcagcatcagcctaatttgcttgcaaggtcaataacattttttagatcaataacatgtagtagcagaactctcaaatggaaaataatgatttatccctagtacaataaaaaaaaaaaaaaa

SEQ ID NO: 36804 - DNA, 795 bp, Oryza sativa
  Clone ID: PAT_MRT4530_40594C.1
atggcgcttcgtgctctcgcctccaagctgaggatcccggcggccgctccccgctggactcctccgccgtctcgccccgtctccaccgctcctaaggaaatgctactcttggaacggattcgtgcacatcaagacaggtttgcgcggaacatgatgatttctcaagcaattgcccccttgctgtctctctcgtgcgcgtactcggacgaccagcggcggagctcgctcgcgcagctgggggcggaggtggaggcggagaagagccggttcccccaaatccagccgctgccgccctcttctcccctttggccgcccgcggaggaggcagccggagctcgtggtggactgtggaggaggagaaccccgtcgcggcaggaggagctcccactaggtggaggcccagccgccgccggggaggaacgaggccggaggcagatgtggaggcggcggcttgcggcccgggacgacgaagaggaagccgaggaggcgcggaagcgacgtgtggtggcgagcgtggcacgcaccagcgcggcgggggaagaggcggacgaggtcgtcgcggagcgcctcgatgccgcacgtcaccgaccctcgcgcgccgaccgcccgtgcagctcgacctgtgcccgtgcggccgccacctcgacgccgcccatcgccggccctcgcgcgccgctcgatctgcgtccacgcgcgccgacccctgcgccgttcgagctgagaccgtgcggccgccaactcgacaccgcccgtcgccagccctcgcgcgccgaccgtccgcgcggccgcgcctaa

SEQ ID NO: 36805 - DNA, 515 bp, Oryza sativa
  Clone ID: PAT_MRT4530_40595C.1
atctctgaggagaacccacgctgagatgactgaggaaaaccactgagatgactgaggaaccccacaggagcttcccaaggctgaagagaaggaaggagaattgttgggaaagagaacccctaatgaggagcaacgtgaggctgaagatagagaagaggaacctgaacttactaagaaggttaagactgatgagccagagaaccaagaagagctcccttctagctcaaaatgcttttgaaagcctttaaagtgtgttggataagggcaggaaaggaatattcgtatataatacgtacgagtagactagggaaagtaacgagagtgtaacttgatatattgactgcgttttgtattgtgagtagagatttctttcaagcttagatgtatgaaagaagagctgagctcgtagtacatactgtttgaagtacttttatagtagaatagttttataaactttgcttagtcctttatgatatccctcaattactacatgataaaaaaaaaaaaaaaaaaaa

SEQ ID NO: 36806 - DNA, 1149 bp, Oryza sativa
  Clone ID: PAT_MRT4530_40596C.1
gcaaaatctctcagctcttaagaggaaaactattgcagtgcagtggacacttctctacaaaacatgcttcatccatgtacatatacaaacacatatatactagtacgtactacgtggctacatgcacacttcacactaaggcacaaaaagttgtgcaaattgacacgcatgcatcgccggtgaccagccggcggccggccggctagtaggcgacgccggtgaccggccgagagtagccggcgtagtagtccggcgtggcggtggcgaggctctgctgctgcgtgcgcagctgctcgtagaacttgttgatgaactcctccgcctccaggtccaccagcccggccccggcgtcctcgccgccgtcgtccctgatcgggaacggcgagtcggtgatccggagctgcctcaccggcgccgggctgcggccgccgaagctggtgcgccacagcgccggcgacggcgtcgcggccacggcggcgccgccgtcgcccaggagctggtcgctgctgttgaggatctcgaagacgcgggcgatgtccgccgcgtcgtagttgtaccacccgggctcgccgccgttcgcgccgcgcccgccgccgccgcggcggcggccgttgctgccgttgttgttgcggcggcggcgcttggtggggatgagatggaacgacgacgggtaggagggggtgttgctgcagctgaactccacctccaggccggcgccgcgcgggtcgtagacggcgagcgccgggtcgagcgcgcggccgcacgagaacggcgccgccgccgccgcctcccccgccgccgtggaggcggcgtcagcggcgtggccgtggccgtgggaggcggtggcggtggtggtgttcatgatcttgccgagggccttgttgccggcgatcttgccgcggtggaggaggaggtggaggtccatggcgagcttccgcttggacatgcccttgcgcagcatgaacagcacggcgcgcaccacgtgccacagccgccgcgccatcgtcgtcgactcctccattagatgatcgccgtctctttgatggatcattcttgcaattaattgatcttgtctcgaataataattgagagagggatcgatgagcttgtggtgtttgtgtgggatgatttggtggttggttctcgtgc

SEQ ID NO: 36807 - DNA, 336 bp, Oryza sativa
  unsure (1)..(336): unsure at all n locations
  Clone ID: PAT_MRT4530_40597C.1
cccacgcgtccgancaaaaataaaaaaaataaaaaaaaaaaaaaaaaaagaaaaaaaagggcggggggtgggcggtctacaggatcaaagcttccttcctcctacatgctacctactatatattgtatcgtaaaccaaaatacatgtccagtggccgacaatttacaagaatgggaacagcaaaaccctcccatcacaaacttattgcactgatgcacattccccttttgcagctggagtataaggaacaggccggcaccgatcgcacttcctaacacatgctgaagctgaatgggacatggcctgcaccctgtaattaagcatcaatagcgaggg

SEQ ID NO: 36808 - DNA, 729 bp, Oryza sativa
  Clone ID: PAT_MRT4530_40598C.1
ctctccactttgccagtaaatgattacacatggtaaaattgttgtcgggcatggaaaagaaactagtagtaacaaactgaacctacacgcttcagtaaaaaaacttcacccgattataccgataagtatcaccaattttgcttcaatctccatccgagcagttcacatttcacagcttctagactgattgatcacctagactgattgatcattggcagctgacgatctgagggcgtccaagacacgtttctcacctgtcagttcttccacgagcccgttggtgaagtctcggcagtcgtgccgcccgacgaccaggtcggtcggccaccgcgcggtgaacgcgtcggcggcgagcaccgccgcggcggcgccggcgccgccgccgctgcggtggtggccgacgagccagcacctcgtgtccgggaccctccgcagcgtcctcctccggaccactccggggatttcgctccgcgagagcacggcgaaggcggcgagcgcgtcctccgggtcccgtggctggaaatcgaacaccagcgcctgggctcgggccgggtcgggccggaggagcaccatgaagtgctgcaggtcccagaggcccagcgagtagcccgccgacatcagggcctgggccgggcccttcggccctcgcaggggcaccgccgcgacgtacacggcggcggcgtgcctccccgccggcgtcgccgccggcaacgaggcggacaccgccat

SEQ ID NO: 36809 - DNA, 318 bp, Oryza sativa
  Clone ID: PAT_MRT4530_40599C.1
attaaaaaaaaaaaaaaaaaaaaaaaaaaaaaaaaaaaaaaaaaaaaaaattacaaaaaatataaaaaaaaacaaaagaagaggataaaatttgccgcccttttatatatgtcccaagcttactttaacttccatgcaacgtcataccttttttatagggttacctaaattaaattcactgcccacctttttaaaacggcttgactggtaaaacccttgcgttaccaaacttaatagctttgaaaaacataccctttttcctagctaacatattttcaaacaggcccgcaactatcacccttcccaacaacttccctt

SEQ ID NO: 36810 - DNA, 419 bp, Oryza sativa
  Clone ID: PAT_MRT4530_4059C.1
tacaagaccccctaggagatcggagattagcctagacatacctaatctggtaccatcggaggccatcaagagggatctagcgctatctcttatctcgccgagtacgtattcgaggaggaagactacccctgttgtcgactacgtgttgatgaataagagcaacaccggcttcggccaacaggagtagggttattacctgattctgatgaataaggggccgaacctgtataaaaatcattttctctatctctttttacttcaatctcgcatatactttggtaccaacgatccccataccatgcaaataccgtagtcgtgatctaaaacgtcgacatatacaagtgcgggttactgccttttccattaaaaatcctagatggcggccggaaaggctagtggcctgtagttcagtaacgttg

SEQ ID NO: 36811 - DNA, 1770 bp, Oryza sativa
  Clone ID: PAT_MRT4530_405C.1
cacgaggccgagcggcctccccgcgcggctgaggccaaaccctcccatgtccaccccggccggcgtggcgccccgccgctcctccaggctcgcctccagcgctcctccgctcggagccggccagccttcctcctccccacttcctcggcgccgccgccgccgcgcttcgccgtctggctgcgccagagaggttgacaactcgcctcctccggtggtcatcttagatgacaacgaaatggagcagcatgttgaggcagaagaaatgaagaagcaaggggaagagagtgtggaggcaaatgaagcagaggagaaggacaaggatgcggaggtcttagaggaactacctgattggcttcctgatggttggatcatggaggtacgttgtggcgacaacggcaacatctaccggtattacacttccccggtgtcaggatacacattctctacaaagatggagacactacattatcttttttcggagatggatgagcgtgtgctggagtctcaggcgtgcgccgatgacaatgagcttcatagaatgcacacatggcttccagatgggtgggcaattgaagtcagagctgggggtaagaagatggaaaaaatgtacaagttctatgttcatctgcctactggaatgcggttcttgtcgaaagaaaatgtagggctctattctaatgaggggaagatttccagatgtgatgtaaagggtttgtgtgatacaagctctgaagataatattcttgcaatggtagaatttaatccagatgggcttccagaaggatgggtgaaggaaataatatttagaaagtgcaatgatggaattaggaaagacccgtattatactgatcctgttagtcgtcatgtattccgcacactcaagtctgtaatcaactaccttgaaactggacaaatcactaaacatgcctatattccgaggagaagcgttactgatatgtactcttttgacaggtgcacagatctgcctcaaagtatgctgaaaagactgaaaatacaaggaaaagcaaagaaaaagtctgtaggagcatcggtcaaaggcaagaaactatctaatggcctggcatcaaataactgtaatgaaggtatgtcttctgggttggatcctgaaatcgggccagaagaaaggaaacttggaactgttaaatccataaccaaagaagcagttaactcagatactatcaagcgatcaagaggaaggccaccgaaaatcttgatgccaactattgaaagcaccaaacctgagattgcattagtcacgtcagaggctatcaagagatcaagagtaacttttgcacatttgcagctgaaggtgtcaattcttgcttaattcatctctctgaaccaaatgaaaagatggtcaaagccaccagtgcagtagaacctgccagttcaaataatgccaaacgacatggagggagcccgcaaaaaaaatttaagcacattactgacatcactttagattgtgccaagagttcaaataaggagtcagagcatattgttacagcaaagaaattgggtattggaggtggagaacaagtggcaaacgaaaatacattggagcacactaacatgaaagagcaccttggggtaatccaggactacacaagcaacaggaagaaagataaattgaacttgattactgatccagatctgcatgagcataaaaacggcaagtttactgaaaaactagcgtgcactgcagttcataaattttatatgaggagaagtagcaatcatacagtggcattg

SEQ ID NO: 36812 - DNA, 567 bp, Oryza sativa
  Clone ID: PAT_MRT4530_40600C.1
atggaggcggtggccgggctggggaggcggcaggagaagcggcggcgaccgccgggctggggaggcggcgggagaagcggcagtggccgctgggctagggaggcggcgggagaagcggccgcggccgggccaggaaggcggcaggagaagcgcggcggcggaccggggagggatgagtgcgcgtgcgttgtgagtgtcatctctccaggatttgccggtccagtcttcgaagatgctcataagggaaagactcctattgattttgggatagtaacaagttcagatgcatcgaggagcaacccatggtctgtggataagatcaacacaaccaacgcaaagggcaggctaagaccatttggtggttcaggggaggaggccgggatctggcgagaggagcagggcggctgccggcggcgggatactaggcgtcagggggaggaggactcctcgtcccagaatgcggcgagggcggaggaggccggcggcgtggatcaggacggcaactggcggaggaggccggaggatgagacggggaggagacccgcgacggcgcgggaaaaaccctag

SEQ ID NO: 36813 - DNA, 456 bp, Oryza sativa
  unsure (1)..(456): unsure at all n locations
  Clone ID: PAT_MRT4530_40601C.1
cnanacacacaannacaanaantaacccancactaaagggaacanaagctgnnagctccaccgcggtggcggccgctcaaagaactagtggatnccccgggctgcaggnattcggcangagnagcnacaaagtgctcagcccatgcagtgagttcgtaaggcaacagtatagcaatagnggcaacccccttctggcaacnagctacgnntcanttgataaacanccaagtcangaagcagcantgttgccaanagctcangntggnngcaanaacaatctcaactnacnaggccantannattgntcaagagattgngnaaaanctaacaaactgccngacaatttagnggngnactaannttgatcanaactacaaagactncaagaccccaaaactcctgcnngnacncntacncaaatnnnanccancacaataatggaggnnaaatcnncnc

SEQ ID NO: 36814 - DNA, 468 bp, Oryza sativa
  Clone ID: PAT_MRT4530_40602C.1
atgtccatatatgatatacggcttatttgggctttctcgtgcttggttttagctgggagctatcctgggaagccgtcgcaattgggcaagtacgactgcacggggtgcagccttgcaggggttcacagctcaaacccagcggcctactactacaccagtgatgggaaacagtggttagtgttaatggggatgactagtagtcagcccgtgcctactgatcagtaccactgttactactgtgtgcccgtaaacaagaagagtagtgccaaaggatattgctggtcagttgcaggggggtgggttatcgtgctcggatataatgccgatagtggtatgctggactcatacttcatatcggccaaggaggacgacgacaaggcgaagaccgcgtgggtgaggggcaaactagaggagaggatagtccctaacatgtgtgccttacctgctgactcagcgaatcaaccatga

SEQ ID NO: 36815 - DNA, 240 bp, Oryza sativa
  Clone ID: PAT_MRT4530_40603C.1
atgggtgacagcttcaccggccgacggctacgggccgacagcgtcggcggccgcgggacgcctgcgttggcggaagtaagaggccggtgctggaagctacgacagcggatgagaaggaggttgacgcagccgactacagcgggaggccggcacggtgacgaggttgagagcagcgaggcgcaggccggccagcggcaaactgagctggtacggtgcatggcgaggacaaggtggcagtga

SEQ ID NO: 36816 - DNA, 488 bp, Oryza sativa
  Clone ID: PAT_MRT4530_40604C.1
attcaaaaaagtttcataaacaagatcaaatcgagtttttctggaattttattaggaaaatgataaacgatataaatagggtgtctcccacagttatcttactgggaacagaagaatccgcaacggtctcattaaaaaaaaaaaaaaaaataaaaaaaaaaaaaaaaaaaaaaaaaaaaaggggcggccgccctttttttttttttttttttttttttttttggaaaaaccatttgattgaacagaaaataatgcgtcctaaaaactgtggttgacaagggacatcagggtaataaatttaacttaaaaaaaaaaaagggattcctattaaattaaaaacatcaaagccctctttttccaaacaaacaaaattcgagaaaaggtactctttttaactggggcatactagaacaaggtgtaagtggaatcacttccaaagaacctccctaatttgggtttttttaatttttggacaacccttttagtcc

SEQ ID NO: 36817 - DNA, 1447 bp, Oryza sativa
  Clone ID: PAT_MRT4530_40605C.1
gcgcccactgcgtacggtcaggcgggactacccgctgagtttaagcatataaataagcggaggagaagaaacttacgaggattcccctagtaccggccgggacaaaccacgcaggaaacctcagaaaatcaccgtacgcgacgcgggcccaagaaaaccccgacagaaaccgcgcagcagcaacaccaccaccggcgtcggagatggcgttccggctgagcaacagcctgctcgggatcctgaacgcggtgacgttcctcctgtcggtgcccgtgctgggcggcggcatctggctggcgacgcgcgccgacggcacggagtgcgagcgctacttctcggcgccggtgatcgcgttcggggtgttcctcctcctcgtctccctcgcgggcctcgtcggcgcctgctgccgcgtcaactgcctcctctggttctacctcgtcgccatgttcgtcctcatcgtcgtcctcttctgcttcaccgtcttcgccttcgtcgtcaccaacaagggcgccggcgaggccgtctccggcagagggtacaaggagtacaggctcggcgactactccaactggctgcagaagcggatggagaacagcaagaactggaacaggatcaggagctgcctccaggactccaaggtctgcaagaaactgcaggacaagaactgggatcggacccagttcttcaaagccgacctctccccgctcgagtccggatgctgcaagccacccagcagctgcaacttcctctacgtcagcggcacgaactggacgaaggtgcccaccaactcgtcggacccggactgcaacacgtgggtcgacgacggcacgcagctgtgctacaactgccagtcgtgcaaggccggcgcggtggcgaccctgaagcgggactggaagcgcgtcgccgtcgtctgcatcgtcttcctcgtcttcatcgtcatcgtctactccctcggctgctgcgcgttcaggaacaaccggagggacaaccgcggcgcctatcgcggtgccgcgtggaagggcggatacgcctgatttcattcgatcgatcgatcgatttgcacggcgtaattgattggcatgttcatgcgatcatgtcagatatctgttcataggcttagctctgatattctagccctgtacaggcgagattattctgggttctgatcatctgcttgttactctttgatcaggagtagtaggtttctgtatgcagttctttgatgcaacttagttgcaccctacatcatatttgtactcgatcggatttatttcatatatgtaatatagtattcctttttatttgtttttcaaaaaaaaaaaaaaaaaattgtgttctctgtcccctcctctcatgccgcatccccgcggacagcaaatattttacctacgaggaatagttaaaaaatcatcgaaacccctccttagattaaaaaaaaaaaaaaaaa

SEQ ID NO: 36818 - DNA, 730 bp, Oryza sativa
  Clone ID: PAT_MRT4530_40606C.1
cgcaaccacatagtcctcacggatgcccgccagcgccgccgcttccggcaccgccgccaccgccgccagccgatccttcctgccctgagccggacccactccctccgccactgcccgtgccgccgttcgcgcttccagagccctgcccggtgcccacggcgttgccggaacgtccagtcccgctacctccgccggaagcaccacccccgccggatcctccacctgcgccgccaccgccaccgtgggtgacggtcacgccgccagggccgatgtgaatgcctacgccttttccgccgccgccacccacgctgccgtcggccgagctcgcggcaccgcctccgccaacgccgatgccgacatcgacgccgcctctgcccacgtcgacgccgaccccgacgccgacgcctccaccggcgctcgagccgccgccacggctggtccagacgccgccgccaacacctccgccgaacccgatggtcgtgtcggacccgttgtgcgacaccatccaaccgaaaccatggccactgccagagccactcccggacccggcggctttactcgggaacggcagcgagaacttgctgccactgacgacggcgccgccgctcttgtcatccgggaaggtcctcgcggcggcaggcgggaacacaaccgccgtaacacacaggagcgcaaggaggaaaaaggggaaggcactggagctgctactactaccactagagatcgccat

SEQ ID NO: 36819 - DNA, 218 bp, Oryza sativa
  Clone ID: PAT_MRT4530_40607C.1
aattaaaaaagacaatattgatttaatcggggaatactgattacaacgacaacatacattctctttttgacataatcgagtccgcttcataacagagagtgattcataaacacgcgttctgagaccagcatgcatgcagattcatacaggcactatatttattcaacaaccattcacactattacactgagggtcccaaattaaactgacaacagacg

SEQ ID NO: 36820 - DNA, 548 bp, Oryza sativa
  Clone ID: PAT_MRT4530_40608C.1
atttgagccatttcattctatttccacctgatttcccacccgggctaccaaaatgcccttcggtctgccaccaatggcgacgccgagctcaccatggcggaggccaaggagaccggcctcgtcaccggcgcctgcaacatggccatcggcaagtacttccgcttctgctccaccgcaccggccaggcggccctcctcttctcctgctccccctgctgcaccagtcctcgccaccatgtacgcctcgcggcctcccggtccgatggcgagggtgacggtgcatcgctgcgcgtcgggggcgggggctggtaggcggcgcagctggcggtgagagacagcggcgcggctggctgggagaggcggcggcacggtggggaaccggggaggggcggcgcggcgcgcaccttctcgcacaacgcccgctcttttattcgccggagaaggagaaaaactgcaggggagagggggggtattttggtacattgaagtaggaaaaatggggaaaatcttgggaaatggccaatatggcaaagcaaccgtttggcatcg

SEQ ID NO: 36821 - DNA, 2071 bp, Oryza sativa
  Clone ID: PAT_MRT4530_40609C.1
gccaccgaagacatgagaaaatggtaccctcaaacctctcgtgtagtcatgtttacatacttacaagttattacagtatgaactttgatttacatggacgtgtataaacctgagcaggtaactttacaacatgatcatgttttgttgtattttacaagtaacacaatctctaaagtaattttgttctacaagcacaacaaagcaaacctacaactaccagcaacaacagcagcggctgatcttgtaatcattgtgaagtctgagcactagtttgcgtttcagctgcttctcctgaagcaccatctccatggccattttcagttgtcggatgaccatcaataggtttaccctcaactggaacaggcccttctttcaccaactcagatgcttgagcttcagtctgctctgggatatcagacagcttgtcctctggtttcttcctggaaatctttctactcagtatgcttgtcagtgatctacctggctcacctgcgtttttctccatcaccttggctacatcttctgtcaagttctctgcatctcccgcactccttgtcggtttcgcatcttcatcgactactatctttatcgatgtccgtttttcaccggcctccttaaggtttggacgtggagtttgtgggatcttcggatcaagctctgttgcactctgaggccctggcgttgtaggaataccgggatcaatatcatggaaacttcccttcttcaagctcttccggaaaaaggagccaaaaaaacccccttgtccactgctttttggggtaggcgcatcctttgatttgtcaacttctttgtaaatctccgtgtcaggattacgtgctcgccctttccgtgattcccatgtcttgggaactccagtgccagggcgatgcacatataatcctccaggttgttcttgcccatcaatgttaatgtgctccacttcatctactaagacttgcttttcatcaggcagttcatcagcattaaacttgttgacggatgttgatattggtagttcagcatcaactttccttgatgattcttccaaccccttctcctctgatatatcttcaactgttattgccaagtgaatccttcctttcttgacattcttgagtgatatccatttgtcatgtctctgaccacccctcagctcatggatatctatagtacatgttccaagcgagtcatcaaacatgtggtccttatcacacacttccatggcaagttcatttaatgactcccacgatgtaatgggtattttgaattcttcaaaccacttaggggatagtgttttcttctgtatctgagtttggaatttaaaaggaccaagacgacctttcacataagggtcggagagcccattcatatcagatggtttcatgtcggatccttctaaaatctcaagtttcacatatgcaacaggaggtctctcctcaatgctgaaccagtcattgtctgagggagtcgatacaaatttttccacatcgataacaagcatattgggctcaactaatgtctgcccaaatgcagtatccatcaacttatccagccatcctgaaattcctggaaactcagtgacatcaagcccatgaccaatgagtggctttacagtcatctgaaaataaggaggctccacaaaacatagtcttacacggccaagaaatggccaactccggacaaacttcacaccgactagaatctttccctcaacatgcatgctagtcagatgcatgtttgcagtcattccaagtccgacactcttatgcagctgcatagaaagtacagcactcatatcttcagcagatagaaaattcatccctatctccagaaccaaatggtcatcatctgatgtctcaggtaaaactctcattgaagtaaacagtggtgaattcctgcccatataaagctcctgaactcctgctttactaactgtccaaggtttgaacttatccaagaaccatggtattatgggtcgtagaagttgtgagacgatcttctccatacagataggccacatcttttttattgcataatttaaccagcgtactgattctgcatcagatagcaa

SEQ ID NO: 36822 - DNA, 348 bp, Oryza sativa
  Clone ID: PAT_MRT4530_4060C.1
atggagactcaggcgggcgtccgattcttagctacaaattggacgctcaatccggagtcacgtcccataaaaaaggctggtgtggttgatgtagcacgcaaattcggatcaaatggttttgattggcaaatcggggtacagcacactcatctttatgaacgcacacacgcataccctacccctatgaacacctctagaagacgggatgagcatatgttgagattcatgaagtcacctcagacgcctcgttatcaacagggaaaatgctctcttaattatgagtgtgtactactactctaccagtacacatgcatgtttgttagtgaccgaaatattccatgtactagc

SEQ ID NO: 36823 - DNA, 1113 bp, Oryza sativa
  Clone ID: PAT_MRT4530_40610C.1
cacgcgtccgccccccaccacgttatcctcatgtcctgttccttccgcttccactcctccgccctacccgcagccgctgcacggctccacctctcccgcggactccggccgccaccgtcacgccgtcgcctgcacaacacattctcacccaccctttccatctccccgccctcccgtcacgccgccatcgccgccgccgccgcttctcccctcggcgcatctcaggaggcatcggcgatggcggtgtccgcgtcggagggcgttggccagtacgatctgctgattgttgggcctggcgtgcttggccggattgtggcggagagatggcagcaggagcatccaggttgcaaaatttttggtcatactgcaaccacagatcatcacagtgaattgactcaacttgggatcattccctccttgaaaggaccagctgttcagaaagttccgtacgttattttctgcgctcctccttatcggacagatgattacccaggagatctgagagtggcagcatcaaactggaatggacaaggctctttcctgtttacatcgagcactgctgtgtatgactgcagtgacaatggattgtgtagtgaggattctccttgtgtgccaattggtaggagccctcgtactgatgtgctcctaaaagctgaaaatgccgtccttgaggcaggaggaagtgttctccggcttgatgctgcttctcttgcaattgccattatgaaaaggagactacgtgctcgtgtttttgttggttgtgacaatcagcctctatctaggcaagaaataatggaccttgttaatagaagtgggaaatttgatacgaagtttcaaggcttcacagggactgatggtcctttagggaagaggatggagaattccaaaactcgtgctgagattgggtggcaaccgaagtatccaagcttcacagaattccttggtttgagcaattagtatccatgtatatcccaacattttacggtttcaattcaatattaaagcattgatgtgaatgtgattcctctggcagttgttttttctttggttattctcagtatgtgagagcatatgtgttaatttgatttgtaatgtataataattcattattac

SEQ ID NO: 36824 - DNA, 324 bp, Oryza sativa
  Clone ID: PAT_MRT4530_40611C.1
atgtcggcctccgcctatcgtgcaccaccgccaccacgccggcctcctccggccatgcaccgctgccaccatgccgtgccaggtttcgccattgctggccgagccacccgccagggagaccagatccaggtgggggagcgccggatccggcatcgccgtacgccggcgagcccgccgccaacttcgcctcctatgccctcgccgccactacatcctctgccgcaccgccgcctccttcaccccgccgccgcctcctccaccccgccgccttcttcacctcgccagccggccgggcaggccggcgccgccgtcttcgcgccctag

SEQ ID NO: 36825 - DNA, 349 bp, Oryza sativa
  Clone ID: PAT_MRT4530_40612C.1
agctaaaaaataaagatggtgcccacgtgggccccaagtccctctcggctctcgtttctcttcctcttcgctctccctcgtcctcgcggggagcggcggcaggagcatgccggcagacggagcggcggaggggcaggcggagcggcggcaggccacgggcggcagaggttgccagaggaggaagaggcagaggaggaggtcgccggcgagcgcgatagctacactctgtcggccgctccgcccgcgatgcccagccggacggcgccgcccctcctcgctcggtagcagcacgctgcctccctcctcgccaggccgccgagcgccgcctccctcctcgcccggccgccgc

SEQ ID NO: 36826 - DNA, 478 bp, Oryza sativa
  Clone ID: PAT_MRT4530_40613C.1
atggtgtccacggccataggcaagctccataattatatgatcatgcgtgcaggtcatcgcgttgctgggggtaggggcttgaccgtggatcagagtgcgagaatttcttggcccccgcgcgcatcatcgggagtgtgcccttccccccttcggtggccccactacgcggccgtggcaacattggcgcgggaagccattccgggtacatttgtctctcgggcgtgccgatctggcctggaggaggggcccaacccgggtctcgtcgccacctggataccgcttggcaccgggcgcatcgtgtgcgccggaagtgtcgcacacaatgtttgtgcggcgcgcgtgccccgcgccgcgcccaccgggcccgtgttggcctatcgggtcaatgacacggggcggcaaacgcgggcggggcccacgcccgcacaaggtcgtgtttttggtgccgccgcggccttcccggacatcacaatgctgg

SEQ ID NO: 36827 - DNA, 808 bp, Oryza sativa
  Clone ID: PAT_MRT4530_40614C.1
aatttatacatctacaaccatacataccattgtactaaaaattttattaccaaattaacatttaaaaacatactcttttcacatactacggaagaccattctattgcatattattagtgtcacatagcaacacaatacatatgtcttcttttacttagccacatgtgtgcatggcggtatcctctcccagttccagaagttacaattttttttgtgaacagtatcagagggcatatgcatgtcattcaatgtagcgcatcgcatcctccaactgtccaacttgccaagcggttgtgtccgaactcaagcagccactgtggaaaggtgtttctacttcttcctcctgtaaatcttcttcagaaacgacttcaaaatatcccgaattgcacggtcagtctcggcgtcgatggtcgaaaccaggtgcttgtaaactcttgactcgtactccaaaaatatgtcctgaagatcaagctccctgtaaacgctcttcacttctgctacgcattttgggtcagacttcccgtagttctcatatagtattttcatctcattctcattggcgagttccatagcctgtactattagccaggaacacttgtagtcttcaatgtctgttccaaccttgccaatcacttcgtgggtcaccaaagcaatccaagtagtcatcctgtatctgaaagtatacgcccattccgcggcgcgcgctcttccgctctcctgcgcccctcgttctcgcgccattcaagagtaatgcacatgcaaccggcaggtagaacgaatagtatgatgtcttgtacttgacaatgcc

SEQ ID NO: 36828 - DNA, 561 bp, Oryza sativa
  Clone ID: PAT_MRT4530_40615C.1
atggcgccccaccggccggcctcgcctggcagccgccgcgccgctcgattcgccgccgcctgcggagacgatttgatggggctgatcgggagatattactgcggctatgcagctgcagcagtagcatcaccaaacccaacaccaggggcggatccaggaatgaaagattgggctgctgcctgcctgttgctcgcctggtcctgcctcttgctcgcgtgctcccgtggcgtcgccagcaccggcctgcagcctccgccgccgccgctggcctgctgctgcacctgctcggctgctcgcgctcgcggcgccgcgcgcttcgcctgctacctgccgccgcccgccgccgcgccgcacgcttccgcctgctgcctcgccagagcgcgctccgctgcgcagctcgtcgttacctcgccgcctcccccgcgccgctcacctcttgcgccgccgcacggggagctcactgccttggctagtgctagggatttggggctggggattggggaatggaaacttgggctgggccgctgggggctagatgtggcctgtgggcctgcagcctag

SEQ ID NO: 36829 - DNA, 968 bp, Oryza sativa
  Clone ID: PAT_MRT4530_40616C.1
tgtgttagttgaaggtgaggtgagctagagtgttcttccttggcttggcctccattgttacatccccctccactccatctcttgcttcccttaacccctcccccaaaaatcccccccccccttgccttaaccccaaccccaaatccatccttccaagcttcaaccttctctggagctttatggagtgcgttgtttgcaggattaatgggcgaccatctggcattgcttgtggatcggctgctgacggagtcgacgctggacgcggcaatcaggaagcaggtggccgatctgcaggcggagacggtggcgatcgactactgctgcgacggcgacggcgatggcggctcggcgaggaagatggtggagtgcaggatttgccaagaggaggattgggataccagcatggaggcaccctgtgcttgctgtggcagcctcaaggtgaatttttgcaagatattaaattcttagcttctcccttgcagtatgcgcaccggaaatgcattcagcgttggtgcaatgagaaaggcgacaccgtttgcgaaatatgtttgcagcaattcaagcctggttatactgccccacagcaactgtttcactatggaagtataccgatgaacttcagaggaaattgggagattgctaggcaagatctccatgattcccagataataacaatggtgccatcggagcgcgacttcatggatggttatgaggactacttacccattaggacgagaagcagcaccctgtgttgccgaacagtcgccataattttcatgtcactcctggttcttcgccacactcttcctcttatgattggtggggatggggagtactcgttggccttattctcggaaagacgggaaatgtatatgacttcgtcagacagcgaagaggaggaggattattcagataccgatcctgcacagccaattcattctcagacacgcctggtaccaatctactga

SEQ ID NO: 36830 - DNA, 417 bp, Oryza sativa
  unsure (1)..(417): unsure at all n locations
  Clone ID: PAT_MRT4530_40617C.1
atctaatgggaatacattgcaacatccgatagaccgatatgtaacataggtgctttgtgtctttgtattgtcagatgaaaatctgctctacaacattaatacaacttatttgcttccactatatacgtaaaaatcacgaggaaaaaaatagcttacggatgtccatacgaagggaacacaaaaaggggcacacaaaatgcttagtatgcgtcagttaaaacctgcgatggcaatggaggacctcggacccccattttgatttttgatcggtgcacaagggaatgaacccagcaatgacttttatcatattacantcccaaaaaaattgtcacttcagcccgttcgccccatcggatatgataatatattccacaatttcaccaagggttcatccccaccagtcttggaatttttaat

SEQ ID NO: 36831 - DNA, 227 bp, Oryza sativa
  Clone ID: PAT_MRT4530_40618C.1
tataggggttggtcttgccctctacaggccctcctccacgtccaactcggggtagaaaccaaaggaaacccaaaacatgccttcccgagcaaggaaacctcgagacacgacgaaacacattcggactcggacctgccggtcagaccggccacatgccgccggtctgactggccctcgaccggcggtctaaccgcccaacacaaggcggtcagaccggcccactcgga

SEQ ID NO: 36832 - DNA, 585 bp, Oryza sativa
  Clone ID: PAT_MRT4530_40619C.1
atggcttctcccccggaggacgcgccagctattccttcaaatccatcggtgcctcaggaggtaggtaaccagctaccgcggcggtcgccgccgccgccgccgcggcttgagacggcggcggacgagatcggcggtgtcaggtgcggggtgctgtgctttcacctgccgagacgctccaagaagaagaagaagaagaagccgccaccgcccgtcatgcagctcgcgggcggcgcggccggcatcaagagcgtgcagctggagaccacggcgacggacgacgacgacgcgtcgtcggcgtcgccaccaccccagcgcgtcaccttcctggcgtcggcgtcgctctccacgtggtggccggcgtcgcctcccgctgccgccgcggccggcgggaggggggcgtcgtcgtcgtctttctcgcactggcgccggtcgctgtcgtcgtcccggcgccgggtcacgccgcacggcgccgccgcggcggcgccgtccgcgcccacgtcgttctccttcccttcgtcgccggcgtccgcgtcgacctcctgcacgagcacgccgaagctggtccacgggtgtcacgtcgactag

SEQ ID NO: 36833 - DNA, 153 bp, Oryza sativa
  Clone ID: PAT_MRT4530_4061C.1
atggaggggatcagggggaagaggaagaaggtgctgggtatcagctggaaggagatggagcactcttacgtgacaaatgtcctccacaaagacgaggcgtttgctttcggctacgacgaggaggcgacgatccgtgctgcaactgcaagatga

SEQ ID NO: 36834 - DNA, 288 bp, Oryza sativa
  Clone ID: PAT_MRT4530_40620C.1
atgaacctcttcccgccaaaatcccaacaaacggagtggcaaagtggtcagcgatgtgcttgtcccggccatgttcgccacctcgtaactcgacgcatgcatgccaaatcacgagccaagacgacgtatcccaacgcgcagcagcagccgcagccgcatgccgatctgagctctcaactaacccggtcgccatcgacggatcaacaatctgggactgggagtactttccacacagtagtccgaccaaattctcagctcggctcttcacgtgaatttgagcacgtaaaa

SEQ ID NO: 36835 - DNA, 1158 bp, Oryza sativa
  Clone ID: PAT_MRT4530_40621C.1
atgtggaagatctttggtgtgcagtctgatagcctgtatccccagcgcgccccgaatgtcctggatccatcttttgctggcaaggccttcggccagagttcgctgccgtcggatttgagcagggacgcgatcgaaaacgggccttccttctcgtgccccattgccggctgccgcggacaccgcttcggcatcccggacgacgcgcgcgccgcgcgctacttcggcacgtacggcggcggctggctcttcctcgcattcggccagatcaagcgccacgcgctcctcagcctccgcaccgagcagcggttctacctacccgacatcgcccgctgggacttcacggggagaccagccttcgacacggacatcgtcatggtcgccgcgaccctcttttcgccaccggaggacaagggctgcgtcggcgccgccatcgtctttcaccgggtcaacttgtatagtccacgcgttcatgcattctggcgcatggggaagcagcttgcagtggcgacgacctgtactaacgccattgctggcttcggcgtgctcgtgcaggaggtcgacgcggacgccggcgacgaagggaaggagaacgacgtgggcgcggacggcgccgccgcggcggcgccgtgcggcgtgacccggcgccgggacgacgacagcgaccggcgccagtgcgagaaagacgacgacgacgcccccctcccgccggccgcggcggcagcgggaggcgacgccggccaccacgtggagagcgacgccgacgccaggaaggtgacgcgctggggtggtggcgacgccgacgacgcgtcgtcgtcgtccgtcgccgtggtctccagctgcacgctcttgatgccggccgcgccgcccgcgagctgcatgacgggcggtggcggcttcttcttcttcttcttcttggagcgtctcggcagggctgctgtctccagctacaatggtgcttccctggtagtgaggtgggataacttctctgaagtcttgcatacctgggctcgggtgaggccgcaggtgtcgacgagggagctcgccgacgcatcaagccacctccgcactgagctccttgcagccccgtcaactcaccgcacctctcctgttcggccatcgcccaccaccaacctcatggaggctaggagagagatgtga

SEQ ID NO: 36836 - DNA, 297 bp, Oryza sativa
  Clone ID: PAT_MRT4530_40622C.1
atgggtgccaccttggctggaagaatatgggacggtacagactgcagccatagggtcgtcagggcggttgatggggccgccggcggcctcgctttcgtccgctttgagcgcccaccgccggctgctgaggccttcgccaccttgccacatccgctggccctgctcctcgccgctgaccttgctcgtcaaatccgacaccccaccgagcgaggcgagaggcacggcccgttatcccgtgccgtgtttgggccgacgcctcagcccgtaggccagcacggcacggcacgtttactttag

SEQ ID NO: 36837 - DNA, 1302 bp, Oryza sativa
  Clone ID: PAT_MRT4530_40623C.1
ctctttgaggaggggtggcttctcctccccctggtggcctttttctaatcggtacggtttcgaggatcgccaagggttaagagggatgagatggcggatactgatgtacagtaccgttgcttcacaggtggtctcgtctgggacaccgacgaccattgcctcgaggacggcttatgcacctacggtgagatcctacactgcaagaacataaacgacagtgagacagggaggtcacgtgggtttggcttcgtcaccttctcctccgagcagtctatgcgcgacgccatcgagggcatgaacggcaaggagctcgacggccgcagcatcaccgtcaatgaggcccagtcccgccgctccggcggcggaggcgggggctacggcggcggcggtggcggctacggcggcggtcgtggaggcggcggctacggaggacgtggcggatgcggtctagtgcgctatgagggtcgtctaccccagatcgtgatctgtgacaatttggagcgttctcccgaggcttcccaggatagtgaaattcccaatgtcccttccagcactatgaaatgaggataggtctcgccctagatataaccaaccttaccctgtctcccaaacgcctcagttccccccgagaccttctttctataagtctgttccggaccacaaacattgcatccggccctgccgggcagattgttgccacgcggctaaaatatctaattattgcccgcccgatccaagcgttcatatctgacgattcatatgcatcctttacacctttcggtgtcttagtgcgccgactctgtcgggagctgtatacgttagcggctatccgcacggagtcagatactcccagagtctagaatacttattagctgttttggttgttttgcattattgtcgcgtgagcgcagatatgtgagcgcgctgccagagcgcagcgttgacagagggagtccgagcctccttgtttacctgctgtccagctgttatgtatgctgcggctgtgtttgtgtatttctggcaggcagacgttggccgctgcgagacgcctccatgcgcgcgtggctgtgggttgtcagcgaacggcgggtttatatgtgctccgcagatgagcagagcaccgagaggacagatcagaacatgtgtagatggacgctcttatggcacaaagtgcgtctcagctctgatacgtggatggggctgataacgctcacactgttctcgcctttacgcgacgaactcgtggcgagcgagctgtatagagaattttatatgattgggagcgtatgggtgggtattgaa

SEQ ID NO: 36838 - DNA, 396 bp, Oryza sativa
  Clone ID: PAT_MRT4530_40624C.1
acggcccgacgcgggagcgaggatggccgtccgatcaaacagacggccaagatttcgccttcgccgctgaaatcgctgaacgggtcaaaccccgagcgagcgaatcggcggcgatgttgcgacggcggtccggcgaggtggcgcgcgcatgtggcggcgagcgccgcagcggctccacctcgactggctggggggcgtgcccgagggcggcgccaagccgtgtgctacggccagacctcgtcggcgggggggggggggggggaacccgaaggcagccgccaagccgacgcttcctgtccccggtgagggacggtggaggtaaactccaagacggcgcgcgcagagaacccaacgcggctgcgaggaggtgaaggcagcgacgccgcttcccggagt

SEQ ID NO: 36839 - DNA, 282 bp, Oryza sativa
  Clone ID: PAT_MRT4530_40625C.1
gtggagttcggatgggccctgcgacggcctatgcggcttccggattcacctaggcacgagaggggactgcccgctgccttgcgaggagtgggggtgaaacctgaggtgtggtgtgcttggttagaggggggttatgcgaagggtcctgtcacggcctctttctgacgtggatctgaatgtcaatattgtcgtttgtgtaccccggccggtcctggacggagaatttaatgcacattctgcttagaattctattcgggaatttctgggcgcgacatcgacatc

SEQ ID NO: 36840 - DNA, 235 bp, Oryza sativa
  Clone ID: PAT_MRT4530_40626C.1
tgtgagttgagttggagattgattgattgattctgattgtgtaagacaaaagaagactgcagatcatgacgcataacagttgggatcccaaccctagagtccaccactcacactgcctggcctcctgtaaggcaaaatcataaattacagattctgatatcctagaggaactatgaccactgatattccattctgtaccctataattgcttgcccttataaggactgaaggctag

SEQ ID NO: 36841 - DNA, 384 bp, Oryza sativa
  Clone ID: PAT_MRT4530_40627C.1
gcggtcccttgaccttacgctactggactcttacgacctgaatattttcagcgagaggtaagatgacttccagcacgtgcaggtaggtgtgctgaagcttggcgaggatgagcgctctaagggccctaggctgccgaactgcacaacctgtgaactagaacttcgtactctctctgctgctccaggtacaaaagagtgcagctcggaggacactgtggaggagctgccgcaggggaactctgtgactacgagcgaggagctggaggagatcaagcaggaacgcatgcgcattttttggcaggacatcatgtgcgaccgagtccagactacaggacggctcagggtgttgttcaggcctcctgttgaggtgcaggacggtccaga

SEQ ID NO: 36842 - DNA, 346 bp, Oryza sativa
  Clone ID: PAT_MRT4530_40628C.1
caagaatcataagctattttccttggtaggggaatattttttggaactaccataatttaggtcacaaaagggttcaattctttatgcaaggcaaaaaacgtagcttacgatttcatgctttaatacccaattcccacaattggtaggaattctactaggtccaatatctacattttctatggttggtggatgaatcatacacttggtaactaccattctaaaagaatgcttttggttcaaactttctgaaaagaattaggttggagccgccgaaaaaggatggaaggattgttagttacctaagcttccacttacgctgaaacaagaccaagatattctgcaaatg

SEQ ID NO: 36843 - DNA, 1463 bp, Oryza sativa
  Clone ID: PAT_MRT4530_40629C.1
ttagttcctaccatgaaattgccatagatggtcaactagatcttcttgaagctgagagtgagtctgtctatttctaatattatgatgattctgaataaagtcctgcagttcagctataggggtatgcaaaggtgtgactcgctctccctcatcatcatagttgtagtcaagaccttcatcatccttctcatcttctactatcatattgtgcagaataatacatgctatcatgatttcttttaattggtgtgcataccaaaatctagcaggcccacgcacaattgcaaaacgggcttgcaaaactccaaatgcacgctcaacatctttgtgggctgcttcctgttgttgggcaaagtgtttcttcttattcccttgtggttctgatattgtcttcacaaaagtggcccatgagggataaatacgatctgcaagataataacccattgtgtagttgtgaccattgatttcataattcacttgtggagcctgtccttcagctagccttgcaaagagaggggaatgctgaagaacattaatatcattgtgagatcctagcaaaccaaagaatgcatgtaaaatccaaagatctcttgaagcaacagcttccaaaactatagtgggcttgctttattttcctttatgcatgccttgtcatgctgcagggcaatttttccactcccaatgcatgcaatctatggatcctagcattccaggaaagcctctctgctctccaggtgcaagtaatctacaagtgtctgcactagttggataacgcaagtactcgtctccaaaattctcaacaatagctctcacaaaccttttcaaactctctatagtggtattttctgcaatttgcagatattcatcttgagtagcggctgcgactccattggttatcattctaagtgctgcggtaatcttttgcaatggtgatagacccaaagcactggcaatatttcgttttttcacaaaataattataatgggctaccacatcattaactatgcgcaagaaaagaggacgactaattctaaacctttgccggaataagactaggccatatgtaggatgctccgagaagtagtcgtggtgcaacctatcatggccggctcgatgattacgtcgaacaacttgacgacaaggaacagaaccacctcaccgacaacgtcgagcattcgactgctcatattcatcttgcgcgactattgctgcagtaacgatgatttcatcgcgtgggtcccgtgctgactcatctaccacgtcagataaaactggagtcaaaaccgccgaggatgcttgcactggttttgtaagttggggatgcgttgtatccggttttgcggttagggatgattttgtaactcgagaagaagttgagggaccttcggtgtacttttttcccagaaaaaatacaaacaaaaaaaagcccactagttcacatggcccacatcccacagcccatg

SEQ ID NO: 36844 - DNA, 536 bp, Oryza sativa
  Clone ID: PAT_MRT4530_4062C.1
gacgaggcctcgtgccgaattcggcacctcggtcgaatctggttcaattctctgcctcgcgtgcttccccctctttgttagttctggtgccggtggattttgggggattttggggttctgggctgggggattttggtggatttttgggttcaggtcgcgagcttgaagtcgaattggcgtcgatcgggacaccgagcgaactcttctgcgccatcatccgccggcaactgccaccggccccgatccacgccaacgccggcctagggtttgccgccgggatcgacgagggccacgatccgcgccgccaccgcccggtcggcctcgatccgcaaccgccgtgttccagtgtcccacccagcagacttgcgctcgcttggatcgtccccgtgttctagccaaactttatgttcaaatcgaactcgacttctctcccgaaacgggaaatcgttgccaatccctgcctcggatccatccgactcgcgcgctgtctctgcatcacaatttatcgtctcgatctgtttagctggatcgaatct

SEQ ID NO: 36845 - DNA, 1074 bp, Oryza sativa
  Clone ID: PAT_MRT4530_40630C.1
atgggttcgcgttccggctcgtcgacgacgacgagtacgccgccagtggcgccggatgagaaccggccgccggtggtcaaagggccggcgatcttcagctacacctgcgctggcctcgtcacgggcgtcgcgctcgtcgccgtcgtcgtcttctactgcaaccgccacgtccggaggcgcgcgcatgtcgtcgtcgccggcggcggcgggcgagaggacgacgacgtgcgcagcgtcgctggcgtggcggccaagatcccggagttcgcgtacaccgggtcggcgagcggcggcgagggggcggcgcagtgctcggtgtgcctcggagcggtgcggggcggcgagatggtgcggcggctgccggcgtgcaagcacctgtaccacgtggagtgcatcgacatgtggctggcctcgcacgccacgtgcccgctctgccggacggaggtcgagccgccgccgggggacggcggcggccgacctgcgccggcggcagatgagactccgggcaacggtgatctggaggcgcggattgggggaggcgtggaggcgggcacccaggcggagatcgggggcggcgagggcgcggaggagatcggcgaggaaggcgtcgatagtgacgccggcgggagagatcgccgcgggctggtggacgacctggcgagagatgagagcggccgatgttgccacggaatggatgtggcaaaaagtcatattgcaacactttacatcgtttggcagaggagatttgcgagggcggcggcgagggagcgtctggagaggaggccggcagccgtggctgctgatgaggcgatgcggctacgaggtgaggaggcgacacagggaggagggcgaaggtgtaggatcaatccgatgcgaggtggaggcgcggaggagattggagagggcggcggcgatcgcgggtctggagaggaggccgacgggcgtggaggaggcgacgcggcggcggggcgaggaggcgacgcggcggcggggcgaggaggcgacgcagcggcgtggggaggagatcaatccgagagaggagatgagcgatcgcgtgatgggggaggagattga

SEQ ID NO: 36846 - DNA, 1566 bp, Oryza sativa
  Clone ID: PAT_MRT4530_40631C.1
atggcgccgagcaagctccgggcggcgctgggcgcggtcaaggacaggacgagcgtcgggctcgcaagggtgggcggcgccgacgaggtggccgcggacctcgccgtggccatcgtcaaggcgacggcgcacggggagagcgtgcctggcgacgagcgccacgtccaggagatcctcacgctgacgtgctactcccgtgcgcgggtggccgcctgcgtgtccgccgtgtcgcggcggctcgggcggacgcgggcgtgggccgtggcggtcaaggcgctggcgctggtgcaccgcctgctcgccgacggcgacccggcgtacgagcaggaggtgttcctcgccacgcggcgcgggaggcgcatgctcgacgtgtcgcaccggttcccgcaccgatcgtcgcgctcccgcgcgacgtgggacttccacgggttcgtgcgcgcctacgccgcttacctcgacgacaggctcaagcaccggatgaagggccgcgtggccagccagggcaaatggtgctccgacggtcgccgcgacggcttccccgacatcaccgacgggagttacgaggtgggcgaagcggtagccgaggtctgggcgctggtgccgagggacacgccggcgacggggacgacgacgaccgaggagctcgtctccaaggcgcagcatctgaagcacatactccagcggttcatcgggtgccgcccgacggggaaggcgaggacgaacaaggtggtggcggcggcgctgcacaggctggtgaaggagagcgcggtgatgtaccgcgagctcaccgaggtgatggccatgctcgccgaccgcttcgccgagctggagaccccctgctgcgtgcgcgtacactccatcttcaccagcatcgccaagctgttcgacgagctcgacgagttctactcgtggtgcagatccgccacgatctgccgcccgtccgaaatccccgaggtcgagcgcgtcgcgcagaagaagctggacctcatggacgagttcatccgcgatagacaaccggcgtcgtctcggtggtggaggtgcacgccgccggcgccgtccagcccgcttgcccccattgccagcaatggcgacaatagcagcaaggcatcgccagctgagccggcgccggcaggcgcactcgtcgtggtcgacgaccacatggccgacttcctgaaccttggggaagaatcgacgccattgtcgacggaggagcaagaccgggatctgacactgtccctgttcggcgatgacccagcgacgccggcgccgaagtgggagacgtttgacgacgaccaatgcgatgactgggagacggcgcttgtgcagtcggcgagcaagttcgccgccacccagagcgcgacggtgcttgcactgccaccgccacctggggccaccggcggcgaggtcgcggacccgttcgcggcgtcgctggccgtgcctccgccgacgtacgttcagatgatggacatgcaggcgaggcagcggcttcttgcgaacgagcagatgatgtggcagcagttcgagacgcaacaaatggcggcctggagttacagttcattgttgtaa

SEQ ID NO: 36847 - DNA, 196 bp, Oryza sativa
  Clone ID: PAT_MRT4530_40632C.1
aagctttttttttttccaaaatctgccgagagttttatggtatcagaaacattaaaagaaacaaaaaccacaagtgcataaccgttgatttttcagtcgatgcgatatttgtcatgccgccgttggtgcgcaggccctatgctttcggtttgctttcggtctagcccgttgccttgatgtgccgttgcgtaagctt

SEQ ID NO: 36848 - DNA, 403 bp, Oryza sativa
  Clone ID: PAT_MRT4530_40633C.1
atggatgccgcacccccatgggacctccaagatgttggtggtgttgatggtctcgacaccaaatatgcaggcaatccgatcttatctttagctggtagcagcaatcttcatgagcacaacggtgacatcgatccagatggtgtcgacagggaaggaggcaacacaaaatcagtacctccccatctcattgccacctccaacgtgccctacctacctcttgttggaaggacgcagctgcaccgccgctatctcgtgtcggcgttgtgcctccctcatgccagatcaacccgtcgccatctgaacaacacccccgccaacaacaccgacgcgctgtccactgccgaccttgtggctctaacaccaccgccaatgcctcgtcggtcgtccatgtccaccgtccatt

SEQ ID NO: 36849 - DNA, 243 bp, Oryza sativa
  Clone ID: PAT_MRT4530_40634C.1
acagtcaaatgatggcaggtatctaccacatagctacaaacactgctccacatgtagcaatgtgcactgaccagtcaggtgggtatctgggtgattgaattgtacgacaagtatatgtagtacaggagagaaaaataaagtcatgcatcatcgtgtgtgacaagttgaaacatcggggtgatacaaatctgaataaaaatgtcatgcaaatttaaacataaaaaaaaaaaaaaaaaaaaaaaa

SEQ ID NO: 36850 - DNA, 173 bp, Oryza sativa
  Clone ID: PAT_MRT4530_40635C.1
aattagaagtggggaactaaagatcaatgacaaattagggttaaacagacgaagaaacaggaacatgtacaacaaccgggcgctaatgccgaaataatgcatcgagaggattaaagccgaatgcaaaggaaagcaagttgcatgacatcataatcgaaaggactcagcatgac

SEQ ID NO: 36851 - DNA, 401 bp, Oryza sativa
  Clone ID: PAT_MRT4530_40636C.1
ttcatgcagacagccagtgctgccaacagctcaggatgatcgcggcaaacagtctcacgtgaccagcccattacgacagtgttcagcgcgattgtgcaagcagctacagctacaaacagtttgcctggcgtctacttcgatcaggctcaagctcaagcccaagctatgctctgcccctaaacttgccgtcaatatcccggtatctacccaagctacacacactgctcccctgtagcattcctaccgtcggtggtatctggtattgaattgtagcagtatagtagtacaggagagaacaaataaagtcatgcatcatcgtgtgtgacaagttgaaacatcggggtgatacgaatctgaataaaaatgtcatgcaaatttaaacataaaaaaaaaaaaaaaaa

SEQ ID NO: 36852 - DNA, 506 bp, Oryza sativa
  Clone ID: PAT_MRT4530_40637C.1
gatgcttagccccatccggtgagttcgtaagccaccagtccagccaccagtgccaaccccccttcttcccaatccaccccgtgtttcaactgagaaactgccaagtccatgcagcagctgtgctgccaacagctcaggattgattcgcgccaaccacgttccttcccacctttgcccagggcccacttagccacgtgcttcaggcgacttgtgcagcagctacagctacaacagtttgctggcgtctactttgatcaggctcaagctcaagcccaagctatgttggccctaaacttgccgtcaatatgcggtatctacccaagctacaacactgctccctgtagcattcctacccgtcggtggtatctggtattgaattgtacccagtatagtagtacaggagagaaaaataaagtcatgcatcatcgtgtgtgaccagttgaaacatcggggtgatacaaatctgaataaaaatgtcatcaatttaaacaaaaaaaaaaaaaaaa

SEQ ID NO: 36853 - DNA, 2255 bp, Oryza sativa
  Clone ID: PAT_MRT4530_40638C.1
ttttttttttttttttttttttttttttttttttttgaacctttttttttttttttttttggtgaaaagttattacaatttctatgttaatttcttgatcattcatggaggaacaaacagtacacatatcacacacaattcacactggctgtatataatgccaggggaacaaaagctgaaataaaacagaaaattttcttcttctatatagctttcgtctccgatctcgcatccaccagagcaagcaagcctcggcaattttgttcacaggcggcaaaatttcccctaccactcaacacggcaggcgtaaaccagatttcttgattttgcatatgcaaaggtcagggtctccagaaaactcaagggagcaaagaccttattgcccatgtgtgccaagtgtagttgaaaacacaatatgccatcagggtactaggtcttgtcgcttgcactgacggcagagaggttaacagctggtttctggtacacccttaagaccgcagttccatcgccgccatcgttgccgaccctccatgaccggtccttcttcctctggggcttcttgtgctgcttgtgggatgcctctttcttcttcttcccagcaggtttagacccttcagtggccaggtcaaacgattcgaggtcgctaaggacatgcctcatatctggttgtgctggatcaactgtatcatcccgttcatcggaatcggaaccacctgattcattgtatgctgaggtagttggaccttctaatccggaggtttcttcgtgttcattttcagtatctaccatgccaggaggaagttcgaagtgtggaattttaccatcgatataatctttcagtatctgtcgagcagccctagtctcgtcaggaagtccagcatggctaacatgccccctggatgcacagtaggctcgcaacagctcagcagcagttggtggtctcgactgcgattcatatggctttggctttggcagagttatcttgtaaatctgttcaaggacacttcttgggacacgatctgccaccacctgaatagcttcccggtgcttagtcatcctatcgattggcaagacaccacatgacaccatctcatgccttgagcttgagaaggaagggaagaccagaccaggacaatcacatagagtgagctcctctgagattatcagcgtctggaaatgctttgttttgccaggtgtgtgagtaacaccagtcttcttctcaccaactaaagcattgattgttgaactctttccaacatttggataaccaacaaatccaacaacaacatgcttagccactgatgaaacagaatcagaggaagtggctctgctgtcctctttgatggctgcggccctcctttgtgctacaatgaattctgcttcagtttgcaatttctttaagagttcatccctgccatatatcttggtgtccaaatcaagtgaagcagaatcttgttcagagtatccacttaatattttgccttctaatgtggcagtagcagctttagcggaccagaaaacatagagaatatcatgtgccttaaaatagtctgcccattttttcctgatattcattggtaacagatcagccttgttgacaagaatcattgtcctcttgtgttcatcaatttcttttgcatatacctcgagatcaggacagcggtagaataagggatctcgagcatcgactaccatcaccagcagatcactacgttcaaggactctccaaagctgtctccagatgtcaatgttcttctcaaagggtgtaagcacaagcttgtcattttcttccaatcttgcgagattcctccgccaaaccaggaaggcccgcctctcgttctcatcgagctcctccacagtcatccgagaattccatggtggccgcctcgggaccctgaggctgccggcgtgcagagcctcctgctccttctgcatccgccgcctctcctcatccgtctcccccgtcgcatccaggtcgatgacgaggtcggaggaggagacggagtcggcgagcgcggagtggaggcggtcggcctcggcggcgcgctcgaggacggcgtcgatgtcgctgacctcgatgacggactccagcggctgcgcgcggcggcgcgcgtgggcgagcgcgtcccctctctccttgacggccgccgccgccttgttccgctgccggatcagcgcccgccccagcccctcccccttctccttcttcccgccgccgcccgccatcaccgccgcgagttcgtcgtcggaatccg

SEQ ID NO: 36854 - DNA, 576 bp, Oryza sativa
  Clone ID: PAT_MRT4530_40639C.1
ccgcatctcatgctgcagccacaccagatgccttagccccatgcggtgagtttcgtaaggccagccaggtgccagcacacccactgtgcgccaaacccccccctgtttccgtcgtcccaatgttccaccccgttgttttctccaaacccttgacgaaaccctgccccaagttccatgccagccagccagttgcctgcccataccagcctccagggattgattccgcgccaaccacgttctcacctgcccaggccattagcagtgttccaggcgatttgtgccagcagctaccagctaccaaccagtttgctggcgtctacttcgatccaggctcaagctcaagcccaagctatgttggccctaaacttgccgtcaatatgcggtatctacccaagctacaacactgctccctgtagcattcctaccgtcggtggtatctggtattgaattgtaccagtatagtagtacaggagagaaaaataaagtcatgcatcatcgtgtgtgacaagttgaaacatcggggtgatacaatctgaataaaaatgtcatgcaaatttaaacaaaaaaaaaaaaaaa

SEQ ID NO: 36855 - DNA, 657 bp, Oryza sativa
  Clone ID: PAT_MRT4530_4063C.1
atgagtacttgtgcagattgggtagcagcgcgacgggcgtctcatcgtcagcggcaatacagcgcggcggcggcggtggcttcagcagcagctctccagccagcctccctcgtctccggcgaccgtaccgccgccgccgatgtgcctgacacggccggcgtgcagcagcctgaaaatttaaactcaatttgtgtggttagttcgactgttcatgttggagaattagttgggcctgggcctcccaaccagaatgggcctaatgtcgagcggcccaaagctagcccaacaaccagttgcatccgagaatttgcttcggtccaacaaaaagtacctctaggtaccggtaactcacagtaccaagctagatccaatgatcggaaacgatttgataccgtgagggagaagcagaggtctagtgctgtcggaataccatgtgagaaggtgactagagtcaggattcttagaggtcaacttcgatcaacagtggggatcgggactagactcaggaagaagttgagatccagacggtcaaggataccgggtgacgaagttggatacgagatggcatacggtggatggacaccgtgtgggagagatcttcgcaacgggcttcacgaggtgtgcgtgcaagcgtcggtgttcgcgaaggaaattgag

SEQ ID NO: 36856 - DNA, 353 bp, Oryza sativa
  Clone ID: PAT_MRT4530_40640C.1
gcacaacctttgagcaccgggtcttctgtagaatttctacacacaaacacctgggcaaactcttgagagagagagagagagagcgtgtgttcatgcaatggcaccggtgatcaagctgcaggcgtatggaaagagaggaaatgagcaagcgtttatggactctggagctcaggatgcagtgctacaggaaagctaggagaaatcggagatatatatggcagttgctggagtgggagatcgacgcactggaaaggttacagagaggcttacagtttgctcggcaaaccggaggtgatccgcttgttagtcggagtactcctagtcctagaggtagcaggttgatcgagttccag

SEQ ID NO: 36857 - DNA, 315 bp, Oryza sativa
  Clone ID: PAT_MRT4530_40641C.1
cagttgttcaggcgattgtgcagcagctacagctacaaccagtttgctgggcgtgctacttcgatcaggctcaagctcaagcccacagctatgttgcgccctaaactgtcccgtgcaatatccggtatttacccaagctacaacacctgctcccctgtagcattcctacccgtcggtggtatctggtattgaattgtacccctatagtagtaccacggagagaaaaataaagtcatgcatcatcgtgtgtgacaagttgaaacatcggggtgatacaaatctgaataaaaatgtcatcccaaatttaaaaaaaaa

SEQ ID NO: 36858 - DNA, 595 bp, Oryza sativa
  Clone ID: PAT_MRT4530_40642C.1
attttcttctttcctctcccttctattcctgcatgtagcgcctctccggatttgatgctcttactcaagtttaccgccaatatcactgcacccgcagctcatgctgcaacaacagatgcttagcccatgcggtgagttcgtaaggcacagtcagcacagtggcaacccagttcttccaaagcacccgtgtttcaactgagaaactgccaagtcatggcagcaggagtgctgccaacagctcaggatgatcgcgcagacaagtctcactgccaggccattacagtgttcaggcgattgtgcagcagctacagctacagacagtttggctggcgtctacttcgatcagactcaagctaaagcccaagctaggttggccctaaacttgccgtcaatatcggtagtctacccaagctacaagactgctccctgtagcattcccaccgtcggtggtatctggtactgaattgtaccagtatagtagtataggagacccaaaaaaagtcatgcatcatcgtgttgacaagttgaaacatcggggtgatacaaaatctgaataaaaatgtcatccaagtttaaacaaaaaaaaaaaaaaaaa

SEQ ID NO: 36859 - DNA, 795 bp, Oryza sativa
  Clone ID: PAT_MRT4530_40643C.1
atgggcagcgcccttttctccaccattgccacctcggtggaaagcctccgcgtcaccggcgccaacgccgacgtggacggcgtcgccgcggagaagaagccgccccgcaacgacaggaagaggaagaggaataagggcgcgagcgggaggacgtacgaggagacgcgcgccaggtacccgctgctcgtcgaggcggtggaggcgctcgccgctgccggcgagctcggtctgccgccgccgccgcacgtgcgggggcaccgtctcctgctggaacgcgtcagcgaggacgacgcgcggcggctcgagcgcaagctgaaggtggaagagctcgcgagggggaagttcgagcttcgccggcggcggctcaccgcgtcgttgaaggaggcgctggtcaaggccggcgggcgagcgccgaagcttgagacgatacaggaggaggaagacgacgacgacgacgactcccacggcgacagcaagaggaggaggaaggcggcggcggcggcggaggaggaggagtgcgggcgcgggaggcggcagtacgaggagatgcgggataggtacccgttactggtcgcggaggtggaggcgctcgccgccgccggcgagctcgcgctgccgccgcacgtgccggggctccgccgcctggtggagctcgtcggcgggtgcgacgcgcggcggctggaggacatgctgaagaatgatgcgctcatgaaggtcgtgaccaacctccagcgccggcggctcaccgtgaatttgatgtctgcgctgatcaagaccgaggagaagcacaaatga

SEQ ID NO: 36860 - DNA, 1563 bp, Oryza sativa
  Clone ID: PAT_MRT4530_40644C.1
acagcagcaatccaatctaatccacctccactcccccgccgccgccgcacctggactgcccggatccgccgccgctgcctcctctggggttgattgatggccacgccgttccacagcccgccctgcccaacagccgagcttctcctccaccgtctctagaagcttcaccccccccccccccccacgtcgccgcttcccaaaccctagcggagcgcctcgtcgagggtgagaaggagggtgggcatggataggatcgtcggggctaagtacaagctgggccgcaagatcgggagcggctccttcggggagatctacctcgccacgcacgtcgacacgtacgagatagtcgccgtcaagattgaaagcagcaaaacaaatcatccccagttgctttatgaggccaagctgtataatgctcttcagggagggactggaattgcaaacataaaatggtgtggcatcgatggtgaggacaatgtgcttgttattgatttgctggggccaagccttgaggatctatttgtttattgtggtcgaagattctcgctaaagacggtcttgatgttagcggatcagatgataacaagagtagaattcatgcattccaagggatatttgcacagagatatcaagcctgataacttcctcatgggccttggtcgtaaagctaaccaggtctacattattgactttgggcttgcaaagaggtaccgtgacgcaactactaatcgccacataccttatagggaaaataaaaacttgaccggcacagctcgatatgcaagttgcaacactcatcttggcattgagcaaagccgaagagatgatttggaatccattggttatgttcttctgtattttctcaggggaagtcttccttggcagggtttaaaagctgccacaaagaagcagaaatacgataaaataagtgagaaaaagctcgcaacacccatcgaggttttatgtaaatcccatcctgttgaatttgcttcttattttcattattgccattcattgacattcgatcaacggccggattatggatttttgagaaggctctttagagatttggctgaccgtgaaggttatcagtatgatcatgtttttgattggacactgttgaagtgcaaacaatcccaaaaagcaaaggctcaacaacaagatccaggtgtaagtagccgggcggttccaacgaatattgagaagcaccaagttagtgtgtcacgcccaacagaagcttctggtcagcttgaatcagagcaacgcccagcgattagaatgcaattcaaatctactgctgaaaacagtcgttcaagtaatcggcatactgacaaattgagagttggtactagcactgaaaatgtcttgctgcaatccacatcatttggccatgctgatgctccaaggaggaatatagcaatctcaaaaactcagggcctcgttgattccaatgctcatggaacgaacaatccagggccttctaatcacctttagcgtctgtatcagttcatgagagcatattggtccatgcagaacaccattggtcactgtatatgacttcgg

SEQ ID NO: 36861 - DNA, 634 bp, Oryza sativa
  Clone ID: PAT_MRT4530_40645C.1
gtgccaaatgcggagcaccacattgagtgccaccaaggttgtaggaacgtgcgttggttgaatcgtgccaaagggtgtctcgcgcggcgcaaaatgagtgcaaagcgtgccaagccctccgagcgtcaagtcgggcgcgaaggcatacgggatcctgttaagccccagtggcggtgattcgtaagcaccaagtgcagcacaggtgggcaaccccgcttgctggccaatcacccgtgtttcaactgagaaactgccaaagtcatgcagcaccagtctgccaacagctcaggatgatcgcgcaacagtctcactgccagccattacagtgttcaggcgattgtgcagcagctacagctacaacagtttgctggcgtctacttcgatcaggctcaagctcaagcccaagctatgttggccctaaacttccgtcaatatgcggtatctacccaagctacaacactgctccctgtagcattcctaccgtcggtggtatctggtattgaattgtaccagtatagtagtacaggagagaaaaataaagtcatgcatcatcgtgtgtgacaagttgaaacatcggggtgatacaatctgaatgaccaaatgtcatccaatttaaaaaaaaaaaaaaaaaaaa

SEQ ID NO: 36862 - DNA, 561 bp, Oryza sativa
  Clone ID: PAT_MRT4530_40646C.1
cccccccatgaaatcattttcttctttgctctctctattctccatcagcccctctgccatttgatgctcttactcaagtttaccgcaatatcagctccaccccagctcatgctcaccaacagatgcttagcccatgcggtgagttcgtaagcaccagtgcagcacagtgccaacccccttcttccaatcacccgtgtttcaactgagaaactgccaagtcatgcagcagcagtgctgccaacagcttaggatgatcacgcaacagtctcactgccaggccattagcagtgttcaggcgattgtgcagcagctacagctacaacagtttgctggcgtctacttcgatcaggctcaagctcaagcccaagctatgttggccctaaacttgccgtcaatatgcggtatctacccaagctacaacactgctccctgtagcattcccaccgtcggtggtatctggtactgaattgtagcagtatagtagtataggacacaaaaataaagtcatgcatcatcgtgtgtgacaagttgaaacaaaaaaaaaaaaaaaaacccgcggcc

SEQ ID NO: 36863 - DNA, 611 bp, Oryza sativa
  Clone ID: PAT_MRT4530_40647C.1
cacaatgaagatcattttcttctttgctctccttgctattgctgcatgcagcgcctctgcgcagtttgatgctcttactcaagtttaccggcaatatcagctgcagccgcagctcatgctgcagcaacagatgcttagcccatgcggtgagttcgtaaggcagcagtgcagcacagtggcaaacccccttcgttccaatcacccgtgtttcaactgagaaaactgccaagtcatgcagcagctgtgctgccaacagctcaaggatgatcgcgcaacagtctcactgccaggccatttacagtgttcaggcgattgtgcagcagctaccagctacaacagtttgctggcgtcttactttgatcaggctcaagctcaaagcccaagctattgttgcccctaaacttcccgtcaatatgccggtatcttacccaagctacaacactgctccctgtagcattcctacctcggtggtatctggtattgaattgtaccagtatagtagtacaggagagaaaaataaagtcatgcatcatcgtgtgtgacaagttgaaacatcggggtgatacaaatctgaataaaaatgtcatgcaaatttaaaaaaaaaaaaaaaa

SEQ ID NO: 36864 - DNA, 155 bp, Oryza sativa
  Clone ID: PAT_MRT4530_40648C.1
gctgggagagggcagacccctcaagaagttgttggaaccaagattgaatctggaagcacaaaatggcactggcaatgataccaatgggacattgcccaggcaaaagatggcctgtgtgcaacatgacactggtgcctggaaaccaccgggtgggt

SEQ ID NO: 36865 - DNA, 1965 bp, Oryza sativa
  Clone ID: PAT_MRT4530_40649C.1
gcttgttttagttcctaccatgtgtcctcccttggtctaggtggtggtggtggcacagcagaacaattccttcaaattcagtggtagcaaagaacatcggacatggagttctttacggaatacggggaggcaagccaatatcagattcaagaggtcgttggcaagggaagctatggagtagttgctgctgcagtagatactcacactggggagagagttgcaatcaagaagatcaatgatgtttttgagcatgtttcagatgccatccgcattctgcgggaaatcaaagttcttcggcttctccgccacccagacattgttgtgatcaagcacatcatgctccctcctacccgaagggagttcagggatatttatgttgtttttgaactcatggagtcagatctacatcaagttatcgaagctaatcatgaccttagcccagagcatcaccgttttttcttgtaccaacttctttgtgctctcaagtacatacattcagctaatgtatttcatcgtgacttaaagccaaagaacatactggccaattcagactgcaaactgaagatttgtgattttggacttgcacgtgtagcatttaatgattcaccatcaacaattttttggaccgattatgtggcaacaaggtggtaccgagctcctgaattatgtggttcttttttctccaaatacacccctgcaattgatatttggagtatagggtgcatttttgctgaaattctcaccggaagaccattatttcctgggaggaatgttgtgcaccagttagatctaataacagatctacttggaactccatcatctgaaactttatcacggattcgtaatgagaatgccaggggatatttaactggcatgcagaggaaacatcctatccccttttctcataagtttcataatgctgatcctctcgctttgcgcctgctagagcgtttacttgcatttgatcctaaagatcgacctactgctgaagaggctttagctgatccatattttagaggaatttctaagttgagccgggagccttcaagactgccagtttcaaaatttgagtttgaatttgagcgaaggaaactgacaaaggatgatgtaagagaaatgatatatcgagagatattagagtaccatccccaaatgcttcaggagtacatcagaggtggagaacaaattagcttcctctatccaagtggggttgatcgtttcaaacggcagtttgctcatcttgaggagaactacagcagaggagaaagaagtacccccttgcggagacagcatgcgtctttgccaagggaaagagtatgctcatcagtagatagcaataatcaagactctgacaatgaagagaggagagcgatatcttctattgcccgaactatgataagtcccccaagatcacaagaaaagggcaagaatctgtgcatctgcttatccaaatggcataatcaatctaaactccaatcctaagatctatttaaagagtgctagtatcagtgcttcaacgtgcatcattagagggaataaaggcccgaagagaatggtatctctgaggacatggaagaggttgtctatgagttgtcagataatgtgaccaggatgctctcctagggcatcagtaaccagcgttcagccggccatgatcttgatgcaattccaaattccaataactgtttataccatcagtatcatggatccttgcctatatctatagagctgatactctaggctcttagcttatatcacctattgatcatcttccaaaagcatcaagcttggagaaatgagttgtctttgtcaattcgaggccaaatttggcaactcggcttgttgtacatgcattttcctcatagcctggcagtgtgtgatgactctatctgccatatgaacaatctggcacttttttaccttagtaccatattaccgtttcagatcaaaaaaaaaaaaaaaaaa

SEQ ID NO: 36866 - DNA, 150 bp, Oryza sativa
  Clone ID: PAT_MRT4530_4064C.1
atgtctgagcgtccaagaggtataaagatacaaaggcaacatcttaatgaagtatccaaggtctttggtgctgagaatgcaaacaagttgaagcaatttctcccaccaggttcacagaaagtgtctggtttgagcatccaggaggtctga

SEQ ID NO: 36867 - DNA, 373 bp, Oryza sativa
  Clone ID: PAT_MRT4530_40650C.1
agctcaaggatggtatcggcgcacacaagtctcactggccaggccattaagcaagtggttcaggcagattggtcgcaagcaagctacaagctacaacagtttgctggcgtcttactttgatcaggctcaagctcaagcccaagctatgttgccctaaacttccgtcaatatcggtatctacccaagctacaacactgctccctgtagcattcctaccgtcggtgggtatctggtattgaattgtaccagtatagtagtacaggagagaaaaataaagtcatgcatcatcgtgtggtgacaagttgaaacatcggggtgatacaaaatcggaataaaaatgtcagccaaaatttaaaaaaaaaaaaaaaaaaaa

SEQ ID NO: 36868 - DNA, 2289 bp, Oryza sativa
  unsure (1)..(2289): unsure at all n locations
  Clone ID: PAT_MRT4530_40651C.1
atggccgggggaggggtcgtcgacggcgtccgcagatggctccgccgccgccgcggccgcaccgcctccgcctatcagcccttgcgctcgtcttccctggcgcgccaccctggcggcgacggtgggctcgaggtggtcccgggccccttcgcgctccccgccgccatccgcgtccctgcgcgcaactcgccgccgccgcccgacgcccagctcaggaacgaggtggtggtggtggcacagcagaacaattccttcaaattcagtggtagcaagtactataaggtggcttctggtgttggtattttgcaacaggatgatcttttctcccgctctgcttgtgctttccaagtgcttgaatatattcttaccgtgccatggcaaaagaattattctgtagaattgtcaattgtgggggttaggacctgggaacttaggagcttcatgaaagatgagatatttgttcatgataggtctaatgactctaacatggaggctagagatgatatgaaccaatggaattgtgcaatgagaacatcggacatggagttctttacggaatacggggaggcaagccaatatcagattcaagaggtcgttggcaagggaagctatggagtagttgctgctgcagtagatactcacactggggagagagttgcaatcaagaagatcaatgatgtttttgagcatgtttcagatgccatccgcattctgcgggaaatcaaagttcttcggcttctccgccacccagacattgttgtgatcaagcacatcatgctccctcctacccgaagggagttcagggatatttatgttgtttttgaactcatggagtcagatctacatcaagttatcgaagcaaatcatgaccttagcccagagcatcaccgttttttcttgtaccaacttctttgtgctctcaagtacatacattcagctaatgtatttcatcgtgacttaaagccaaagaacatactggccaattcagactgcaaactgaagatttgtgattttggacttgcacgtgtagcatttaatgattcaccttcaacaattttttggaccgattatgtggcaacaaggtggtaccgagctcctgaattatgtggttcttttttctccaaatacacccctgcaattgatatttggagtatagggtgcatttttgctgaaattctcaccggaagaccattatttcctgggaggaatgttgtgcaccagttagatctaataacagatctacttggaactccatcatctgaaactttatcacggattcgtaatgagaatgccaggggatatttaactggcatgcagaggaaacatcctatccccttttctcataagtttcataatgctgatcctctcgctttgcgcctgctagagcgtttacttgcatttgatcctaaagatcgacctactgctgaagaggctttagctgatccatattttagaggaatttctaagttgagccgggagccttcaagactgccagtttcaaaatttgagtttgaatttgagcgaaggaaactgacaaaggatgatgtaagagaaatgatatatcgagagatattagagtaccatccccaaatgcttcaggagtacatcagaggtggagaacaaattagcttcctctatccaagtggggttgatcgtttcaaacggcagtttgctcatcttgaggagaactacagcagaggagaaagaagtacccccttgcggagacagcatgcgtctttgccaagggaaagagtatgctcatcagtagatagcaataatcaagactctgacaatgaagagaggagagcgatatcttctattgcccgaactatgataagtcccccaagatcacaagaaaagggcaagaatcgtgcatctgcttatccaaatggcataatcaatctaaactccaatcctaagatctatttaaagagtgctagtatcagtgcttcaacgtgcatcattagagggaataaaggcccgaaggagaatggtatctctgaggacatggaagaggttgtctatgagttgtcagataatgtgaccaggatgctctcctagggcatcagtaaccagcgttcagccggccatgatcttgatgcaattccaaattccaataactgtttataccatcagtatcatggatccttgcctatatctatgagctgatactctaggctcttagcttatatcacctattgatcatcttccaaaagcatcaancttggagaaatgagttgtctctgtcaattcgaggccaaatttggcaactcggcttgttgtacctgc

SEQ ID NO: 36869 - DNA, 150 bp, Oryza sativa
  Clone ID: PAT_MRT4530_40652C.1
atggactacatggatcctgtatctggtccaggagaggagaagccgctgggcataggcagcgtacctacctacgtacgctgggagcgcgtggccaagctgcgcgacgcgtgcaactgggcgctggattttcttaagacccaaggaaattaa

SEQ ID NO: 36870 - DNA, 1332 bp, Oryza sativa
  Clone ID: PAT_MRT4530_40653C.1
atggcgaagagatcgtctcctgatcctgcatcatcttctccatctgcatcatcctcgccgtcgtctccttcctcctcttcctccgaggattcctcttcgcccatgtcgatgccctgcaagaggagggcgaggccgaggacggagaagagcaccggcaaggccaagaggcccaagaaggagagcaaggaggtggctgatccttcttccaatggcggcggcggcggcaagaggagttctatctacaggggagtcaccaggcatcggtggactggcagatttgaggcccatctgtgggacaagaattgctccacttcacttcagaacaagaagaaagggaggcaaggggcttatgatagtgaggaagcagctgctcgtgcatatgaccttgcagctcttaagtactggggtcctgagacagtgctcaatttcccactggaggaatatgagaaggagaggtcggagatggagggtgtgtcgagggaggagtacctggcctccctccgccgccggagcagcggtttctccaggggtgtctccaagtacagaggcgttgccaggcatcaccacaatgggcggtgggaggcacggatagggcgggtcctggggaacaagtacctctacctgggtactttcgatactcaagaggaggcagccaaggcctatgatcttgctgcaatcgaataccgaggtgccaatgcggtaaccaacttcgacatcagctgctacctggaccagccacagttactggcacagctgcaacaggaaccacagttattggcacaactgcaacaagagccacaggtggtgccagcattacatgaagagcctcaagatgatgaccgaagtgagaatgcagtccaagagctcagttccagtgaagcaaatacatcaagtgacaacaatgagccacttgcagccgatgacagcgccgaatgcatgaatgaaccccttccaattgttgatggcattgaagaaagcctctggagcccttgcttggattatgaattggatacaatgcctggggcttacttcagcaactcgatgaatttcagtgaatggttcaatgatgaggcattcgaaggcggcatggagtacctatttgaagggtgctccagtataactgaaggcggcaacagcatggataactcaggtatggcagaatacaatttgtttgaggaatgcaatatgttggagaaggacatttcagattttttagacaaggacatttcagactttttagacaaggacatttcaatttcagatagggagcgaatatctcctcaagcaaacaatatctcctgccctcaaaaaatgatcagtgtgtgcaactga

SEQ ID NO: 36871 - DNA, 1175 bp, Oryza sativa
  Clone ID: PAT_MRT4530_40654C.1
atgctgattcacggggagggctcgtcgtcgtcggcggcggcggcgggggggaagcccgtgccaccccccccacgagcagctcgaggaaggagggcgaggagcttgattcgatggggggggaggccgcgtgcggcagcttctcgtggccgtcgagcccggcggctgcactagcgtagcgtagtctgttgcacgtgtagcgaggggagaagaggacgcagatcgggggggggaggacagggaccggggggcgtggatgccggcggcgggcgagcaactagggggggcggtggtggggaaggcgccggggcactggagggcggtcggggacgaggcgccggggcggccggtgaagtcgcgcggggcgcggtagtggtcgcagatcagcacctcggtcccgcggaggacgcggacgtcctccgagggcgcgctgctccaacccgcacgcgccccacccggaacaacggcggcgaacttccccggccgcctacacgatcgcgcccccccccgcgccatccgccaggagcagggcctcgctcgaccgcggcgccgccgccgcggccgcggaagcggcggcgggcagctgttccgccccgtgccgcgccccggcggcttcgacgccatcagcgcggcggacgtcgtgcggccccgcggcggctgcatccgtgtcgtaccagtccatggatctcaccgaggaggccgacaacgacgacgagggcaccagcgacgactcggtggcgatccctgcgcagtcgtcgccggcggcggtcgtcgctggtgtccctgtgcttccgccgccgccgcccccggccaagaggctgtgcgtggcgccgcccaccggcgtggagcaccgggctccgccgcccgacccgcctacgtcgctgtcgctcagcccgccgggcgccgccgccgccgccatctcagcctccaccgtggtcggcgggtcgtcggcggcgcgcgcggaggaggaggccgtggcgagggagaaggcgaggatggagcaggacccgtggctgatggcgatgatgcggcagatgatcaccgaggaggtgcagcggcaggtgagcgtggtgtactcgctggtggcatcctccgcggcgatggcggcacagacgggcaacgccggcggcgtcggccggaaagggcccgacggccgcccatccaacggtcaggattga

SEQ ID NO: 36872 - DNA, 1797 bp, Oryza sativa
  Clone ID: PAT_MRT4530_40655C.1
atggcgaagagatcgtctcctgatcccgcatcatcttctccatctgcatcatcctcgccgtcgtctccttcctcctcttcctccgaggattcctcttcgcccatgtcgatgccctgcaagaggagggcgaggccgaggacggacaagagcaccggcaaggccaagaggcccaagaaggagagcaaggaggtggttgatccttcttccaatggcggtggcggcggcggcggcggcaagaggagttctatctacaggggagtcaccaggcatcggtggactggcagatttgaggcccatctgtgggacaagaattgctccacttcacttcagaacaagaagaaagggaggcaaggggcttatgatagtgaagaggcagctgctcgtgcatatgaccttgcagctcttaagtactggggtcctgagacagtgctcaatttcccactggaggaatatgagaaggagaggtcggagatggagggtgtgtcgagggaggagtacctggcctccctccgccgccggagcagcggtttctccaggggtgtctccaagtacagaggcgttgccaggcatcaccacaatgggcggtgggaggcacggatagggcgggtcctggggaacaagtacctctacctgggtactttcgatattttgtacaatctatcacaaaactacagatttaagaacttgttttacaaaaatacagattcagtggcttcgtttatcacaaaactacagctcagtgacacagaggccaagctacctgcagatactcaagaggaggcagccaaggcctatgatcttgctgcaattgaataccgaggtgccaatgcggtaaccaacttcgacatcagctgctacctggaccagccacagttactggcacagctgcaacaggaaccacagttactggcacaactgcaacaagagctacaggtggtgccagcattacatgaagagcctcaagatgatgaccgaagtgagaatgcagtccaagagctcagttccagtgaagcaaatacatcaagtgacaacaatgagccacttgcagccgatgacagcgctgaatgcatgaatgaaccccttccaattgttgatggcattgaagaaagcctctggagcccttgcttggattatgaattggatacaatgcctggggcttacttcagcaactcgatgaatttcagtgaatggttcaatgatgaggctttcgaaggcggcatggagtacctatttgaagggtgctccagtataactgaaggcggcaacagcatggataactcaggtgtgacagaatacaatttgtttgaggaatgcaatatgttggagaaggacatttcagattttttagacaaggacatttcagattttttagataaggacatttcaatttcagatagggagcgaatatctcctcaagcaaacaatatctcctgccctcaaaaaatgatcagtgtgtgcaactgattctctctgtgtgtgtgtttctgggtgttgaaaatcttgagatatacagggaagttttcaggtttttatcttggggtatatttctctgtccatggcactgccacaaagaagcaagcttctgtaggcgttctgttcaggtggggaagacttcatatgcttctccctatggtcctagtctcctagaaacccaaggcattcaacttggcatgagacaagtgtctgtgttccttttcttgtaatacccacaaggctgattgattaactagggagacattttctcccttaccctagattgagctagttaattctgattactcaaaaaaaaaaaaaaaa

SEQ ID NO: 36873 - DNA, 353 bp, Oryza sativa
  Clone ID: PAT_MRT4530_40656C.1
gcacgagggcgacttcggtcgagttccaactccggcactgctccccccgcttgctacccacttcctggatcgaccacgctcacgtacgagctccgaccgcgccatcgcaggcgccgccctttgagatttgagcagccaccgccgtaatacgatccgcacgacggtcgagcgttcttgaggttgtttgttcctggcgttggatctgcttgccagtttgtgcagatctgttgtcacgcaagaacgcgcaggatgttagttcctcatttcagaagctgggatcatgcgctagttcctccggccgccggcgaggcggcggcgacccaactgcctctttcctcgcctgaggtctccca

SEQ ID NO: 36874 - DNA, 381 bp, Oryza sativa
  Clone ID: PAT_MRT4530_40657C.1
tttagatgataatagttatctagggctacggggatatgctgtaggtggtaatgctatgctgacttacaggaagcactggctatctctcggtctggagacagcattggctacgagaagttatattagctgtagaagatcccatatgattgaaaaaaaccatggattaagacagaatgtaagcatgatgagagcatgttgctggaatcaaaccccacttttgtataatggtatggaaaccctgatgacaatggtctacatacctattagggatacagggtgtacgctaagccaggggagtaccgacatttcactagcaatgataaagccttgacactataatacgcttcaaagcatgagcaatatgttgactgtgttggtgga

SEQ ID NO: 36875 - DNA, 493 bp, Oryza sativa
  unsure (1)..(493): unsure at all n locations
  Clone ID: PAT_MRT4530_40658C.1
tctttttttaccttgtgacagatctnaggttgaaggcggtcttatggaaaactgggggggcttgtactgcggctctttctcaacctgctttggtgggaaaaggccattttgggtgcatgagtgggaaactcatggaacatgtggttaccctgaaatacaggatgaatacgactacttctctacagcactgtacctttacagcaaatataatgtgacgaaagctctgaagaaagcacatatttatcctagaggaggcaggaaatacttagttggtcatatcgtctctgctattgaattttcctttggggcaatgccatctattgtgtgtaaaaacggctcagttcaagaactgaggctctgcttccacaaggattatcagcctcgcgattgcttagttgagggtgagaactctgttagaagaaaccattgccctcgatacgtcactttaccatcatataaaccacatgcatttggcaattctacagaaggaatc

SEQ ID NO: 36876 - DNA, 323 bp, Oryza sativa
  Clone ID: PAT_MRT4530_40659C.1
gggaacccccatagtcgccaaagcgaccagctgtttatttaatcgataacccacggttttaatttacctttaattagtacacacacaaaccacacttttttgggtggtttttattggggactaattaagggaggtgactccccggcggggagggttcggttgttttgtaacttcactggcccaactttcagtggggccaaaaacaattggggccaaattttcacccgccgttttcctggcgggggggaacctcctaaaaggggtttttttggggttaaactttgaccaccccataggtggaaccttttttaacccactggttt

SEQ ID NO: 36877 - DNA, 632 bp, Oryza sativa
  Clone ID: PAT_MRT4530_4065C.1
atggaggaggaagaagaagaagaggaagaagaaaagaaagaaagaaagaaagagcgtgtggtcgaattaatatccatggaggacgagaggtggaagctgtcgagcagcaaggggaggagcaaatcgggcagatcctgcagcagcagcagcaactactactaccactcctccgatttcaacagcagcaacgccaccacgctcagccggagctactccgccagcgtcaccgccagcaggcacgctaccaccgcttggtccgccgccggcgccggtggtggtggcgccagcagcagcagcagctcgcagcatcagcatcagcagcagcagcagcagagcaacaattcgcagcggctgtcgaagaagtgcgtggaggcggtgaaggagcatcgcgcgaggttctacatcgtccgccgctgcgtctccatgctcgtctgctggcgagactactagctcagtctcctcttccttcttctttttcttcttcttctagctcagtttgattcaattttatttatttgtttcccttccataatactccattgctagctccatgcatcatcatcatcatcatcatcgatctctgtgtgtttctgcctgcatcttaatttgttctttctgtaattaatcttgca

SEQ ID NO: 36878 - DNA, 2220 bp, Oryza sativa
  Clone ID: PAT_MRT4530_40660C.1
atgactagccacagaggactaacaacaacaacgctgtgcctcgccatagcgattgctgcagagctcctcgctgggagagcagaggggcaatgccagaacaccaagtgtggcgacgttgagatcccttacccattcagcaccagcttggacaagtgcgccgcgtccgccttcgaattcgactgcaacgacaccggcaacggcgtctacaagcccttctacggaaatgtggaggtgctcagcgtctccctccagcttggccaggtccgggtgatgaatcacatctcctcttcctgctacaacttatcttctaaggagatggactccgacacgtggcagctcaacatgactggcacgccgttcatgctctccgactccaacaagttcacggtcgtcggctgccggacacaagcctacatcgccgaccaggattacgtggggaagtacatgagcgggtgcgtgtccgtgtgccggcgaggtgatgtgtggaaggcgacaaacggcacctgctccgggataggctgctgccagacggccatcccaaagggcctggattactaccaggccttcttcgacgacagcagcatgaacacgtcggggatctacaaccgcaccccctgcagctacgcggtgctaatggactcctccaacttcaccttctcgaccacctacttgactacatcggaattcaacaacacctatgatggccgggcgcctatggtgctcgattgggccatccggagcgccaacagttgtgaggaggcatggaagaagatggactcttacgcgtgcaaaagtaccaacagcgagtgcttcaactcaaccaacggacctggctacacctgcaactgctccaaagggtacgaaggcaatccttacctcgaaggacccaacggctgtcgagatattgatgaatgtcaagattccaagactcatcattgctatggagaatgccgtaataaacctggcggttttgattgtaactgtccagcgggcagcaaaggaaatgctaccattccagatggatgccgaaaagacttccgcttgccgctaaaagcacgactggcaattggagcggttatctgcgtattagttggcctctttagtttccttggatgggaagtgatacgccacaaaaggagcataaaaaaacaagcactattaagacagactcatgaattttttctacagcatggtggccagctacttctggaaatgatgaaagtagagggtaatgttggattcaccctctatgagagaggggagattgagactgccacaagtaacttcaacaaggaacacatcatcggtgaaggtggccagggaactgtttatagggcggccttgaacggagttaatgttgcaataaaaaagtgcaaggagatcgacgagagcagaaagatggaatttgtgcaggagttggtcatactttgccgtgtcaggcatcccaacattgtcaagctacttggatgttgcctccagtttgaggcgcccatgcttgtgtacgagttcgtgcagaacaaaacactacaagagttactagatctccataggagcaagaggttccatgtaactcttggaacccgcatgaggatcgctgcagaatctgccgaggcacttgcgcatcttcactcgttgccacaccctataatccacggcgatgtgaaaccatccaatatcctacttgctgagggattgatcgcaaaggtgtctgactttggctgctcgacaatcgatgagaatactcaagctgtacccaaaggaacaccagggtatattgatccagactacctactagagtaccaactcacatctaagaatgatgtatatagtttcggagttattcttcttgagcttctaactagtaagaagccgctgtcaaaagataggaagagcctcaccttgatgtttcaggaggcaatggcagagggcacactctttgagctccttgatagtgacatggttgatgaagctagtatgagagtgatgcatcaggcagctgttctagcaagtcaatgcttggttgttccaggtatgacaaggccgacaatggtgctggtggcagcggagctccggcgcctagcactagctgatgaagtgcaacaatgcccacaaccgccgcttgtacttgaggatttgagctttgtggagatgggaagcacaaccagtggagtttatagccttgagaagaaagctgtgttgagcatagaatttgcaagatga

SEQ ID NO: 36879 - DNA, 367 bp, Oryza sativa
  Clone ID: PAT_MRT4530_40661C.1
aaaaaaaaaagatgctccaatctgttcagattgatggtggatgcgatgaagtgatctggccttacactaaacataagtcctttactgccaagtcaatgtacaatctgctaacctttgggggattaaggattcagacatgtaggctgtttggaagagtagaattcctctcaaaatcaagcattttctatatttatctgggagaggaaaacttccttgtgctaatcaattagttaaaaggaaatggaagggtgggaatgagcttttcctaaggggagaagagcaaaaggtgctggatggctggcatgaagccattctggacaaattgtatcaagtgaagccgtctgttcttcccgcagccatttagctc

SEQ ID NO: 36880 - DNA, 294 bp, Oryza sativa
  Clone ID: PAT_MRT4530_40662C.1
atggctttcaaggccaacacggtgtcaacatcttcaatgcatccaacttttgcacaggacaccggagctgggaggtcgcggcggaggcattccaactctgtccgcgtcggaacagtgacgcgtggtccacgaccgcatccgtgcgctgggcgaggtgaggtgacgacactaccagccgctgctcggcacgacggaggcacgccggatgagggaggtgaccctgccaccgccgtcgaggctgtgacaaacatgtcaggtgaggccgtcttcgtcgggatgccagtctgcgtgtag

SEQ ID NO: 36881 - DNA, 401 bp, Oryza sativa
  unsure (1)..(401): unsure at all n locations
  Clone ID: PAT_MRT4530_40663C.1
ccctctacatctaccgccctctcccttttttttttttttttgccaaacacaaaaagtctgcttggtttaaacagggggtccttccccatctcctcacanaacacaacaccaactctatcattatctctccaactaaacccatctggcccgcccaaagacaacgcactctctggccacaaattcacgcaaccaccattaacccctgctaagctacggtgccccactccactttccggggacgaagaaggtggcgtacccccaagcgttttctgatacctggcccaccactgaagtcagcgagggtctccagggggcccttgccctatacgcttgcctggacgaagtagcccaacattcacaacatggcaaggcggccgctcttgatctactttacctttagc

SEQ ID NO: 36882 - DNA, 1190 bp, Oryza sativa
  Clone ID: PAT_MRT4530_40664C.1
gcccgggctgcaggaattcggcacgcggcacgaggggacacttgatcagtttagctctcttgctcctctagctaaccactctactatacacacacatatatacttttttcttggtgtattagtaagcacacctcctcatcgacatcaatggccaccgtagaggttgagaccccgaccaccgtgctggccgaggaggcgccagtggaggcgacgccggcggccgccgccgccgaggtggaggcgccgaaggaggagacgccggcggcgccggccgaggctgtggccgaggaggcggcgcccgccgaggccgaggtggcggagaccaaggaggcggagccagctgcggccgagccggcggcggaggaggtgaaggaggccgagcccgagccggccgagccggaggccgagcctgccaaggaggaggtggcgccagagcccgccgccgccgccgaggcggaggccaaggaggccgagccggcggcaccggtggccgaggaggtgaaggaggaggaggcggcgccggcgccggccgccgaggaggtgaaggtggaggaggcggcgccggtcgcggagccggaggccgagaaggccagcgagtgagtgcatgccggggaaggctggctcgccgtcgtcgtacaccgtggagtacatgcatggcccgcgcgcgccgccgccgccggcgactcgccggagttgtacgtacgtgtgcgtgtagcgagtgatgagttgagtgagctggagtggtagtactcgactccgtaggtgtgtgtgggtacgcgtgacgtggggctaaataaaagagtttgtcatcgagggcggtggggcccagcgtcagtgacgcggtgcccctctctggcccccacatgcctccgtcgtcgcaggcgttgtttgtcggtcttttgtgctttttttttttcgtgtttgattggttttcatcgtgtaatgggtgcgtttctgagagtacattgtctgtctctatgtgtgtgcgatctcagccgttcatggccgtgtgccaaccatttctcgccgtcggtgaacctaccgtcttgtgtgttgttgttttgatcggttcgtcgtgtatatatgggtgtgtcacgttctgagagtaaaaaaaaaaaaaaaaaaaaaaaaacgagagggggaccaaaaaaaaaaaaaaaaaaaaaacggtaggtaaagaagggcggccg

SEQ ID NO: 36883 - DNA, 396 bp, Oryza sativa
  Clone ID: PAT_MRT4530_40665C.1
atgaggagccacaagtccatgggcatgcactgcgccttgtgcattccagtccagcacttggctcacgcgagagctgtagttggccgcgccgcacacagagcaccgtcggaactcatgccgacgggtctccctccggccgcaccacatttgggagcagagttggagctcgctgtggccattgttgtcgctggtggctgttgttgctactactggcgcctcgaggtcaagtttcttggccgtcgcctgcacgccacaggacatgctcgagtcggccatgaagaggttggccgggtagggctccacctccgggaggctccacctgaagtcggagagaagcgggcagccgctgatggcgccgcctccagtgaggtggagggatgcgaaggggcgccgtga

SEQ ID NO: 36884 - DNA, 414 bp, Oryza sativa
  Clone ID: PAT_MRT4530_40666C.1
ctaggataccagaagaacaagggagtcgaaacccttgcgaagatgctctggcaggcaagcccgagcagtcagccaccagacctgaagtgagcagccatgggaagtggcgaggtccggccagctaggaggagaaagaacattgcacgagaccgtcttaagctcttgggtgtagaaaggatagtccgagtgtctgtcaatgccacgcttttgtaggaggtcagccttccagcaacgctgttggagcgcaaggctgatctctcgtccagcgcgagacaagttcgtcttcagtgctcggagagagttggacaggaagcaccatgtcccgaaagcaccaggaacatcccctagcacgaagaaggtggatgccgcaaatatgtaggagacgcttagctcgacggaggccttcagacccat

SEQ ID NO: 36885 - DNA, 541 bp, Oryza sativa
  Clone ID: PAT_MRT4530_40667C.1
gggccaaaaaaacagccccacaatttcccaggggttaaaacaaaaaaacccacccggcaaacaaaaaaggggaggggaaccgacattaagttttgacccccccaaattaaaaaaccccccaaaccccccaaaagggaaagcaactagcaaccccctttttactaaggggggggaaccccccctgcccccgccttggaagtccaaaaaggcccggccaacttaaaaccgacattttccttggaggcaccggggacccccataaacttcccaaaaaaaaacttgggggccctaaaaaacctcccccgggggaagaacccatttgggaaagggaaaaaacctggaaggggacttcccaaacccctttccaaagacttcagggaagaaatttgaaaccaggtctttcaaaacacaaggggaggccgggggggccaaaaacccaaccattttccgggggaactgccggaactggctaccctgagcgaaacagggacccttcacccgattggggcgggccttggggaaaccaaggcaaaacaggggg

SEQ ID NO: 36886 - DNA, 1242 bp, Oryza sativa
  Clone ID: PAT_MRT4530_40668C.1
atggactccagcactaccgaaaccgaagagagagagagagagagagagagagagagtagtcgaaaaccctggagttctgctccttccacagttgctaggataccagaagaacaagggagtcgaaacccttgcgaagatgctctggcaggcaagcccgagcagtcagccaccagacctgaagaggtcagccttccagcaacgctgttggagcgcaagctaaaggaaaagcttgcacttagcaggacctttgaccgaccaaagcaaatcagcgcaagcgaaggagtgatggccgagaagaaagcctgcgcgagacaagttcgtcttcagtgctcggagagagttggacaggaagcaccatgtcccgaaagcaccaggaactgggggatggacgagacaggtagtgggccatggatgtcccacagccaagagttgccgtctagaaaagagctgacgtaccatcccctagcacgaagaaggtggatgccgcaaatatgtaggagacgcttagctcgacggaggccttcagacccatccagtaggagtggccagagcgctgaagccagagtcagtgaagacgtagagcgaaacccgttgtactcaaaaactacccggaattactacacaagcgtgcgttgcctgctacagtacagtgggattaataactggcacagtcgacacagctgctgcccacgtcttacaacaatgctcctttctcaactactacacggccatggtatcgatcggccgatgaactgcatggttcaagagttcaactcatccgtgcatgcactgccggccgcgatgccgttgcgtaatcacaaaattaacgtaccacgtaatgtgggcaccgtatctgtgtggcaacgacgcgagatccacggaggatcgatctgtgtgggggcgaccgcacgggatgatgcatcttcccgttcggtcgcgttaagtcgactgcacgggataatgtatcttcacgttgctgctgtggatttggaccagcagcagcaggcatgtacaaccctacccaaaacaaatcctgatgctagttgcacggaacaatatgtatattccaacacgccagtacatctgtacatatatgcatccatgttcggaacatgtggctctgcagaaacgggaaacgtaggggaggcccggaggccggagcccggaggcgagactcgagagagggataagaaaggaggcgagcgcgttgccgagccgagcgggatgcccgaaacgagacgg

SEQ ID NO: 36887 - DNA, 373 bp, Oryza sativa
  Clone ID: PAT_MRT4530_40669C.1
gttgtcccttactgggacgtccatcactctggaggtagaatagggtgacaccatcaacaacgcgcactccacgagccaggataaggaggtcattcctgagaccagaagagctaatgttgccggaagaagatgcgtattagccgacctttgccgactataacatgcagaaggagtccaccctgtaccttgtgctgcgcatacttggtgagatctgagcgcgtgctgtggtgcagatttggacttcattatacctatgccggtcgtctgtcatatcatcgagtcatgggtgtgtcgtctcctggtctagagcccctaggcgatgttgatactagtatgcatgctagtgcaacatgcctaactgtgcatcggtacc

SEQ ID NO: 36888 - DNA, 442 bp, Oryza sativa
  unsure (1)..(442): unsure at all n locations
  Clone ID: PAT_MRT4530_4066C.1
gttcgcccttccgcaatcgacacacgtcatagtttgccaccccttccgccatcaattcaagcgatgcatcccaacgtcttcgctggtggtgctgtactgctgtctgccgtcattgacgcaactgatccaggacccatactgcagaaaccaagatgaatgcaaactctggaggaaccttgccaacaaccaaggcaccatcgacatgttgacaatggaacatgcatcgatgcccaatgaaactgaaatttcatccacatattccaccacggtttagttcttgaaaattttgatgatgatatcagcatatgttagcagttctaatagtccatanatgtgtgttcattaacgacagcatgactgaaaccgttcaatccaaaagaagatggatggaatttccaattcatttcaaaaaaaaaaaaaaaaaaaaaaaaaaaaaaaaaaa

SEQ ID NO: 36889 - DNA, 2094 bp, Oryza sativa
  Clone ID: PAT_MRT4530_40670C.1
cccacgcgtccgcccacgcgtccgcccacgcgtccggcggaggagatccccaaccacaactactctccctcccgccgccgccaccgtagtctaccctactcccgcaccgcagccatggtgtccgacgccagcaagaagaaggcggctcagaagaaggccgccgccgccgccaagaggggcgccaaggcctcctcctcctcctcctcttcctcctccgccgccgataaagcggccaacggtatcgccgcgcttaagctttccgatcgcacctgcaccggagtcctcgcctcccatccgctctcccgcgatatccacatagagtccctctcattaacatttcatggccatgaccttattgttgattctgagttggagctcaactatgggaggcgttacggtttgctcggcctaaatggctgtggcaaatctactctgctcacagccataggctgcagggaactccctatccctgaacacatggatatttaccatctctccagtgagattgaggcttcagatatgtctgcgctacaggctgttatctgttgtgacgaagagaggatgaagttggaaaaggaagctgaaattttgtctgctcaggatgatggtggcggtgatgctttggatcgtatatatgagcggttagaagcacttgatgcatctactgctgaaaagcgtgctgctgagatattgtttggtttgggctttaataaacaaatgcaggcaaagaaaactcaggatttttctggtggttggcgtatgaggattgctttggcaagagctttgtttatgaatccaaccatccttttgcttgatgagccaacaaaccatcttgatcttgaggcttgtgtctggctggaagagacactaaagaagtttgatcgtatacttgttgtcatatcacactcacaagatttcctaaatggagtttgcactaacatcatccatatgcagagcaagaagctcaagttatattctggtaactatgaccagtacgttcaaactcgttctgagcttgaagagaatcaaatgaagcagtacaaatgggagcaggaacagattgcttcaatgaaggagtacattgcacgttttggccatggatctgcaaagcttgctcgtcaagctcagagcaaagagaaaactcttgctaagatggaacgaggtgggctcactgagaaggttgtcagggacaaggtactggtgttccgctttacagatgttggcaaacttccaccaccagtgctgcagtttgttgaagtctcattcgggtataccccagataacctcatctacaagaatctcgactttggtgttgatcttgactctagaatcgcactggttggccccaatggtgcgggcaagagtactcttctgaagctcatgacaggtgacctagctccattagatggtatggtcaggcgccacaaccaccttcgaattgcgcagtatcatcagcatctcgcagagaagctggacctggacatgccggccctacagtacatgatgagggaataccctgggaatgaggaggagaagatgagggctgcaattggtaagtttggcctgtctgggaaggcgcaggtgatgccaatgaggaatctctctgatgggcagaggagccgcgtcatctttgcgtggctggcttacaggcagcctcaactgctgctgcttgacgagccgacgaaccatctggacattgagaccatcgattctctggctgaggcactgaacgagtgggacggtggtttggtcctggtgagtcatgacttcaggcttatcaaccaggttgctcaagagatttgggtgtgcgagaagcaggcggtgaccaggtgggaaggtgatatcatggacttcaaggagcacttgaggagcagggctggtctctctgactagttctatctgcccttcgtttttatcttcctctcttgacagctcctcggaggtttattataatagccaaaccaagttttgtcttgtatcttggagtctaatttatttgtagtagcctgctatcttaattatcactattgcacttggagagttataagagattatatatttttttcttttaaaaaaaaaaaaaaaaaaaaaaaa

SEQ ID NO: 36890 - DNA, 293 bp, Oryza sativa
  Clone ID: PAT_MRT4530_40671C.1
cccacgcgtccgcccacgcgtccggttctagatcgcgagcggccgctcgcgatctagaacggcaaaccaaaaataaaagcacaaagggacgcttaaatacataaaaagaagatatattgacatttaaaaaaggtgtatggattacatgtatataatcctcgcaaaaaaatgcatgtatatattgtggatttagccatctattttccctgctctttcatgccttcaaaagggccagcggtcacttggtattgtgtgggtgctctgcacatgggtatttttataaatatgtaaat

SEQ ID NO: 36891 - DNA, 451 bp, Oryza sativa
  Clone ID: PAT_MRT4530_40672C.1
gccaacccccttctcccaatcacccgtgtttcaactgagaaactgccaagtcatgcagcagcagtgctgccaacagctcaggatgatcgcgcaacagtctcactgccagcccattaccagtgttcaggcgattgtgcagcagctacagctacaacagtttgctggcgttctaccttcgatccaggcctccaagcctcaagccccaagcctattgtttgcccctaaaccttcccgttcaatatgccggtatctaccccaagcctacaacacctgcctccctgtagcattcctacccgtcggtggtatctggtattgaattgtaccagtatagtagtacaggagagaaaaataaagtcatgcatcatcgtgtgtgacaagttgaaacatcggggtgatacaatctgaataaaaatgtcatgcaatttaaacataaaaaaaaaaaaaaaaaaaa

SEQ ID NO: 36892 - DNA, 385 bp, Oryza sativa
  Clone ID: PAT_MRT4530_40673C.1
tgcaaacaaaaagccatggcttccaacaagggaaagacctcggagttgatcctcatcatcagcatacgtgctcgccgcgacggcgaccatggcggaccaccacatagaccagccggtgtacagcctacgcgagcgttgtcagacaggaatgggctacccgatgtactcgctgacacgctgccaggcggtggcgaaccgccagtgcgcgagccacggtgcacccggtggagacgtggacgagcatctccggcaggactgctaacggcagtttgccgcggtcgacgacaactggtgcaagtgctcggcgctcaaccacatggccggaggcatttacaaggagctcaacgccaccgatgatcgccaccccatggcccaagtgttcccc

SEQ ID NO: 36893 - DNA, 362 bp, Oryza sativa
  Clone ID: PAT_MRT4530_40674C.1
gggatgatcgcagcaaacaaggtccgtcaccatggccaggcacactttacagtggttcaggcgattgtgcagcaagctacaagctacaaacagtttctggcgtctacttcgatcaggctcaagctcaagcccaagctatgttgccctaaacttccgtcaatatcggtatctacccaagctgacaacacggctgccctggtagcattcctaccgtcggtggtatctggtattgaattgtaccagtatagtagtacacggagagaaaataaagtcatgcatcatcgtgtgtgacaagttgaaacatcggggtgatcacaaaatcggaataaaaatgtcatccaatttaaaaaaaaaaaaaaaaa

SEQ ID NO: 36894 - DNA, 1419 bp, Oryza sativa
  Clone ID: PAT_MRT4530_40675C.1
gcacgaggctcaatcatctggggcttgcccgcttgggagcagagctttgtagagcaggagcaacacactgatatcttctcgacttgtccctgcagtccgcagacaccagccactgataccggccacgctgagccatcaagagttgaccacgcctccgttcctcgaagctctgccctgtctgctcagaatcagattgatgatgagctaggcggccacatctcttcaatcttcacttgatcatcatagtagttcatcgattgcttggagtgatttcccaagtacggcagggaagcatcaaggtttacataattaccgtatgagaaagaatccaagtcattgaaacgtggagcgttggatcaccatcggacggcccatgtagcccaactccttcgctgccacgcgacgccccaggcccagcccaagccaaaaccaaaccaaacaaaccccgtcgtcacctatccaaacagataaggccccgcgcgcacgccccgcgcgcgcgcaaaccaaagcctctccatggacaccaccgcgtcatggcgcctcctccccccggccgcctcctcgccgccgcccaggaggcaggcggctcttctccggcgccacccggcggccaccaccacctcctcctcctccggcaagcggacgacgaggctcctctgcctcctccatgacacgcctcctcctgcaccgccgcccgccgctgacgagatcagctcgccgccgctgcggaagctggccgcggcgctgcagtgcggtgccatctgggcagcggttgaggccccggcggcgctggcggtgacgggcgaggaggacctcgacatcctggggatcctgccgacggtggccgccatcgccttcgtttacctgttcgtcttcccgccgattatcatgaactggatgaggctgaggtggttcaagcgcaagttcgtcgagacgtacctgcagttcatgttcacgtacctcttcttccccgggtgggttgcctcggcccccctcgtctgcttccggaggtccccttggggtccaacctgcggcttccccgggtcctggccatagggtggcgcaccgtccttccaggccggtttcccgccgagcgttaccgccgcgtggtcagtcgtcctgggccctgctctttccctctcgacatagcttttctcttgcttggctttgtttgccgtccttggggcctcccccgtcttgcttgtttcgactgcggtgtgggatctctctttctggtatgggatttggcatcgctccgtgctttctctggcccaggcaccgtcgcatatggtgtgctggggtgctgggcccctggtcatcatatcaatggaatcgatgcgcatgccgttgccaaattttgtttgtgtgaaccaaataaccgtgaaactcaaaattcccatcttcaacaacatatatctc

SEQ ID NO: 36895 - DNA, 797 bp, Oryza sativa
  Clone ID: PAT_MRT4530_40676C.1
gctggtcacgcctgcaggtaccgggatgctataccgcgcgtccgcctacgcgtacgtccacgcgtccgctcaaacattacagcaaaagcataagaactagaaacccaccacaatgaagatcattttcttctttgctctccttgctattgctgcatgcagtgcctctgcgcagtttgatgctgttactcaagtttacaggcaatatcagctgcagccgcatctcatgctgcagcaacagatgcttagcccatgcggtgagttcgtaaggcagcagtgcagcacagtggcaacccccttcttccaatcacccgtgtttcaactgagaaactgccaagtcatgcagcagcagtgctgccaacagctcaggatgatcgcacaacagtctcactgccaggccattagcagtgttcaggctattgtgcagcagctacggctacaacagtttgctagcgtctacttcgatcagagtcaagctcaagcccaagctatgttggccctaaacatgccgtcaatatgcggtatctacccaagctacaacactgctccctgtagcattcccaccgtcggtggtatctggtattgaattgtagcagtatagtagtacaggagagaaaaataaagtcatgcatcatcgtgtgtgacaagttgaaacatcggggtgatacaaatctgaataaaaatgtcatgcaagtttaaacataatgcctctgtaaggataaatcctagtacattgttgaaattaattatcgtcaccgtctactatcggtcccatttaccaaaaaaaaaaaaaaaaaaaa

SEQ ID NO: 36896 - DNA, 787 bp, Oryza sativa
  Clone ID: PAT_MRT4530_40677C.1
cctcctcctctcccccccataataaactaaccatctctattcttcttctgcaccaccatcgccagcagcaatttccctttctttttcctttccttcctttgctcttttctttgcttgcgagttgcgacagtgacggagagagagagagagagtactgtagcaaagagaatcggtgagagagtgagagcggcaaagacaaaaggcggcgagggcgaaacccccaagaatcaaggcaagaggggaagctttgcatttgcccggccgactctcttcttggttcttggttgtggcgtcggcgtctccgtgttgtttgggctggccaccgttgctcgccgttcttgggggcaggcaaacggcaccggcggtatggaggcattgggagatatggagggggaggaggggcagcggcggcagcagcagatacgggtggtgcggtgccccaagtgcgagaagttcttgccggagctccccaactactccgtctacgtctgcggcggatgcggcgccactctccaagcaaagaagaactcagcatctgagaattcctcagagaaatctgatggtggacatgtgaagtaccttgaagtgctggagagttcaccagataacaaaggagctgcatctaaagacacttgtgaggctgcccaagaaggagaagccaaaaatggagaagctaaagcagaagagagacaggtacttcttgacagaatggcagcttgtgatgatagccgaattccaagagaaccaaatgccttgaagcttgaggcttcacttagagatgacagca

SEQ ID NO: 36897 - DNA, 1024 bp, Oryza sativa
  Clone ID: PAT_MRT4530_40678C.1
cagcttggaaagacaccatgaaaccattgttcataagaaatgctgctagtcactcacaacgacgacgcatttgacggcgtccatcctctctactgcctcgggaggtcttggcatcctgagtctcgaaaaattcgcaagggcccttcgattgcgatggctctggcatgaatggaagtcaccggaaaaggcttgggcgtggggtcagaaacaccttgtgataaaactgacaagctattgtttgaaacagcaactacaaaacaaattggagatggagcgaaagtgaagttctgggagttggcttggctccgggcaaagattgaaggatgtcacaccactagtccacgcggcctctaggaaaaagagcaggaccctcaaacatgctgctttggtagatcaatggctagagtcgaccttgctcttccaacaaacgaaggatggacaacggatctgattgaccagctcatcaccatttggagcgccgttcagaatgtacacttcacggaacatgaagaccagatcacctggaagctaaacaaccatggcgaatacacggccaccacagcttataaggtgcagctcctgggtacaacatcgtcaaatttcgacaccctaatatggaggccttggatgccgcacaagtgcaagtcctttgcctagctgatactccaatacagagagtggacatcagacagactagccaccagaggctggcccaacggatccacatgccctttatgtcgccagactcaagagacggctttgcacctgctagcggaatatagatacataaggagaatctggaatgaaatcgcgcagtggacaggcaacgaccatttaagaccttctagttggcaagtaactttgacagtatgagtggtgggaggcccccgtaagcatacgggaagcacacgctaaccttgcttgtgaaccggagatatggaatgaaaggaaccgaaggactttccagcacaaggagttgccagcgccaactctgctagccaagataaaggaggaagcaaaaacg

SEQ ID NO: 36898 - DNA, 1929 bp, Oryza sativa
  Clone ID: PAT_MRT4530_40679C.1
agggacgccgccgtgcttgcagaggctgcggtccccgggtcggttaccccggcgctcgcctctccgcgtggtagcgcagtggccgagcggaagggtaccgagcgcgtagcgcttcttgggaaagcggccggtctggtagatgaccggcccgcggggcggcggcccccgcggcgcagaaggcagggccggttccgtttttggcacagccgtaagggctggtggcacacccgcccccagaccacaccgcctcgccacgtgacgaccgggggcccaccgctcgtgggttccggcgccaggacaccagctccggattcgtggcagtgggggcgcgaaggttctagttggcgaaggacgactacacggaagacgatcaacagaaggaaaacggcgtatggaagcggccgggttcagcagcctcagttgccaggtgcgcctctgacctgcttgtgcagaagtggggaagtttgggatggaagaagagattgagatgctcaaaggggatacaaatgttttaatgccgggaacttgtcagagctgagacaacaacagcagacaacagatcatcagctgcagactttgggcaagcgtcttcaaggaatggagcaacggcaacaacaaatgatgtctttcctggctaaggcaatgcatagtcctggcttcctagcacaatttgtacagcaaaacgaaaacagcagaagaagaatagttgctagtaacaaaaagaggaggctaccaaagcaggatggttcgttggactctgaaagtgcttcattggatggacaaatagtaaaatatcaacctatgatcaatgaagcagccaaagcgatgctaaggaagatcctaaagctagattcttcacatagatttgaatccatgggcaattcagataatttccttcttgagaattatatgccaaatggtcaaggtcttgacagctcttcatcaactcggaattctggtgttacccttgcagaggtcccagctaactcaggtttgccatatgtagctacaagctctggactttcagctatttgttcaacttcgactcctcagattcagtgcccagttgttttggacaacggcatacccaaagaagttccaaacatgagtgcggtgccttctgttccgaaggctgtggctccaggcccaactgatatcaatattctggaattcccagatttgcaagatatagtagctgaagaaaatgttgatattcctggagggggctttgaaatgcctggtcctgagggtgtattctctttgcctgaagaaggtgatgatagtgttcccattgagactgatgagattttgtacaacgatgacacccagaaacttcctgctatcattgattctttctgggaacagttcctggtggctagccctctatctgttgataatgatgaagtcgattcaggtgtactagaccaaaaggaaacacaacaggggaatggatggaccaaagctgaaaacatggctaaccttacagaacagatgggcctcctgtcatcacaccatacaggatgatgaggtacaataggacatacttagccaccatttgtcaaggtaccctgggatctcggtaataaactcccacatcatcacctacccttatgtctatgttatgttctatcattttgctgaaacaatactgaaacgtcaccctatatgtgggaggatactaatcttccacctatgaaacacggtttacccgaggggtttacctgcttgtatctaggtttggcaggcgtaagaattgatcaatggtaacttgtcaaatctgtatgataaaaaaaaaaaaaaaaaaaaaaagccggcttgtttctttgtgccatacattcatctttggtccctcgacgcgggcccctatcattgtgcgtgatttctaaaatattctcaagtttggttaaatgttacaaaaaaaaaaaaaaa

SEQ ID NO: 36899 - DNA, 1168 bp, Oryza sativa
  Clone ID: PAT_MRT4530_4067C.1
ctttagctcatcccatcatcggtcatattggtggcagcttcatgttgctgagctataggcgaatggttgacaagagtactagttagcttaataatatagctttgcaaaagttgaggtaaggggttgtgagaagaagcagcttgatttgctactggctttgtgctgctgtgtggttgttctggtgtggatcgatcagagatggggaggggaagggttgagctgaagcgcatcgagaacaagatcaaccggcaggtcaccttctccaagcgccgcaacggcctcctcaagaaggcgtacgagctctccgtgctctgcgacgcggaggtggcgctcatcatcttctccagccgcggcaagctgtacgaattcggtagcgccggaataaacaagacattggaaaagtacaatagttgctgttacaacgctcaaggttcaaatagtgctcttgctggtggtgaacatcagagctggtaccaagagatgtcaaggctcaagactaagcttgaatgtctccaacgctctcagaggcacatgcttggtgaagatcttggaccattgagcataaaggaactgcagcagctggagaagcaacttgagtactcactgtcacaggctcgacaacgaaagacacaaatcatgatggagcaggtcgacgatcttcgccggaaggaacgccagcttggagagctcaataagcaactgaaaaacaagctagaagctgaagccgatagcagcaactgcagatcagccatccaggattcctgggtccatggcaccgtcgtcagtggcggcagagtgctgaatgctcaaccaccaccagatattgactgtgagcctactctgcaaattgggtactatcaatttgtccgtcctgaggcggccaatccaagaagcaatggaggaggaggggatcagaacaacaactttgtgatgggatggcccctctgaagtccaagcttgctaataaaaacgctggcgtgctataatatatagttcggcaaatgttgaaacacatgtgttctcagtatgtatatttctcccctatccggtggtactcttagcacgtacctatgagtgtatgtttgtacgttatctatactctatgctaggcaaccctatactattatggtaagacgtctatcttttcaatcaaaaaaaaaaaaaaaaa

SEQ ID NO: 36900 - DNA, 783 bp, Oryza sativa
  Clone ID: PAT_MRT4530_40680C.1
atgacctacttagagtttctccagaaaaatcaatgggggcaggaggccagcgtgggggcagacggcgtgcaggtggacgacgtgtgtgcgggcagcctcggagggcacgcgacggccggcgtgtggccaggcagatggcgggagatcggcggccgggcatgcgcatggactgccgccgaaggccttgagaacggtgggcaagaaagcagggcagatggttcatcccgaagaattatactagagcttggagatcgtgacgattcctatccctggaggaagtacgggcagaaggacattcttggcgccaggtttgcaaggagctactacagatgcgcccagatgttgggctgcacggcgaggaagcaggtgcagcaatccgacgacgacccgtcccggctggagatcacctacatcggcctgcacacctgcggcggcgaccggccgtcgtcgccggctcccaccaaccccgccgacggcccgcgttgcgacgcagcaaccagtagtcaccgtcttctgccgtcagctctgcagcagaagctggaggaacatgtcccggcggcgtcggacgacatgatgatggcctgcacgccgtcgtggctgttcataccctcgccggcgtgctcgcagtcggagcttctgtcggagggggaggttccggagctgcgggtggtgcggcaggagccgtatgatccggtggagctggtggaggagcacaagaagccgagcgacgccgacgaggactccctcgccctccacaactccgtcgtgccggattttatgtag

SEQ ID NO: 36901 - DNA, 1140 bp, Oryza sativa
  Clone ID: PAT_MRT4530_40681C.1
atgaagatcattttcttctttgctctccttgctattgctgcatgcagcgcctctacgcagtttgatgctgttactcatgtttacaggcaatatcagctgcagccgcatctcatgctgcagcaacagatgcttagcccatgcggtgagttcgtaaggcagcagtgcagcacagtggaaatccccttcttccaatcacccgtgtttcagctgagaaactgccaagtcatgcagcagcagtgctgccaacagctcaggatgatcgcgcaacagtctcactgccaggccgttagcagtgttcaggtgattgtgcagcagctacagctacaacagtttactggcatcaacttcgatcagactcaagctctagcccaagctatgttggccctaaacttgccgttaatatgcagtatctacccaagctacaacactgctccctgtagcattcccaccgtcggtggtatctggtgctgctactatgctgcatatctcaaagatacaggtggaagctgcctctccctcctcgccggaacgccgtccagtcgtgccgtcacccccagcggcctcgcagctgcctcctcttccccggcgtcgctccgtttcacgggaaaatcatcggagccgcgtcctggccgacgaccagtggtgtcgccaccactccaccgactccagctgcccctgccgcaccgctcaggtgcgggccggccgcgccatctactccctcggcgtcgccgcgtcgacctccaccccggcctgccctctgattcatctggagaccgccgtcactgccgcgccggcttctccatcctcctcgtcgactcctccgattggccgttcctcctcgccggctcgtcgtctcgctgcgccgccaccgtcgtcgacatcgcagcggcgtgttccacgccgtccttgcctccgtgcagctgctgccggctgccctcgtcgcctcctcgccggttccgggcgtcgtcctttcgtcgctcctgccccgtcatcgtcttcatcctcgcctccgcgtcatcaagcctcgtgccggtcgcgtctcgccttcgtctaaggatcgccgccgaaatcgtcccctcgccgttcgtctccgctgcccattcgtcgtcatcgttcccatgcctcgtcgcgtggtggtaa

SEQ ID NO: 36902 - DNA, 508 bp, Oryza sativa
  Clone ID: PAT_MRT4530_40682C.1
aaagaatgcttttaccctcattgcgggtgagtttctgtaagccaaccaagtcagcacaagtggcaaacccccgtggtgccaaatcacccgtgtttcaaacgtgagaaactgccaaagtcaatgcaagcaagctgtgctgccaacaagctcaggatgatcgcggcaacaagtctcacttgccaggccattacagtgttgcaggcagattgtgcagcagctgacagtctacaacagtttgctggcgtctacttcgatcaggctcaagctcaagcccaagctatggttgccctaaactgggccgtcaatatgcggcatctacccaagctgacaacactgctccctgtagcattcctaccgtcggtggtatctggtattgaattgtagcagtatagtagtacaggagagaaaaataaagtcatgcatcatcgtgtgtgacaagttgaaacatcggggtgatacaaatctgaataaaaatgtcatgcaaatttaaacataaaaaaaaaaaaaa

SEQ ID NO: 36903 - DNA, 785 bp, Oryza sativa
  Clone ID: PAT_MRT4530_40683C.1
ccggccgggatccttctcacaactcaaacattacagcaaaagaataagaactagaaacccaccacaatgaagatcattttcttctttgctctccttgctattgctgcatgcagcggcctctgcgcagtttgatgctgttactcaagtttacaggcaatatcagctgcagccgcatttcatgctgcagcaacagatgcttagcccatgcggtgagttcgtaaggcagcattgcagcacagtggaaacccccttcttccaatcacccgtgtttcaactgagaaactgccaagtcatgcagcagcagtgctgccaacagctcaggatgatcgcgcaacagtctcactgccaggccattagcagtgttcaggtgattgtgcagcagctgcagctacaacagcttactggaatctacttcgatcagactcaagctctagcccaagctatgttggccctaaacttgccgttaatatgcggtatctacccaagctacaacactgctccctgtagcattcgcaccgtcggtggtatctagtactgaattgtagtagtatagtagcacaggagagagaaataaagtcatgcatcatcgtgtgtgacaatttgaaacatcggggtgatacaaatctgaataaaaatgtcatgcaagtttaaacataatgcttctgtaaggataaatccttgtacattgttgaaattaattatcgtccccgtctaaaaaaaaaaaaaaaaaaaaaaaaaaaaaaaaaaaaaaaaaaaagaaaaaaaaaaaaaaaaaacccgcggcc

SEQ ID NO: 36904 - DNA, 924 bp, Oryza sativa
  unsure (1)..(924): unsure at all n locations
  Clone ID: PAT_MRT4530_40684C.1
tggaatttcttaaggccaaccaggttccaaccacagtggccaacccccctttcttcccaatcacccgtgtttcaactgagaaactcccaagtcatccaccaccagtctgccaacagctcaggatgatcgcacaacagtctcactgccaggccattagcagtgttcaggctattgtgcagcagctacggctacaacagtttgctagcgtctacttcgatcagagtcaagctcaagcccaagctatgttggccctaaacatgccgtcaatatgcggtatctacccaagctacaacactgctccctgtagcattcccaccgtcggtggtatctggtattgaattgtagcagtatagtagtacaggagagaaaaataaagtcatgcatcatcgtgtgtgacaagttgaaacatcggggtgatacaaatctgaataaaaatgtcatgcaagtttaaacataatgcctctgtaaggataaaaaaaaaaaaaaaaagggcggccgcatcaccgtcctcaacagccagaagctccccgtcctcaagctcatcaagatgagcgtcaaccgcggcgtcatgcgccggaacgcgatcctggcgccgcactggaacatcaacgcgcacgcggcggtgtacgcgacgagcgggagcgcgaggctgcaggtggtgagcagcgaggggcggcgggtgttcgacggcgagctccggcgcgggcagatggntggtggtgccgcagactttcgcggtggcggggcgcgccggcgacgaggggttcgcgtgggtgtcgttccagacgagcgacggcgccatganacgcgccggtggttggcaagtcgtcggcgctgcgcgggatgccggcggacgtgctggacaacgcgttcggcgtgtcgagggaagaggcgcgcatggtcaagttcgggagggggcaggag

SEQ ID NO: 36905 - DNA, 732 bp, Oryza sativa
  Clone ID: PAT_MRT4530_40685C.1
ctccccttgctattcctccatgtagcccctctgcccagtttgatgctgttactcaagtttacagcaatatcactcaccgcatctcatgctgcagcaacagatgcttagcccatcggtgagttcgtataggcacagtgcagcacagtggcaacccccttcttccaatcacccgtgtttcaactgagaaactgccatagtcatgcagcaacagtgctgccaaacagctcaaggatgaattcgccgccaaaccaagttccttccaacctggccaagggcccaatttaaccaattggtttccaaggccggaattttggttgccaccaagccttaaccaagcctaccaaccaggttttggccttgggccggttcttactttcggattccagggcctccaaagcctccaagcccccaaggccttattgtttggccccttaaacctttgcccggtccaatattccgggtattccttaacccccaagcgtaccaaccaccttggccttccctggttaccaatccctacccgttccggttgggttattccttgggtatttgaatttgtaccaacgtatattagtacaggagagaaaaataaattcatccatcatcgtgtgtgacaagttgaaacatcggggtgatacaaatcggaataaaaatgtcatccaaatttaaacataagcctctgtaaggataaatcctagtactttgttgaaatttaaaaaaaaaaaaaaaaaa

SEQ ID NO: 36906 - DNA, 436 bp, Oryza sativa
  Clone ID: PAT_MRT4530_40686C.1
caggctcagggtattgatgcgcggcatactagtgctgcactgggtccagggcacaacttgagcaagtggttgcagggcagattttgtgcaacgctagctgacaaggctgacaaacaagttgttgctggcgtgctgaccttgtggatgcaggctgcaagctggcaaagcaccaagctgatggtttgggcccctgaaactgtggccgtgcaatgattgtgcggttatgctgacccaaagctgacaacatctgctgccctggtgacgcatttgcctgtaccgtgcggtgggtgatgctgggtgattggaattgtacagtatagtagtacaggagagaaaaataaagtcatgcatcatcgtgtgtgacaagttgaaacatcggggtgatacaaatctgaataaaaatgtcatgcaaatttaaaccaaaaaaaaaaaaaaa

SEQ ID NO: 36907 - DNA, 523 bp, Oryza sativa
  Clone ID: PAT_MRT4530_40687C.1
caggtgccaaacccccgctgtggtcgcgaagcacccggtgtttcaactgagaaactgcccaaagtcatgcaccaccagtgctgccaacagctcaggatgatcgcgcaacagtctcactggcacagccattaccaagtgttcaggcgattgtgcaccagctacagctacaacagtttctggcgtctacttcgatcaggctcaagctcaagcccaagctatgttggccctaaacttcccgtcaatatgcggtatctacccaagctacaacactgctccctgtagcattcctaccgtcggtggtatctggtattgaattgtacagtatagtagtacaggagagaaaaataaagtcatgcatcatcgtgtgtgacaagttgaaacatcggggtgatacaaatctgaataaaaatgtcatgcaaatttaaacataatgcctctgtaaggataaatcctagtacattgttgaaattaattatcatcaccgtctactatgttgcagttacaaaaaaaataaaaaaaaaaa

SEQ ID NO: 36908 - DNA, 1482 bp, Oryza sativa
  unsure (1)..(1482): unsure at all n locations
  Clone ID: PAT_MRT4530_40688C.1
atgcgcttcgagggcccgctcgacgaggcgctgctcggcctccaggacctcttcgaggcgctcctgctccgcctcaagcaccccggccgcggcggcggcggcggcgaggtgagcgacgtggaggaggagtacgagctgggcacggatgacgaggtggacgccgcggcgaggattgcaaggacgctcgccggcaacgactgcttggacatctgcctcgatatctacgtcaaggtgaggtacaggagagcggcgaaggcgatgatgcggctgaacccggagtacctcaagtcgtacacgccggaggacgtcgacgccatggagtgggaggcgctcgagtcggccatggcgctgtggggcccgcacttccacgtggccatctccggcgtgctggcggcggagcgctggctctgcgcgcgcgtgctcgcgcccctcccgccggcggtctggccggagtgcttcgccaagatcgccgcccgcatcgccgccgcgttcttccgcttcgccgacggcgtcgccgccgccgcggcgcgcgagccgcagcggctgttcaggctgctcgacatgctcgacgcggtggcccgggagaggggccgcctcgacgagctcttgtccggcgagtcggccacgctgctcgccatccgcgagcgcgcgcgcgaggtggagcgagccctcgcgcgctgccgcgtcgncgagttatacgagttcggcctccgcgtcgagacgcactacatcgtgcgctacgccgtgaactaccttaagtgcctcgcgtccgacgactaccgtggcaccatggacgccgcgctgcgcgccggcgccggcgacgacgacggcggcgacagcgaggcgctcgcggaggcggcgtcaaacgtgctggaggcgctgcaccggcacgtcgaggcggcgcgccgcgcgctcccggacgcggtggcgtcgcacgtcatggccatgaattcctactggtacatctacatgcgcgccaggggatcggagctagccagcctcgtcggcgacgacacgatgcggcggcggtacaaggcgtcggcggaggaggcggcgtgggagtaccaggacgcggcgtggggcccgctcgtccgcctcgtcagcggcagcagctccggcgcggccaaggcgtggccgtcgccggaggaggcgagggagaaggcggcggcgttcgccgacgcgctggaggagcgggcgcggcggcacggcgcggagtacaagataccggacggcgacctccgggagcagatcaaggcggcggcggcgaaggcggtgcgcggcgcctacgccgggttcctcagggcgaacgacagcgcggtggcttccggcggcggccggcgggagttcctgccggtggacgccattgaggggatggtgcggcgggtgttcgacgaaatgggcgacggcggcggcgtcgccggcagcgctggccggacgaggagccgacggcagagtggcaatcttgaggggtttgagggctaa

SEQ ID NO: 36909 - DNA, 243 bp, Oryza sativa
  Clone ID: PAT_MRT4530_40689C.1
atgagaaaaatccagctgcacagggcgcccacacctcaggctctgcagggtagtacttacggcaacttgatcgtgaaggaacttgatgtattcgatggcctcgtgaagaaccgatgcgtgttcactagctcacgcaccttgaaagtcggcatcggcgacggcgcctcgatccgtggtttcttcgctgccgccggcgagccaggagagcttctcgtcgccggcgacggcgagccggcgtcctga

SEQ ID NO: 36910 - DNA, 744 bp, Oryza sativa
  Clone ID: PAT_MRT4530_4068C.1
tagcgccgccgccgccgcggattgcgccgcatcccgccgtccccgcgcgcattaaagagaggggaatcactccccgcgtttccctctcccgattccccctcttttccctctctctctccctcggattcgtccggattcatcccgcgaagttcgccggcgtcttcaatggcgcccgagatctccgcgcgcggtttcctctctcttggccgcgctctccccctcccgttgctataaaatcgtccctcgtgcttcgctcttccgtttccgccgctcgccgctcgctctcgccgtcggtttcgtgcccgcgccgtgctcctctctctccgccgtcgccgtcgaccttcggttcgccgccgacgtcgctccggacgtccttccgactcggcgacccctccttcggcttcgccgagtggttgccgaccccgtccgccgctccgcttcgcccgccgaccgccggagcaccgtcgtcatcgtcatcccgagccgcgccgccgtcttcttccgctccggccgccgttctcgtcgtcgtcgttgtcccggggtgagccgaggaccgccgttcgccttcccccttccctcctctctctcgggtgccgctccgccgcgccggtggtcgccggcggtgaccatcggggcgcgggcgcgtccccctcccttcggccgcgccggcgaggccgccttcgggcgcgccccgcggctgccaggtggggcccggccgtcaaccgcccgcgcccgcgggttcgg

SEQ ID NO: 36911 - DNA, 511 bp, Oryza sativa
  Clone ID: PAT_MRT4530_40690C.1
ttatgtttgcggagattgagataaaaacagcagggggggactttcgtttacctacaacaaaccaaacaaggcattgttttactcgctatgtcgagtaccacaggtgtttgaatgccaaaggggatgatgctggtgtttgcgaaaaatttgccaagtactacaggtccctttgccctggagaatgggctgagatatggaacgagcagagggagcatgggacgttaccaggacctctctgaatgtaccgaccgagacctccagttggaccagtcaacatgttggccagccagtcctactggtccattctggattcctacttcccggatcgcaaatggcttttgtctcttgctcttcaaccagtcaccacaaaactgttagtgatgcctatcgtatgcaaccctaataatttggctacagtggcctcacatgcagccatggtttgtgtgttgactgcggacctatatttgttcacttttttgtggtaacgtctgaaaggacttgcatttttttt

SEQ ID NO: 36912 - DNA, 816 bp, Oryza sativa
  Clone ID: PAT_MRT4530_40691C.1
ctacgtggcggctgagtcagcgtgggacccacatgggccccacatatcagcatgccacgtcaatggccgctcctcccttcctcctctctgtctctctctccctctctcacttctcctctcgggcaggctagccagcgggtggggatgaggtcgccgacaacggacgtgaggacgagggggtcggcggcgacaggggcgaccgagtcgacggcggtggcggtgacgttgaggaggttggagatgaagacggcggaagcgtagagcagtggggaggagcagaacgatggccctcgcccgaggcggcggccgatggccctcgcccgcgccgcgccacgacggcaaggaggacgaggaggaggtgacctcgtactcctgttgcgcccgcgccgcgacggtgaagaggacgaggaggaggatgagcgcgagcacggatccggccgcctccaccatgacctcgtcggccgccgccgccgccaccaccaccaccaccaccagacgccgccgccgccgccacctccggcaccactactcagccccgccgccagcgctagctgcctccccgccgtccagccgccgacgccgttgttgccgcgccgccattggcaagattcaacgcgggagcttcgaatccggccatgggacggctagatccgggcacggttccgcgtcctccatctccgccgcagaagggccgtcgtcatccatgccgccgccggccaccgtcgcccgcggcacgttgcccaccgtttggccgcagccatctcgacgaccttcgactccttgcaggggctagcacgacgccagccggcgtgccct

SEQ ID NO: 36913 - DNA, 490 bp, Oryza sativa
  Clone ID: PAT_MRT4530_40692C.1
ggcaggcggcgcgcgtgcacgacgtacgcgtcgaatggtccgaaaaattggctcctcacccttgcgcagatgtgttccgaaaaatctgactactccatcccgctcgccggcgtgcaccagcgatcgggagagcaggtctccggaacctctgcctttgacgtcctgcaccgggagaaggcggcaataagccatacccgggacggcagctgcccccgcgccgacgccgtccgcgacctgtcacccaagcgcgcctccggtggtaggcagtacccgcgctggctgtgctgggcgactcttgcgttcgggaagaggcactctgccacgctgcttcaccttcgcgatcccatggctgatcagcaagagaaggacgtgcaggcgcaaatgggtgagatattctcgacgcattcattgagccgcctccttccgagcgatgcaaactcgcagatggaagatacacgggtgacgggttacggcccatgtttgatgggag

SEQ ID NO: 36914 - DNA, 924 bp, Oryza sativa
  Clone ID: PAT_MRT4530_40693C.1
atggctgtcgtcgcgcggtggccgcggcggtcgtccctttcaaccgtcggccttaacgtagcccagcaatccaagccaaatcaaaaatcggtgctcgtcgtgatactcgacctcgcgctcccgttcgtgctcctctccgcgtacctccgcgccagggacgcgtcgttcgtggaggccgtcgtcgcgcagcgccattccgtcgaacacctcgagcgcgtcggaggctggaggaggatgtacgggcggcgcgcgtcgcagctgctgaaggaggtcgactcctgcgaggccggacagctcgtgccgttcaacggcggaattatggacatggtgcctcccaaggatccctacatccaggttcgggtgcttgaggacattggtgaagtatctcttggtgaccattccatatcattgacaaagaactcacttcatttcctaaggcgcactgatactgaacaatttatatcacagggactaccgcatttgcaccgtggtactcacccagtcacccacttcacccaggcggcagtgccccatgtgcaacgccacggccatgtgaaccgaagtaccagccgccttcctcctccctccgccagccgcgtcccgccgtcgtcgccgaagtggttccagcgccggcggtggccggaggaggcggatccggcgccgaggcgggcagatctggtgggcgggcgcggcggcgtcgaggtggcgggcgcagttgtcgccgggtcatcgtcgtcctctccgtcgcggaagccgagcccgtcgccagctggtggccgccggctgccgcggcggtggccggatctggtccgacctcgagcttgccaaagctacatggcgacaacgaccttgaccttgttcgcgggggcaacaatgcgggagttagttggcagctacccgacacgaggcattggcatagggtga

SEQ ID NO: 36915 - DNA, 466 bp, Oryza sativa
  unsure (1)..(466): unsure at all n locations
  Clone ID: PAT_MRT4530_40694C.1
ggaagggaaattaaacggatttattccttgttccattaaaaccatcacactcgggtacggggggaaaccgggaaagttaaaaaacaaaaacagtagtagtaaaggggggccctgctcgttgttacttgagaggggcccgaaaaaccagcacacgagcagagcttccagcccacacccagcagggaaacggtaggggatgcccgccgcccccgccggccgatccgccgcccggggatgatgcgtcgtcgtcgtcgttcaggtgcacccggaggcggagcggcgtgcggcgcggcgcggtcaaaaggtgatgagtatttgacgcggaccaaatatatatggatggatggcggtcgncnncggncggacaacggggaggtcgcgcgcataacgcgcgggcgtanttgcggccgaggggggcggcccctaggtcnncggcttccncccccccggnaaatttggggggccg

SEQ ID NO: 36916 - DNA, 2088 bp, Oryza sativa
  Clone ID: PAT_MRT4530_40695C.1
tttttttttttttttttttttggttttctttttttacctccatgcccacgagtcaccgaatgaatacaccccaataaactaaagttgtaaataacaggatagctaccaattacaatacaaccataccaaagagcaatcagactatcagagtgagcagatacaaacaagtgtgacatctagctagcagaactgcgagtcagcatattttcatggcattatgatacagagtaaaatcaacctgagtcagatggagccgcaccacacttctatcttctaacagtcaatccagtggactagaatcattgtcttactgggtatattgaagcctgaggatgttgtcaaactcaggcatgcagctctcagatcaggctttcactgcagcagcttaaggagagccaggttctctaccatgcaccctgaagcgatagatgcatgtcagttctgaatttccatggtttgagcagaagtcaagccgaaccatgttgatgactcgtgaatctgcggttctctccagttggaaggtctgtgcattgttcttctcaaggtcataagaaaactctcctagatttgtcaccacacgtgattccttgtctgaatcatcctctggtccttcataccatccactgacctggaaatccttcggagcactagatcgatcataagctacactcttgtccacatgctctagacttactgcttcaggaattattcctgtcctcagcttgatctccacataaccactacttccttgtagtgcaaagcactctccaggctggccaaaacttggctccagcattttcttagcttgttcaagcaaactattacgactaggcataaagctcttagctttcctgaaagcttccgaatgcttaaccactttacccccaccagatgctaatgcataatccaccattccaaggccatctgctgcatgcctctctatctccatctcaactatctccttggcaaataacctaatatcatccaagcttatgtcgccaacagtaccatccaaacccttctttttcttcaactgttccacaatctcatcaaattcttttttagaaacaaaacccatgtccctaagctcagcaagtgatttatctaatttgtcagtcttgccttctagtgccttcatcttaatctccagcttattacccttgtcttcgaattgcttcgtgatgtccctccttgttttgtcaatctcatttcctagcttcttgtctaaaatatccagctgtacctgaagcatcttggttgtcttcttgaacccttccactttggacagcttggccttttcttgcttagcaccactcttcttttgacggtcagcagcagctgcagaggcaattgcatcttttcttgcctccaatggatactttgatttgccaagaactgactctccacggatagtatgactaagatccttcttgtcagtgatcttatcaactgatgaggtaccattgaatccaccatcagcaaggagctcaggtgaggctttcttccttgcaacaactaccgtccgccgcctaacatcttggctggaatgtgagtccatactcaacgcgtggttcccatttgtatttgcggttggaaccgcagcagttgagactgacattgttgtcccctcaaggtacaaacgggagaactagatgatataagctggaagcaatgatgcacctcaccgccaccggcggcggaagcagtgggaccgctgctcgcgggttgtagatcggcgcaggcgacgggcggccgccggccgggcgaggagacgggagtcgaggcggcgaggcccaagggccaagggaacgggatttacgctgtttcctcctgccgggtgaagagctcgccggccgtccacgcacgggggaggagcccgctggccgtcccgcgagctcgccggcgtccgcgcgcgggggaggagctcgcctgtcgtccgcgcgccggggaggagctcgccagcgtcggcgcgcgggtgtggagctcgcttgccgtccgcgcgccgggggaggagctcgccggccgtctgcgcgcctggggtggagctcgccggccgtccgcgcgcgtggggtggagctcgctggccat

SEQ ID NO: 36917 - DNA, 818 bp, Oryza sativa
  unsure (1)..(818): unsure at all n locations
  Clone ID: PAT_MRT4530_40696C.1
tggcaaataacctaattttcatcaaagctatgtcgccaacagtacccatccaaacctttctnttcttcaactgtcccacaatctcatcaaattctttttagaaacaaaaacccatgtccctaagctcagcaagtgatttatctaatttgtcagtcttgccttctagtgccttcatcttaatctccagcttattacccttgtcttcgaattgcttcgtgatgtccctccttgttttgtcaatctcatttcctagcttcttgtctaaaatatccagctgtacctgaagcatcttggttgtcttcttgaacccttccactttggacagcctgctctccatatccagtgttgtaaatgataaatcaccattttgccatctccagaacagctgccccatccaagcgacagccgaaatgagaaggcaaagtttcatcaacacacttagagcgatttcccacttggccttttcttgcttagcaccactcttcttttgacggtcagcagcagctgcagaggcaattgcatcttttcttgcctccaatggatactttgatttgccaagaactgactctccacggatagtatgactaagatccttcttgtcagtgatcttatcaactgatgaggtaccattgaatccaccatcagcaaggagctcaggtgaggctttcttccttgcaacaactaccgtccgccgcctaacatcttggctggaatgtgagtccatactcaacgcgtggttcccatttgtatttgcggttggaaccgcagcagttgagactgacattgttgtcccctcaaggtacaaacgggagaaccga

SEQ ID NO: 36918 - DNA, 2280 bp, Oryza sativa
  Clone ID: PAT_MRT4530_40697C.1
ctcggttcgtcgtcgcccgcccctacttgcttctttcctcctttcttcctcctcctcctacagtggactcgtggctggcagcatcgtctcctctcctctcctctcttcttatcctttttaacttctccttattgttgttgtcgtccttcttcttctccagtccacacacacaaaggcactctctcttcttctctttctactagctgagtgccaagcttatggaaagagtggtagagtaatcagaaggagatcagataagggcatagggagacttacggagaggtggacctatagatagctactgctctgctgctgctattaagtcagtctgtgctacgatcgaggagatgatgggagcagcggtgaccatggtggatcggcgcatggcgttcgcggcggaggccgacgttgatagcaaggccgcctttggattcttcggaggcgagtgcttcgtcggcgagggcgacctggtcaacccggcgccgccgccgccgcagcagcagcaggtgcacgagggcggattcgccgccgaggacgagagcgacggcgacgacgacgacgacgacgacgacgacgtggacgacatcgaggagctggagcgccgcatgtggcgcgaccgcgtccggcacaagcggctcaaggagcttcagcagagccgcgccgggagggagagccgggcgggcgacgccggcggcggaggcaggcagcagcggcagtcgcaggagcaggcgcggcggaagaagatgtcgcgggcgcaggacgggatcctcaagtacatgctcaagatgatggaggtgtgcaacgcgcaggggttcgtgtacggcatcatcccggagaaggggaagccggtgagcggcgcctccgacaacctccgctcatggtggaaggagaaggtccgcttcgaccgcaatggcccggccgccatcgccaagtaccaggccgacaacgccgtgccggggtgcgacggcgacgccggcggcgccgcgccggcggggccgcactccctgcacgagctgcaggacaccacgctgggatcgctgctctcggcgctcatgcagcactgcgacccgccgcagcgccgcttcccgctggagaagggcgtgccgccgccgtggtggccggaggggagcgaggcgtggtggcccgaggccggcgtgcccaaggagctcggcccgccgccgtacaagaagccgcacgacctcaagaaggcgtggaaggtcgccgtgctcaccgccgtcatcaagcacatgtcccccgacgtcgacaaggtccgccgcctcgtgcgtcagtccaagtgcctccaggacaagatgaccgccaaggagatcgtcacctggctcgccgtcctcaagcaggaggaggacctctatctcaagctccatcccggcgccctccccccgccgctctccgccgcgtccttcaacgccagcgtctccggcgagtacgacgtcgaaggagtcgacggcgacgaggccgggaacaacaacctgcagaaggcgcagaacgacgcgaccgcgttcatggacctcaccaccaccatggatgctgctctgagcaacaacaagttcctgatcatgccgctgatgaaggaagaggccatcgacgtcgacttcatccagaagaggagcgagccggagctgatgctgagcagcgacagccatgcccgcgtctacacctgcggcaacgtgcagtgcccgcacagcaactacgcgctcggcttcctcgaccgcaacgaacgcaacgcccatcagtacgcctgcaagcacaacgccgccgccgccgccgccgagagcaagccgccgccgccgcacatcttcgagccactcggcagcttcgacttcgacctccccgtcgacggccagagatgcctcgccgggctgatgaccatgtacgacaacgacgtcgccgccgccacgcagatgcaccaccaccaccatcagcagcagcaggctaatttcttcatccgcgacgacgcgccgttcggaggcgacgtcgccgccacggcggcggcggcgccggagttcaggttcagttcaaatttcaacgtgacaggagggggcgccgtggactacggcggcgccatgcagcaaccgccggcgaagtacgccggatccaactggttctactgaaacgaattcgaatcgaatgggaaccaaaagaatcaccacccctagttcgattcgatcagtagcttatagctgtaggggattagaggagctcataagcctgattaattttcagtgtgcttgtaagaattattggttaataatttttcagtgt

SEQ ID NO: 36919 - DNA, 1178 bp, Oryza sativa
  Clone ID: PAT_MRT4530_40698C.1
aaatacacgtttacctccacaactggtggcatcatattttatttagctagtagcagaaccactttatcaggttccatcgtgcctaccgacaaatagggtacataccttttatctttgaaagaaaggaatttcatgggaatttttggtacctagctcttcccaaggaatgaaaaggagggtctcgatctccatggcggactcgagcgcggcccgccccaccgtcctcgtcaccggcgccggcggccgcacaggaaacattgtctacaacaagctcaaggaaaggtctgaccagtttgttgtgagaggtttagtgagaacagaggaaagcaaacaaaagattggtggaggcaatgatgtttacattgccgacataagggacagagatcatcttgtgcctgctgttcaaggtgtcgatgcgctcataatcctcacgagtgctgtgccaaagatgaaacctggttttgaccctagcaaaggtgggaggcctgagttttactatgaagatggaatgtatcctgagcaggtggattggattggccaaaagaatcagattgacactgccaaagctgctggagtgaagcatatcgtgcttgtgggatccatgggaggaacaaatcctaaccatccactgaacagcctaggcaatggcaatatactggtttggaagcgcaagtcagaacagtatttggcagacagtggagtcccttatacaataataaggcctggtggtctgcaagacaaagacgggggagtgagggagttgattgttggcaatgacgatgaacttctccagacagacacgaagtcaattccaagagctgatgttgctgaagtttgtgttcaggccctgcagtatgaagagacaaagttcaaggcatttgatttggcttcaaagcctgaaggcacaggcacaccaacaaaagacttcaaatcgttgttctcccaggttacagcccgattttgagccatcttgaggagcaatctcatctcggtttccttgtgtattggatatttggatgtatatcttcgtggttagtgaggtgtgaagttgtagtttgctgtaattcgtcatcgtttcctgaaaactcctattgaaatcagtgaattgttcagacaagacacaaattgatattattcaaggacatgatgtctttttaaaaaaaaaaaaaaaaaaaaaa

SEQ ID NO: 36920 - DNA, 450 bp, Oryza sativa
  Clone ID: PAT_MRT4530_40699C.1
atgcacccgccagtcgcacgcgcgaggaagatccgcggcggcgacggcgagacggggcggcgacggctacctcagcgaggcggcgtcggcgaggaggaggagccgggccggcacggcgggtcgcgaggccgctcggggaccaagtcctcgggcgcgcgctcgcctcttattgcgtcggtggcgacacggaggtcgccgccggccaccatgcccttagtgcgcgcccacggcgcgccgctgttcttcgcggacgccgatggctacccgacgaggatcatggacgccggcgagggcttcgtcttcctcaagcactacggctctggatgggtgttcgcgctaagcctcgagaccatgatgttcatcgatctgcctcacaggaggttctactctgggccggcacttccctacaggatggcgctgcatccgccattgccggctcttgctgattga

SEQ ID NO: 36921 - DNA, 1142 bp, Oryza sativa
  Clone ID: PAT_MRT4530_4069C.1
cttggcggtcgctgccgcctgtgtgcattcctgcctggccgtgccactcggccgtccgagcggtctcggccgatccgggccattgggtgcgcggccgagtggccggtcgccaccgtggactcggtccacggtgggccggtaccccttccctcccctccgccccccccccctcccccccctccccgccccaccctcaacggcccctctcccaccccatagccgcacactcaagtggccctccccggccccgccagccgggaccaggcccgccccgcgccccgatggtccccgccggcgcccaccggccgcggcggaacgggcgcccgagagaccggagaggagagggaagcgaaagggcggtcttcggctcacccccgggtcgacggcgacgacgggaacggcggccgaagcggaggaaggcgccggcgcggttcgggacggcgaggacgacggtgctccggcggtcggcgagcgaagcggaggggtggccgaggtcgacggggacgcggcgaagccgaaggaggtgacgccgagtggggaggaggtccggagcgacgacggcggcgaaccggagctcggtggcgacggcggagagaaggtgcgacggtgcgggctcgattccgacggggaggagaggcggcgagtggcggaaacggaggaggagagcacggggaacgcttatatagcgtcgggagggggagagcgcggccggagagggaggaaacgggcgcggagatctcggccgccattgaagacgccggcgaagattgcgggagcgattccaaacggatccgagggagagagagagagaaaagagggggaaaagagagagggaatcacggggagtgattccccccactttaatgcgcgcggggacggcgggaggcggcggaatcggcggcggcggcggcgctagggcacgggcgggcggcggacgcggcgcgaggtcggggatgacaggtgggccccacccgtcagcgagggtggcgggcgggcccgcctgtcagcggcgcgcgcgcggggaggaggccgatgggccgcggggagaggagagagagggagggagagttgggccgagccggcccaagagaggaagggggaaaagaagacttttagggatttttctttttataaaacctttt

SEQ ID NO: 36922 - DNA, 480 bp, Oryza sativa
  Clone ID: PAT_MRT4530_406C.1
cgctgcatccctgtataagcatgtccgtttctaccaaccttgcagccctcccagaagaggtgaagcaaatgatcaccgaagccttaactttgatagcagctcgcacctaagaaatagtaacacgactatcttagactacaatttattgtggtttgcacacattaatagaaaaaagattcgaatctgaaaagcatgtagatgatagatcttaccgctgaggaagcaatggactccaagtgggtcatgggttctccgacatatttcacagtttgcttgaagtataaatcttggttgagtaccttctcagcctgtaagacaattgacaaacatgtataattaaatcaatgacggccagtcagatgcagcgccaaaaaaagacaccaaattcgcgtaaaatagcaataatgtgttgaaaatgcaaaccctatttagaaaacataacagaaatttcacctcagcacagatgctgcccactgccga

SEQ ID NO: 36923 - DNA, 169 bp, Oryza sativa
  Clone ID: PAT_MRT4530_40700C.1
tcgttttgaaccaagcgaccaggggattaagctgggtgtgatcgatcgaatttccgccttcaaaatccacataatacttctggctccccccctgaaatcatactatctttttttggctaaatctgagggcaaaacataagagactatgcaattgtatatagctagttta

SEQ ID NO: 36924 - DNA, 1145 bp, Oryza sativa
  Clone ID: PAT_MRT4530_40701C.1
ccggccgggcatccttctcacaactcaaacattacagcgaaagcataacaactagaatcccaccacaatgaagatcattttgcttgctttgctctccttgctattgctgcatgtagcgcctgctgcgccagtttgatgctgttactcaagtttacaggcaatatcagctgcagccgcatctcatgctgcagcaacagatgcttagcccatgcggtgagttcgtaaggcagcagtgcagcacagtggcaacccccttcttccaatcacccgtgtttcaactgagaaactgccaagtcatgcagcagcagtgctgccaacagctcaggatgatcgcgcaacagtctcactgccaggacattagcagtgttcaggcgattgtgcagcagctacagctacaacagtttgctggcgtctacttcgatcaggctcaagctcaagcccaagctatgttggccctaaacttgccgtcaatatgcggtatctacccaagctacaacactgctccctggtagcattcctaccgtcggtggtatctggtattgaattgtagcagtatagtagtacaggagagaaaaataaagtcatgcatcatcgtgtgtgacaagttgaaacatcggggtgatacaaatctgaataaaaatgtcatgcaagtttaaacaaaaaaaaaaaaaaaaaaaaaaaaaaaaaaaaaaaaaaaaaaaaaaaaaaaaaaaaaaaaaaaaaaaaaaaaaaaaaaaaaaaaaaaaaaaaaaaaaaaaagaaaaaaaaaaaaaaaaaaaaaaaaaaaggggggggccgttttaaaggaccaaattttactacccggtgatggaaaggtaatattttttttttggggaaccaaaaataaaataaacgggccgccttttaaaaacgtgggaattggaaaaaccctggggttccccaaattaaatcccttggaaaaaaatccctttttcccaattggggttaaaacgaaaagggcccaaccggttggcttttccaaaaagtgccccaccttaattggaaatgggaccccccctttaaccggcccataaagcggggggggtggggggtttccccgcaggggaacctttaaattggcaaggccctaagccccccgcctttgcgttttttccctttctttt

SEQ ID NO: 36925 - DNA, 558 bp, Oryza sativa
  unsure (1)..(558): unsure at all n locations
  Clone ID: PAT_MRT4530_40702C.1
gtcgctcatcgccatctctctcagctctcacagctcactgcatcaatggncgcgggcaccatggngctctcctccccngtnatngnccgcgcggggccgtcgaactcctccgcgctcttccggcgaaggcgcggattnacatgcncaagaacgccncnaaacccaagccngggggcgttctcccgggaacccgtggtacgggcgccnaacgcgttctctacctcnggccgctctccggngaaccnccnaactnctcaccnggcnaattccccgggcaataacggttggaaaaccccggggtttncccccaacccgaaaacttccgccaaaaaccggaaacngaagntantcttttcccggtgggcaatctgggcccctccggttgnttctccccggaactcctcccccgaaacggcnttcaatttccggcaaggccgtgttggtttcaagggcggggctcncnnattnttcancnaanggcgggctcgactacctcggcancccaacctgattcacccccaaaacatcctccccntcttgggcggtcangtggtgctc

SEQ ID NO: 36926 - DNA, 513 bp, Oryza sativa
  Clone ID: PAT_MRT4530_40703C.1
atgtccaacaacaacggcaaccccgggtactacaacaacaggaacgccggcgatcagtcggactacaaggcgacgatcgccatcctgttcagcgtcttctttgtcgtcatcctcatcaggctcatccacttcatcatcaaccagtcaaacaaccgcgctccggcgaacggtggcgccgccgctactagcgacaggcggctgggaggcggcggcggcgtttcacgtgtgccggccagacttccccgtcagcgtccgggcggcgccggcgccggcaacggcaccgctatggcgtggcagccaccgccgtgcaccagcacgtaccggagggacgacgggtggaaggagacggcgtgcccggtgtgcctgtcggagttcgccgacggcgagctcatccggctgctgccggagtgcatgcactacttccacgccgcctgcatcgacgagtggctgcgcacgcgcgccacctgcccgctctgccgcgccgcgcccgccggcgatgtctccacggcgtga

SEQ ID NO: 36927 - DNA, 1239 bp, Oryza sativa
  Clone ID: PAT_MRT4530_40704C.1
atggccgcatggagggtgcccgcgctgctgaagagccacgtcggcgacgagatctcctaccacggtggtgccgtgctccggggcgacattctcgtcaccgttgtgtggtacgggaagttcaagctggcgcagaaggccatcgtcgttaacttcctcctctccctcacggccacgccgccgcctccgaacgcgacgacgccctccgccgagaagtggtggagcaccatcgctgccgtggttcttgcgagtggttctcgcgcgcgccgaccaatgggagggagggagaggagtgggggtcggcagtcggcgggagttggcggtgcgcgtgaggagcaatcggcgggcaggggcggcgacagcggcaacggcggcggcggcaggcgggcgagcgctggagtgtgcggcatggaagctgccccctgtgacggtggggtgcgcggggaggcgtgtgacgaaggggaggaggccatggcggcgggctcgacgaagtgggacttgaggaggcgcgagcacccggtcacgcacaaagacgagcaccctgatggcggcgacaatgtagccgacatatatatggcaaaagtatttgcggctggcagcagccacagccagcaggcgcacaacttgaggtcgacctcgccgtcgggggtcatgctgctcgacgccatcactgttagagtacgcagctcggcccatcaaccatgggctacccaggtcatattgggtctgctccaccacaggttcaactggccttaccaccgtcgcgccccccactctcttccaacctctaatattttcaccgctatgactcgcggcgaccagagggagcgggacaggcagagggcgcaggcgcggaagccggttgtgaaggggcgcgacgacgggctcacgccggagcagcgccgcgagagggacgccaaggcgctgcaggagaaggcggccaggaaggcggcgcaggccaccgggcagggcggcaacggcggcgccggcgccaagggaaagagcggcgggaagaagtaggcatcggcatatgccggcatttgatctgttctcacctcacgtctggttgcgtgtgacaacaccgttctttcgatcgtcatctgctcctgatcctgcccatgttggcagatctgtactgctatttcttggatctttggaaattgcattacaaatttatgtagattgtgaaagaaaatttactccgctcctgcacggatcaaattaactcccagctcatgctcc

SEQ ID NO: 36928 - DNA, 358 bp, Oryza sativa
  unsure (1)..(358): unsure at all n locations
  Clone ID: PAT_MRT4530_40705C.1
ccttcccaccttttagtaaccgccccaagggcagcaaagcacagggggagcaagtgacaanaaagagggggaggccccccagcaacccgaacaggaacagaagcgcggcaaccagcccaagaacacccaccccccagccggcacanaaacaaacacgacaaaaacaagacaaccaaaacacccacaagaccaggccacaacacagcagccaagcggccgcccagcagaagaacaaggagccccggacccngcaacgcaggcaaggcagcccgggcaccggagcgctccccgcccaggcagggacaccacggccagacgacgccaccgacaccgcggcgaacccgacgaacgggccgac

SEQ ID NO: 36929 - DNA, 395 bp, Oryza sativa
  Clone ID: PAT_MRT4530_40706C.1
tttttgttttttttttacgacttaagccaatgaatatgaaaaaataaacttgtttttgaactgagggagtcctactgatttctctgttttgcttgaatggtccaagctctgtatatgctggtctctctctagggataaaaagagtgacagaaaaaaaaaaaggagtgacagaaaactgaactgaataataatgaccaaacctgggggtagcagtgcccaatactgctcctacaaagacactgccacattccttctccttcctcctgcatactggctctctgtctctctctatctgatcagctgttccgcttcctcctcttcttctgtcccccaaccccgtagccctcccacccatcgagccaggcggcggcccgacggccggtggctaaggcggc

SEQ ID NO: 36930 - DNA, 780 bp, Oryza sativa
  Clone ID: PAT_MRT4530_40707C.1
atgccgcccataaaactcggtgatatgtccagctttgttcgcaccaccgaccctgacgatttcggcctccgcttcaacgaggaggaggccaacaactgcaccaaagccaacgccctcatcctcaacaccttcgacgaactcgaggccgacgtcctcgccgccctccgcgccgagtacgcacgcatctacaccattggccccttgggaaccctcctcaaccacgccgccgacgccatcggcggcgggctgagcctgtggaagcaggacaccgagtgcctcgcgtggctggacacgcaacagccacgctccgccgtggaaaacctcgtgcccggtggcccaaacgcgctaccgccggagttcgtcgtggagacggacggccggcggtgcttggcgacatggtgctcgcaggagcaggtgttgcgccaccccgccgtggggtgcttcctgacgcacagcgggtggaactccaagtgcgagagcgtggcctccggcgtgccgatggtgtgctggccggtgttcgccgaccagtacatcaaccgtaagtacgcctgcgagtcatgggacgtcggcctcaggctcgatgaggaggtgaggcgggagcaggtcaccgcccaagtcaagcaggtgatggagtcagaggagatgcggcaggacgcggcgaggtggaaggccaaggcggagcaggcggcacgcctcggcggatcatcttacaagaacctgcagagcgtggtggaagtcatccgttctttcgcctccgactccaagaaggctgaagcctga

SEQ ID NO: 36931 - DNA, 1085 bp, Oryza sativa
  Clone ID: PAT_MRT4530_40708C.1
attgccaacttccttaattatgggcaaagattgacatttgtaaattcggtcctcagttcccttcccacttactacatgtgtactctccaactcccaaagaagattattgagcacatagacagagcaagaagacattgtctttggagaaagtcaaatgaaaattcaaatagaccacaatctcttgctgcttggaatctggtctgtaaaccaaaggacaaaggaggtctgggaatcattgatttacactatcaaaacacctctcttttgatgaaacatctttacaaattctacaatgagcaggacttaccttgcgtgaaactatggaacaaatattatcacaatgttgatctgcctcctcatgcatgcaaagaaattggttcgttttggtggaagaatatcttcagactgattcctctcttccagtacaaaatcacttcaatctaccgttatcttctcaagctatgactgaatggagatctttggaaaacatcattcaacataccagtctgtcaagctcaaatgactcttgggattatccttgggacggcctcttctctcactcaaagaagatctattcactcttctttgctcatcttcaaccagcagtgcctctcactcacatttggaaaagtaaatgcaccctcaagctgaaagtctttctatggttacttctgatgtcttggctcaacactcttgcaatgcttcagcataaaaatcttctctcaactcctaacatcagctgtggaatgtgcaactcaaatcaacctgaagatctaacgcatctcttcttcgcctgtccttttgctgctcaatgctggtcttatctggggattcaatggcatgggaatctggaatttatgaatatgatcttggtggcgaagcaaaactttggtctttctttcttttatgaagttattgctgtagcctcttggaatatatggctgagaagaaatgatcttatctttaacaacatcaggccatctctatctcgttggaaatgtttattcaaagaggactttactctacttttgcatagagtaaatagacaagatatccccgcttggcaatcatggattgatcaactg

SEQ ID NO: 36932 - DNA, 711 bp, Oryza sativa
  Clone ID: PAT_MRT4530_40709C.1
atggccaaaaaacaaccaccaccactatctagcaaaggctgtgttaaggaaaagatgctgaagttgggattgactgacgtcaatgaaggaaacgtcgtgccgacccgcaaggggacacttgttcagaagtacaaaataaaagtcgttgctgatgatcctgggactagttcttctaaggatggagatgggaaacaagctctagacggctcggctcagccgagtatcaagggtgctaccgacggctctctaggaaatcaaggtgacaattctcaaggagtacatggagtacaaggtgacggggtgcatggagttcaaggtgacggtgctcaggggatgcagggaggaaattttaatagtgaagtggcacaggactttttcaataacttccaagatcgggttgattacgctgtgcatcatgctttgatcaatcagtctggggtgttagtcaataccctatcaaacatgatgaagtcgatagctgatggttcaatagctgaacatcaggctgcaggcccggtttatttgcaaggaggtgtcttcccaaattatcagtctttgatcaccgatgttcagccatctattcaggcgattccctccgttgcacccacaactcagccggcggcgccggcatcaattcccctatctgctacatcagctatggcgccaggccagctagtgaaccctcggttgttaatgagggaacagccatag

SEQ ID NO: 36933 - DNA, 795 bp, Oryza sativa
  Clone ID: PAT_MRT4530_4070C.1
ctacgaggcagaggggcggtggacggtgtcggcgtggtcggagcagaggcgcggtggacggcgacggcgcggttgagaggcgcggtggacagcgacggcggatgtagaatgcgattgcggagacggcagaggccacgaggcggaggggcggtggacggtgtcggcgtggtcagagcggaggcacggtggatggcgacggcgcggtggacggaggaggcgcagtggatagcgacggcgccgttcttcttcccctctcctccccgagttcgcgccgttggatggccgggggcaaaggcggcgacaaatgtggctgtggacgaaggcggcgatgctggcgatggtaggggatccggtggtgggcgggacgacgatggcggagatcgagacgacgatggtggagatcgggacggcgacgaagagggaggggatgacggagatggggacgacgatggaggtgcggccgaaaggagcaccgtggcggtgaggaggagctagggcgcccatctgggagcgggagatccggggcggcgcgcggccatggccggagatcgaaggcagagaggggaggtcgcggctagctccggcgcgaacgacgacggtggtcgcggcgggcttcggcgcggacgacggcgtcggtcgcggctggctccggcgcctctctcctatgtgccgtcggccgtcgatcagtgtcaatctcagaacacgattccattgcatatcagctcggcgggccagcgaccgcgttgagccggctgacgcggccacggcggcgagcggcgacggaaggaggcacat

SEQ ID NO: 36934 - DNA, 912 bp, Oryza sativa
  Clone ID: PAT_MRT4530_40710C.1
atggtctttaccttgccagccgaattcgggatcgatcaagtcgatgtcgacgaggtggaagaggaatcggctaagttggttctttcaccggaacaggcagtgttcgagaaacctgaggggacagataatcggcatcttaaaccattgtatataaacggctatgtcaatgggaagccgatgtctaagatgatggttgatggtggggccgcgacccgcaaggggacacttgttcagaagtacaaaataaaagtcgttgctgatgatcctgggactagttcttctaaggatggagatgggaaacaagctctagacggctcggctcagccgagtatcaagggtgctaccgacggctctctaggaaatcaaggtgacaattctcaaggagtacatggagtacaaggtgacggggtgcatggagttcaaggtgacggtgctcacgggatgcagggaggaaattttaatagtgaagtggcacaggactttttcaataactttcaagatcgggttgattacgctgtgcatcatgctttgatcaatcagtctggggtgttagtcaataccctatcaaacatgatgaagtcgattgctgatggttcaatagctgaacatcaggctgcaggcccggtttatttgcacggaggtgtcttcccaaattatcggtctttgattacagatgttcagccatctactcaggcggttccctccgttgcaccaacaactcagccaacagcgccgacatcaactcccctacctgcttcatcagcgatggcgccaggccagccgatgaaccctcggttgttaatgagagagcagccacagcatggcgggcaggttacgagtcggctgacccaagatcaggttgctgccatgtttctgccatctcaacctgttgttgatccaatacagcagtag

SEQ ID NO: 36935 - DNA, 537 bp, Oryza sativa
  Clone ID: PAT_MRT4530_40711C.1
gaacgagggatcgccccttctccttgcccgccgccccccgactcccgtctcctcgcattcgctcaccggtgagcatcctaatccatcccatccggcctcggcctcgaatttcgtctcctcgcccgccgcttgcgccgatccccatcctgcgagcagaggtggcgcccggcgtcctcctgcttccaccgcatcgtctatcgccggtgaccatccctccctccctatccacacctcatcaggtattctgcgttatccctcaaaaaagtttgggggttcaaccgaaaaccgacccctcaaccgaaacagggttagatctgcctctgcccagttccacctactttcaacttgttaattttgatttttgtttttagcagatgtaatttggttactgaatctcatccaaacacccttagaatagttgcattagaacggaaaatgtaagctcacataatttggactcatcctaactcacataaatttcttaagaagaatctataccacaaactactcatagtcactcaaaaaatctttttatta

SEQ ID NO: 36936 - DNA, 241 bp, Oryza sativa
  Clone ID: PAT_MRT4530_40712C.1
aggcgggcgcattggccccggggctggccctttcggggcgtcgggcccaggggtagtgttccgccttcctggggtttcccccgagggggggcgggggggcctgccccggcaccaaaggccgggggccccccgcgaccccttaaagaatctggtcaagcgtgtcacgttgcgtgcatcgcagtacagcacgctcttttatccggtctgtgaccagtcacagaccggtcagatcaagggttag

SEQ ID NO: 36937 - DNA, 1203 bp, Oryza sativa
  Clone ID: PAT_MRT4530_40713C.1
ggcccttagtacactaggccggcggggctcgccttccccttccttgttgcccccttacccaagttgatccgtcgccgagttcgcctgagccccaatctccgatcccccaccatcgccggcgccgccgccgctccaccctgccgcttttcctcccgccgccgcatcctcgccgcgcgggatggccggagcgacggatctccccccgaagggcgggttcagctacgacaattgcgcgaggaacgccatgcttgtggagaagggcttgaagatgcctgggttcctcaagaccgggactaccatcgtcggtttggtctttcaggatggtgttgttcttggggcagacacgagggccaccgagggtcctatagttgctgataagaactgcgagaaaattcattatatggcgccaaacatatattgctgtggagcaggaactgccgctgacactgaggctgtaacagatatggtcagttcccagcttcaacttcaccgttatgcaactggtcgtgagtccagagttgtaacctctcttacattactgaagtcgcacctttttagctaccaaggtcatgtcagtgctgcccttgttcttggtggagtagatgttactgggccacacctgcacactgtttatccacatggctccacggacactcttccttttgccacaatgggttctggatcccttgcggcaatgtcagtgtttgaatcgaagtacaaagaaggcctcacaagggaggagggaatacaacttgttgctgaggcaattcgtggtggtatcttcaatgacttgggcagtggcagcaatgtggatgtttgcgtaatcaccaaggggaagacagagtacttgagaaaccaccagttaccaaatccaaggacttacgttagttcgaaggggtacaacttcaccaaggggcagactgtggtgttgtccacaaagataacacaactgaagccgaaggtagaggtgacagagggtgatgcaatggaggagtgattttgtgtgcttacattcagacaagcagtcacgttgagaacatatgctttcatttcagtggaaatgcttgaacaaaaaaagatgactcttgttgtacttccttgggcttaatgcacatctttaagttgattttcgacacatttatggaggaccgatcttatatatttgctaaaaaaaaaaaaaaaaaaaaaaaaaaaaaaaaaaaa

SEQ ID NO: 36938 - DNA, 131 bp, Oryza sativa
  Clone ID: PAT_MRT4530_40714C.1
gagtactccagctaacgctctcagaaccattgagaggaccttaaatgtccatgaaggcgttattttctcttgctttcaaacctagaaatgtgaatgctgattgacaccatgtaaaccgtattggtcacatg

SEQ ID NO: 36939 - DNA, 689 bp, Oryza sativa
  Clone ID: PAT_MRT4530_40715C.1
ctctggtgacgtggacgaatctcggacgtctatttctcgatccaacggtagtttccaagtttccactacatatgtggtttgcactatatattttcccatcttgatgatgagtcactaggcactgcatcaagaggctgctgagatggttggattgatcttccgccgctgtggagagcctgggggcaaagtgggttctgaggtcgtcagcaaggacctgcgccactgaggcatttttttcaagcgagtgagtatacagaggcctgaacttgtcagccagcacatcgccacaccagtggtcatgccaaaatgaggttcgttgatcatctccaacctgaacgtactgaggtgtgtttctgaagaattggcagcagggacatcatggagtcccaatgcgttccaagcatgttaattatgagcagctaagttcgagtttagatgttccccccatatccaggaagcccaggaagagtgatcagcgtggaggtggtgtaatctcttactaggagagctgtattttgcttttcgatgtttttgacccccagcccgcctacgttcttaggcatgcagacagaatcccaagccactaaacatctctgccaatgccaataatcaaaacccatatagagtgcaataattaagttcaaaattaactcataaggcactcaagccggcagggaaaaaatcacact

SEQ ID NO: 36940 - DNA, 1095 bp, Oryza sativa
  Clone ID: PAT_MRT4530_40716C.1
ggagcggcggcgcctggtggacgacggtgtgcagccatgggcggtgagcggcagcccggtggaggcgagggaggagaaggaggagtcattgctgttatcgcgctgcgcggcttggacggaggcgaggttggagcggtggagcttggcgacgagcgccgtggagaggaacgaagaggaggcgacggcggctgcgcggcctcgttgacatcgtctcaccggatgttgctgcttctggaaccccgcgccgcgcccaagcgcaccagcgttgtcctttggcgggaaaaccccaaggtcaccgatttcggtaggccccaccgtgcagtgactctcatcaacaatagcaaaggagtcgcaaagaccctctccttttcatttctcccccaaaccttttcgcccttcgccggcggcggcggcggcggcggcgcagcgaggcggcgatgcctcccaaatctgatagcgtcgaagctacgtgccccgctcgttcctcccattgtagccgatgcgttgcaaaagtttagcctcaagaagaccgcagtgcaaaaggcattggatgcattggctgacagtggacagatttccttcaaggagtatggcaagcagaaaatatatcttgctcgtcaagatcaattcaacatcccaaatggggaagaacttgaggagatgaagaaagcaaatatcaagctacaggaagaacttgcggatcaaaagaaagcaattagtgaggtagaatctgaggtacgaggtctgcagtcaaacttgactttagcagagatcaagtcaaaggaagctaaattgcaaagagaagtccaggaaatggaagagaaactaaataaattgaggaatggtgttatcttggtgaaacctgaggacaagaagattattgaagagagcttctctgagaaagttaaccagtggagaaagcgaaagaggatgttcaaggagctatgggataatatcactgagaatagccctaaagaccagaaggaatttaaggaagagcttggtctcgagtatgatgaagatgtcggtgttaacttgcagtcttacagtgacatgctgacgagtctcagtaaaagaaggaaagtatcccgctga

SEQ ID NO: 36941 - DNA, 414 bp, Oryza sativa
  Clone ID: PAT_MRT4530_40717C.1
ggggctaagggcccaaagcaaaatagaaatcattccttgaaaaaccaaaaaagggaacagaagaggacaagagcaaaaaaatccatgggaggaaaaaaaaaaagaaagaagcgtccacttttttttcacaaaaccacccctcgacaggtgtttaattacaaaaaggacccccgaccggcgctacccggggccgccgttgcaaatgccggggagcaacaccggcagcctcgccaatgacaaggagggggggggcctcccctcctccttctcccccgggggtcgggccgaaaggggggccctttccctttccgtcctcgccggggtcctcgccgggcgacgctgcccgccgccgccaaacgccaacacccccataaggggccccagggttgtgctccggtcggaaaaaaacaaccc

SEQ ID NO: 36942 - DNA, 255 bp, Oryza sativa
  unsure (1)..(255): unsure at all n locations
  Clone ID: PAT_MRT4530_40718C.1
gtttgaaaacccaccgccacgtcgccgccgccgccgccgccgccgccgacgncgagatggctcgcacgaagcacccggcggtgaggaagtcgaaggcggagccaagaagaagctccagttcgaacgntcccctcggccgtcgaaggcgcangcgttggtggcggcacgggtacctcggcgaccacgaggagcgcggctggaacatcggcttcagggacggctaggcagcaaacgaagcagaggaagcacancgtt

SEQ ID NO: 36943 - DNA, 333 bp, Oryza sativa
  Clone ID: PAT_MRT4530_40719C.1
atggtgttgaaacctcatcagtgggctttatcaatcttcttccgactattgcaaatccacagaggacacaacgatcagggtgcggcaaccctcgagcgcgtaaacggtcggccgctcaacacccgttcagaacggtcacccaaacgaagtagcgacaacgtggaggagccaaggaatatcaaattggcgttggttggaatgggattctccccagatatagcacctggtaagccgaccaggaagtgtactcccccgatggttcccactttcaagaaagagaatccggttgatcagtgggttgcttcaaagatctcaggatggtccggaggttga

SEQ ID NO: 36944 - DNA, 432 bp, Oryza sativa
  Clone ID: PAT_MRT4530_4071C.1
gtataattctattcgtatagtttctacggcaatgtattttcatataatttagggatgtactcattaacaaatgagtttatgagtaactagtggccaaagtatacacttagtcttttgactttataatacaccttattaaaggaatagagtatatactaatatacaatgcacccaaactacatatcactagataagctaatcagaagtatctcttctacagcttgttcagctgatcatgtgataatgacttggctcgttttgcgtgccatcaaaaattcaagccaacactcattccgaactgagcctagtgttttttatggcacacaaaacaagacaagccattggcacatgattagttgaatattaattggtaaaaactagaaagaaaaaggatttatttgatttttgaagaaacctctatatagagaactt

SEQ ID NO: 36945 - DNA, 210 bp, Oryza sativa
  unsure (1)..(210): unsure at all n locations
  Clone ID: PAT_MRT4530_40720C.1
tgntgattgccccccgtgtccncgtagtagtggtgtccgtgtccntaccaccccgttgttagggtctgatggggtagtattcaggtgtcttttggggtccgtggtgtagaacggaaaaagtgccccacagcgtccgtcatgtgcagaactcaaactcatgggatacagtgatactagtgcagaatttgaactaaaaaaaaaaaaaaaaaa

SEQ ID NO: 36946 - DNA, 537 bp, Oryza sativa
  Clone ID: PAT_MRT4530_40721C.1
ctgcaggctccttacaaatgttcaaccgaagttgtgatgaattcgttcctagcctatcatgagttatgtccgtgagtgggaaaaggcccatcaaatgctgctttgagtttggattcagtttaggtgtgattgtgatgttttagcatgaagttaagcagcagtcatggggtactcataattgattcgaccaaactccaaacattgtaatttatcagatatgtgtattaaaagcccttgccaatctgcaatgcttggaatttttccatctgatgctcaaactgaacgcaagtgaaatccttctcgccagatgatttatcattacgtctggcctttatatatttgtagatttgttataccaaggtaacactttctattgcttcatatgatatttctcagattatcggcctcatttactgtatgcagagcttttcgatggacaagtttgaagtgagctgtggaacaaacttcatgctgtggtgggcggtggcgtatgtgcaagccaggaggagctcaccagctatccttgcggcaactgcc

SEQ ID NO: 36947 - DNA, 216 bp, Oryza sativa
  Clone ID: PAT_MRT4530_40722C.1
atgtggaaaaaccgccagcacagaaaatcgtgggggtattgtatgttcgctggcggtaaggggatgcggcccaccaacgaagatgtaggtgtctttgctggtggccctcttaacttaacgtcagcgaagatatcttaacttaacgccaatcttcgctagcggtgtggtgacgtggaccgccagcgaagatacctacatcttcactagcggcgtcct

SEQ ID NO: 36948 - DNA, 1734 bp, Oryza sativa
  Clone ID: PAT_MRT4530_40723C.1
ccggcgcggcggtggagcgcgggtgcgtccacgcgcgcgtcgtcgtcgtcttcgagttcagcatcggtgcaacatttagcaaaggttttaataggggattgggtacccttaccgctggagggcttgcgctagcagtcgccgaattgtccaaacacctgggaaagctggaggaagtaattcttataattagcatatttattgttgcttttttcacaaccttgacgaaactgcatccaaaaatgaaggcctatgagtatgggttccgcgtattcttgttgacattctgctatgtcatggtttctgggtacaacacagggaagttcactgatacggctgtgagtagatttatattaattgctattggtgctgctgtcagtctaggaatcaatgtaggtatttacccaatatgggctggacaagatttgcacaatttggttgcaaaaaacttcattggtgttgcaaaatccttggaaggtatgaaactccaaccccgcaaaccaaccatctatagtatttttttttccatgttgcgttatttgactttatgttgaaatgcgtggtggctggacaagatttgcacaatttggttgcaaaaaacttcattggtgttgcaaaatccttggaaggttgcgttgatggatatttgaaatgcatggagtatgaaaggattccttcgaaaatacttgtatatcaagcatctgatgatcctctatatagtggctatagggcagcagttgaggcatcagcacaagaggaaactctgttgggttttgctatatgggagccaccccatggcgcttacaaaatgatgaagtacccctggaggaatttcaccaaagttggtggggcattgaggcattgctcctttgcagtcatggcattgcatggctgtattctttccgaaattcaggcaccaccagaaagcagaaaggtttttagtgcagaaattcagagagttggtatagaaggtgcaaaagtgttgcgcgagcttggagacaaagtcaagacaatgaccaaattgagctcttcagatattctagcagaagtccacttggctgctgaacagttgcaaaaaaggattgatgagaagtcgtaccttcttgtgaatactgaaagatgggacactagcaagcaagccgaaggtatcaaagaagttctgaatggcactggcattatgggaaaggaaaacaagatcgaagtgaaggagcctacaattgttgaacaaactacagcgcatcattcaaaaagctttgctgttaattcatttctgagcagacatgattcatcatcaactgtagatttcaagttactgtcttggcctgctcgaagatcattccatccaaatctgccacttgaagacgaggaaacaaaaacatatgaaagtgcaagtgctctgtccttggccacatttgcctcccttctaatcgagtttgttgcccgactacagaacgttgttaatgcatttcaagagttgagtgataaggctaacttcaaagagcctgtgcaggagcctgttgcagttagtactagtgatggcggctttctccataaaatatgcaaattcgtcggaatcaagagttaacatcgcaaatgaccctactagtttcatctgaaaccttgttattcttttttttttttcaatacagttttgtttaagaattacgaaccacgaaatgtgtataaattctacacttgtgtatatgcaatgagaatattgcgagctttaaaaaaaca

SEQ ID NO: 36949 - DNA, 798 bp, Oryza sativa
  Clone ID: PAT_MRT4530_40724C.1
ccacgctcaacgaggacactgaaccctctattccacctggatttggaccttttgctacccttccgttatggggaatccacaatgatgccaaacctgctgttactcattctactcctgttcaagcattgcaaagcattagaaaagacagcgaagaatgccaacccagtgcggctgtgtctcggagtgatacaccttgcagcacttccggaacccagacatgcagaaaatcactgcgtaacagacccccaatagactatagccgctttgaacatatatcggatgaagattctgatgtcgaaatagtggaaaaggatgtaagttcaacgagacgcagacaacagctaccgaaaggagtacttcgaggatgtgcagaatgcagtgactgtcaaaaggttatcgcaaaatggaatccagctggtgcacgcaggcctgttcttgatgaggctcctgttttctatccaacagaggaggaatttgaagacactctaaaatacattgagagtatacggccaatggcggaaccatatggtatttgccgtattgtcccaccatcttcttggaagcctccatgccttcttaaagataaaagcatatgggaaggatcaaaattctctactcgggtacaaaaggttgacaagctccaaaaccgtaaatcatcaaaaaagggcagaagaggtggaatgatgaagaggagaaagcttgcagagtcagaggagaacagtgccactgctcacactcagacagggatgcagcaaagtccagagagatttggatttgaacctgggccagagttcacgt

SEQ ID NO: 36950 - DNA, 536 bp, Oryza sativa
  Clone ID: PAT_MRT4530_40725C.1
tgctgctgtcagtctaggaatcaatgtaggtatttacccaatatgggctggacaagatttgcacaatttggttgcaaaaaacttcattggtgttgcaaaatccttggaaggtatgaaactccaaccccgcaaaccaaccatctatagtattttttttccatgttgcgttatttgactttatgttgaaatgcgtggtaaaagaatattgtttgtggctttgtgctagcactgcaattgctatagagcatagatacatctgatgtttatgcatttcttgccaaattatgatatcaagtattgtatgcttgataccgtttttggctgttcattctaggttgcgttgatggatatttgaaatgcatggagtatgaaaggattccttcgaaaatacttgtatatcaagcatctgatgatcctctatatagtggctatagggcagcagttgaggcatcagcacaagaggaaactctgttgggttttgctatatgggagccaccccatggcgcttacaaaatgatgaagtacccctggaggaa

SEQ ID NO: 36951 - DNA, 381 bp, Oryza sativa
  Clone ID: PAT_MRT4530_40726C.1
atgggcagaacagcgggcaacgctgtgcttctgactgcacagctaattgtaagagcaattctacggtccttgaggaggtaccatgagtactgccgcatgctgctactcgccggcgtcgccgcagtgtcgcatgcaatcgtgtggtcacgtggaagccataacaaggccacaggctgctggcttgctgatcctgctgcacagccgcatgccggccgctgtgccatcgcgtgccgtctgcgtcgcgcggctgatttctgccgcgtcgtcgccttccgtcccgccagcacttgtcaccatgcaatccatgctagtggatatccgtcccatgtgactgaggtggagccatggaggttttcaggagcaagaagacgagaagattga

SEQ ID NO: 36952 - DNA, 1410 bp, Oryza sativa
  Clone ID: PAT_MRT4530_40727C.1
atggctgcaactattgaaacgatgtcactgccctttgccacacaaaattcatcacaaaactcagagccttcttttgattggctcaccggccgcgtgcaaatgatcggctcgcgatgccgatgccgacgccgacgcgagtgctcgacacagataaatcccgtttcacgacgccgattgcaaattcgacggtttgtcgtgagaagccccgtgatcgctgtggctcacgcagcacgcacgcacgcattggctgaccgtggcacgccggccgtcgaatggatcgccggccggcagcggagtaaaacgccccaccgacccctctgcacggggtcggaggcaggcatcaccggctcatcatggacaccaccaaaccctcgttacggccgctgctcagatcacaagttgaacaagatttcaaacgagaacaaatgcaggcaggcaaacttgtcgctcgactatgacaccagtgggtactacgactactgtgccatcgagtgtccgcagggcttgtctcccttggcgcacgcagagaccgtggaaacggctcgcgcgccccaccgcgcggaacgtggcgaagtgcgcgacaaaatcgcgatcggctgccgcaggcagcagcgcgcaggggcgctgcaccccggcgcgttgtttaaccgagccctggccgcgccggtcgcgatgtgttttttttacccaacttttgccctttttgcttgttcgtgccgcatccggcgccacagcacagctcgctgcctgcctgccaaaatgattcaaacatatgaggagagagtaggataccctgtagcaattagcaaagcatgtgcacggatagctagctctaccaagtaccaacaacacggtcaagattcaagagagttagctttgccgcctctgactcggaatagcatgcttccctctcatcacacgaccacacaaatatatgcacgcacaatcgtggccttgtccaatgtgtccaaccagctggaccccaagtatcagagatatatagcacccgagtaccttaaatttttcgacgggacagaccgaggcaggggcggggcttgctttgcttgctgccgctgccgctgtgactgggagggagagatttcggggttcgggaagcagggccgatgcccgtacgaacaaaatgtcctgaagaaaaatcggcgatgtggccaagccatcttccggtcgcgatcgggcaagatcgatcgatacatggatgctggacagatagatgctcgtactcgtacgtcgtcgcagctgcaatggctaggctacttcaaaagagggcagcgctcatgccgtcgtcctcttgaccgcgcccggcgaacccagccccagccaagccaaaccaaaccaacggccggctcgtctcaattcgacttcgccttgttgaatcggcgagtgtccgtg

SEQ ID NO: 36953 - DNA, 945 bp, Oryza sativa
  Clone ID: PAT_MRT4530_40728C.1
atgcacgcgcgcccgaccttcacccgctgcctaagaagctccgcctccaccactggccgcccgctccgcctccgcctcagcctcaattgcctaccgcctgccgcacggggagctcagcctccgctgtcggccgctgctccgcctccacctcagccgcccgctctgcctccgtatccgccgcccgaggagctccgcctccgcctctacctcagccgcctgctccgcctttgtccccacctcaatcgcccaccggccgcccgctctgcctccgcctccaccgcccattgccccaggagctccgtcttcgctgtcggctgcccgctccgcctcaacctcccgccaccctaggagctccacctccgccgcgtaggtcgggaacagcagcacatgtgggtcgcgcctgccgcttctcactgccagccactcgcgacccagctgcgcccgccgccgccactcacgccgccgccctcttcccgcccctgctccgcccattttcctcgaatcactagcatgcggcagcaatgggtgaatgaaaatcatggcatgttgcactttaagggcttgtttcgttctcgtcgccggcttttcagcgctcgccgccggcgaatgctctccgcattgctctttatcctcagtctcctcccccaaattagacggcgttgtagccctccccgtcgccgtcgcccactgctcaccggagccggcggccgccgccgcgggggaggccgcgacgacgaggagctcggcggcgagcgcggtgagtgagagggagagcgggagcggggtgcagtggagccggaacggggtgcggttgcggcgacatcctccatggccggcagcaagcggatctgctacagcgtcggtgatgaagacctccacggctggcggtaggggtgcgccgagcacgtcgtcgtccacagccggctgaggaggctggggaggcat

SEQ ID NO: 36954 - DNA, 347 bp, Oryza sativa
  Clone ID: PAT_MRT4530_40729C.1
acttcttgtctttcccaacattttttttttttggcaaaaaacggtgcgttccattgagaacaatctgaatttttccaaaaaccaagtccaaaactggtttaaaaaatcccccctctgaaaagcccctaaaccaaattgtccaatccaaacggtaacatttacgaaaccataaatctttcccttttagccccaataaaaattacaaccttctaccctttttaccaccttttttgcgtgtactatcagtcggccctggaacaacatcctcaaaaccaccaatttttatgccaaatacagcaagggctttaagtgccgtctgagcaccaacaccaggggttttttttttt

SEQ ID NO: 36955 - DNA, 1413 bp, Oryza sativa
  Clone ID: PAT_MRT4530_4072C.1
atgtcgtggcagagggttggtgccctgctgcttggggctcagtcctgcctgcctgtcccgggggttccggccgtaggcaggattgggtcggtactcttgtttatggctaggatgggttgggaactatgtcacgtcttccgtccgtataccgtggtgatgtttaacagagaaaaaggaaagaatgtcagagggtatgcctccagtaactcaagttttcaactcaatccaccactggcctcaagagagttaaccagggcacacccttggtccattccaagcatgccgcttagttcacagctaccattggttggaagtcaagaccaaaatcagtatgtgtttgatcgagcatttgccacccaggtcaatgagcttccaatgccagaagaggatgtccccttttgtcacgattgtagagaacaaggacactatgccctgaattgtccatgggtatatgccaaagaagccccttcctttggtttaacagggcagacatcgctaaaccagcctcctcgcaccaagtcaagcttgcagcctagtgtgcaaagtagagagcccaatggagagaatccattgaatcccgggaattgctttcctcctagcccttcgtaccacgtggggtcacgtactaagcaagccaaaggcaagaagagtaagaatcagaagagaaaagcgccgatgcgaactgaagaagaagtacgtaagatggctattagcagcaccgaatggcctcccgcagggataactattcctagacgtcaaagaggaaataccttccgaggtgcacgacagttgacccagcaccttctaagccatggtggcagagtatctgatagtgaagggtcagatcaagtctcctcggatgatgaagatgagtctccccgacatctcggtgaggaagagatggaatcaaaagcatgtatccgttgtggagaaattggacacattgctagcatgtgtctcacactctgcgcttattgtgaagaagaccatccaccaggggagtgtcccacccgcaaggtcacatgctttctgtgcgaaggtacaaatcatgtgcccaaggattgccaactcagtgtgttgttgaccaagaccgcagaaatccaacgaacgaccctacgattgtctcgtcagctagtcagctccaacagcaacatcgacgatatcatccacaacaccaatgctcctcctgctccacctaactctgcaataaatcatagcaataatatctttagcaccaaccattctctgcaccgacagcctcagcaaagagttgtcgtcgatggaagaagttgtgtctctccccgacctactccaggccaagcaaagggcaatcaacctcaggagggcgataccaagcagaaaaccgtcatccgcttcaaccagcaatcagaaggaagcttctcctgcgaatga

SEQ ID NO: 36956 - DNA, 590 bp, Oryza sativa
  unsure (1)..(590): unsure at all n locations
  Clone ID: PAT_MRT4530_40730C.1
aaaaacaacaacaacctgcataacacacttgttcttgccttcagaaacaataatcactgtccctaaactcacccaagagttacagcaactggagtactcaaccctaagtctaaggaaagactgcctttccagccactaaaagcaaggcaaaccttacttgctccgggaatactcaataacggcacgccggccaaggtgagcaaccgctcgaggacctgctttggcctgctcggggcttccgccgtttcaaaacttccaacttcgtagttcgtacccaaagtcgaagcgcgtctcgtcgaactccacgacgagcccgagggtgtcgcccttcctccagctggtacacgcgccgggtgttccggaacccgccgaggcagacaacgggggccggcgtccccgccgacgccgtactcttcggagacgagccgaatgatcggggactcgacctcctcgacgcggctgacgcccgcgtcgatgcgcgggcggcgcttgagcgcgaggacggcgcgggaggggcccccgntcgtcgaggccgtaaaggcggacgcggagcgccgccggtggcggcggcgagggggcgcgcggcggcg

SEQ ID NO: 36957 - DNA, 444 bp, Oryza sativa
  unsure (1)..(444): unsure at all n locations
  Clone ID: PAT_MRT4530_40731C.1
aaaaagaacttccctttccttttttttaggcaggatggctccataagacangncgcctttttagatcatctttgttcccaataaacaaaagtgtttttgcgttttacctgcgcataaataaaaaaaaagctaaaagggttttccggtttttagggtttttnngatttttcccaagggggcctttatgccttttttttttttccccttggaccccggggggagggaggtttaacttttacggggttacaagccctttttttaattgggggagcctccggaatttttagcaaacctttaggtgggaatttttttggggagggtccccccccccttacagggggggggttcccttaaaaccaagatttcacaggggggtgtccttgtttttttaaaaggaagggttctttccctttttttcggggggtttttttattccgggttttt

SEQ ID NO: 36958 - DNA, 255 bp, Oryza sativa
  Clone ID: PAT_MRT4530_40732C.1
ggggggggaaagttacaagcaaaccctggttaattaaaaagaaaatgttttttaaaaccaaacacccaaattggttgattgaagcccccccgggcagattttaggatagggggagtttttaaggtttggcaagggcccagggaaaaaccctgaacctttttagtatttggaacccttataacccttgtgaccattggagaaatgggggccgacctttttgtagtctttttccaggggggggggggcctcgggggc

SEQ ID NO: 36959 - DNA, 246 bp, Oryza sativa
  Clone ID: PAT_MRT4530_40733C.1
atggctcagagccacgttgatcctgtgatagctgaggaagaagctctggatgcaaatcagagtcgtttcctgattgcaaactggcctgatgaaactgctttctcatctgctgagctactcactgattctaatgaatgggatctgattgtgtcatttggggcattcatcagtgtgatgcatcacagattaccaggtttcagggtgaatgccgaaatactgaagtccaaacatgtggtttttgcatga

SEQ ID NO: 36960 - DNA, 689 bp, Oryza sativa
  Clone ID: PAT_MRT4530_40734C.1
atggcatgtgagcctataagcataaggttctcacaacatcttaatagcccagaaatactaattctagaaatgataaaggatgcatttgtgggaggaatcgacacgactgctgtaactgccacttggattatgtccgagcttatgaggaacccaagggtaatgcaaaagagcacaggctgaagtgcataacattgtgaaaaacaaatcaaaagtatgtgaagaagatatccaaaacatgaagtaccttaagatgataataaaagaaaattgcaggctgcatccaccagggaccctgttgattcctagacataccatgaaaacatgcacaattggtggatacagtgtgccatcagaaacaagaatatatgtaaatgtatgggcaatggggagagatcctaacatatgggacaatccagaacagttctatccagagagatttgaggacaaaggaattgatttcagagggtcacattttgagctccttccttttgggtcagggcgaaggatttgtcctggcattgccatgggtgtggccaatgtggagcttgtagtagccaatctgttgtattgttttgattggcaacttccgaagggaatgaaagaagaagatactgatatggacgaaataggccagcttgcttttcggaagaaacttcctcttttcattgtgcctatgaaacattgatagt

SEQ ID NO: 36961 - DNA, 434 bp, Oryza sativa
  Clone ID: PAT_MRT4530_40735C.1
ctctactactactagccagctggctggttgactaactacctggctatagcccccaccgcgagggccgcctcacccacctccgggggtccattccaagggctcaagctcagcgcctgactccccggcagacgtcgttccaccaactctggctcaggcaacgtcagacatggccgaaggatcaagtgcatgcaggcgtggccaattgcgggcatcaagacaactaagaccctatctgaccatgcaccaatcaccggctaggatctgttgcagcagatcgagcacccgcttacatccaagctggagcctctgctcaggttcagcaaggttgtattcgtctaccaggagaaccacaggtctcccgcgttctactatggcaggtgttggaccatgtggaagctgcccatgttcggctgcaccgaagccacccacgtgct

SEQ ID NO: 36962 - DNA, 398 bp, Oryza sativa
  Clone ID: PAT_MRT4530_40736C.1
gtaaagtccatcaccgatccctaaacttttaccgctgtatcatcccggtccctaaactcgtaaatcgaccgttcaggttctcaaacttatttgattgtgtcatcccggtccttaaacttgcagataactcgtttaggttctccaacttgttcagttgtgtcgccccggtccctaaacttggatttgaatatcatttgggccaaataggacaggaccggggtgacacaactgaacaagttggaggatctaaacgagtgatttacaagtttagagaccggaatgacacagtgaaacaagtttgagaacctgaacggtcgacttacgagtttagggaccgggatgacacaaaggtacaagtttagggaccagtgatgactttactcaaaaaaaaaaaaaag

SEQ ID NO: 36963 - DNA, 185 bp, Oryza sativa
  Clone ID: PAT_MRT4530_40737C.1
agctcatggaggaggtgtactgtacgatgagaaaaccgagacctatttctggtatggggagaataaggatggcaaaacatacaaagctcacagcaagggagctgatcgggttgacattgtgggagtaagttgctattcatcaaaggacctgtggacgtggagaaatgaagtagttgttctacgag

SEQ ID NO: 36964 - DNA, 2403 bp, Oryza sativa
  Clone ID: PAT_MRT4530_40738C.1
atggccgtcggcaagaacaagcggatctcgaaggggaagaagggatccaagaagaagaccgtcgatccttttgcgaagaaggattggtatgatatcaaggccccgtcggtgttcaacgtgagaaacgtcgggaagacgctcgtgtccaggacacagggcacaaagattgcttcagagggcctcaagcaccgtgtgtttgaggtctccttggctgatcttcagaacgatgaggatcaggcgtaccgtaagatcagactacgtgccgaggatgtgcaggggaaaaatgttcttacaaacttctggggcatgagtttcacgaccgacaagctcagatcattggtcaagaaatggcagacgctaatagaggctcatgtggatgtaaagaccactgataactacatgctgcgtctcttctgcattggcttcaccaagaggaggccaaatcaagtcaaacggacatgctatgctcaagcaagccagattcgacagatccgtcgcaagatggtggagatcatggtgaaccaggcatcatcctgtgatctcaaggagctggtgtcaaaattcattcctgaggtgattgggaaggaaatcgagaaggccacatcaagcatcttcccgcttcagaatgtgtttgtgcgcaaagtcaagatcctcaaggccccaaaatttgacctgggcaagcttatggaggttcatggagattacaaggaggacgttgggacgaagctcgagaggcctgcagaagatgaggtcgtggtaggacaggagatatgccggcttagtccattaaagatgtatatcttagaaacatatacgccttgggacaaatctacggacgtgctccatgttttgctgaattattggtactgggttgcttctgttaggtttcttggtccaagtttgcctttctcactggggagcggcgattatcagttggagcagaaaggtgccagcatgggtttgaggagcaagcagccaaaagcattagctttccgctgctatgcggcgagccaccgatctctaactcttgcagtgtggagccttgcagcactggtagtagttgtgaatttccatcttcttatcatacataaggaggatgagagcaccagcatacatgagatcaatcggtcaattgtaagcgagctggaggaggttgaggaggaaaagttccgggtatcgcctccccggagccggaggaatccccgggctgtgcggcgcaagggggagcagaagccaccttctgtagtggatgagttcttggatgagtcttctgcggtgcacgacatgttctttccagaacgcaacatggctatagatccaatcaatggtgggaatgacagcatgtacttctactacccagggagagtttggcttgacactgatggtaatccaatccaagctcatggaggaggtgtactgtacgatgagaaaaccgagacctatttctggtatggggagaataaggatggcaaaacatacaaagctcacagcaagggagctgatcggatttctgtgcgtccctatgtcattcctaaccatgataaccttttccaggttgacattgtgggagtaagttgctattcatcaaaggacctgtggacgtggagaaatgaaggagttgttctccgaggtgagaaaaagaatgtgacacatgatctccataaatccaatgtcctggagagacccaaagttatatataatgatcggactggcaaatatgttatgtggatgcacatagacgatacaaattacaccaaagcatcagttggtgtggccatcagtgactctcccacaggcccattcagttacctgtacagcaagcagccacatgactgtgaaagtagagacatgaccatcttcaaggatgacaatgggaaggcctacctgatatattcttctgaggacaacagcgagctccacattggtcagttaactgatgactaccttgatgtaactgataatatgcgaaggcttctcattgcacaacatcgagaagctcctgcgcttttcaagtatgagggcacctactacatgataacctctggttgcactggctgggcaccaaacactgcactagctcatgcggcgacagcaataatgggaccttgggagacgctgggaaatccttgtgtgggagggaatgacatattcagatcaacaacattcttctcccagagtacatttgtgttgccgattccaggactgtcaggttcattcatcttcatggctgatcggtggagcccatccgagctgagagattcgcgatatgtatggctgcctttgacagtaggtggactacctgatgaggctgcagattacagcttcatgttccctctttggtcccgggtgtcgatttactggcacagacggtggcggctccctgaggggtggagggactcctga

SEQ ID NO: 36965 - DNA, 184 bp, Oryza sativa
  Clone ID: PAT_MRT4530_40739C.1
tgacgagcgacaagagtaagcctactagatatactacgtgggcttgcggcttggaaggctgtggtgctaacgctatgatgctaagtattatgagactacgaggtatataaggacagccatagcagtgactacgatagcagctaatagcctagcacgtatactacgtaggacaagtcgtgtacta

SEQ ID NO: 36966 - DNA, 492 bp, Oryza sativa
  Clone ID: PAT_MRT4530_4073C.1
atggcggccggatcttccgcggccgattccccctcatccggcctctctctccccctcccgaccctatataaacgctccccgtgcctccctccaccgtttccgccactcgccgctctctctccccgtcggaatcgagctcgcgccgtcgcccctctctctccgccgtcgccgccgagctccggtccgccgccgtcgtcgccccggaccttttcccgcttcggcgtcgccttcttcgggttcgccgcaacctcgccgacctcgtccacctctccatttcggtcgccgaccgccggaacgccgccgtcctcatctacccgagccgcgccgccgccttcctccgctccggtcgccgtttccgccgtcgccgtcgaaccggggggcgcgggcgcgccgcctcccgtcggctgtgccagcgaggccgccttcgggcgcgccccgcggctgccatgtggggcctggccgtcagccgcccgagccctcgggtgcggctga

SEQ ID NO: 36967 - DNA, 496 bp, Oryza sativa
  unsure (1)..(496): unsure at all n locations
  Clone ID: PAT_MRT4530_40740C.1
ttttttttttttttttttttaacaatattcaaggcctgagcagtccanatatatttggaagcttatactgnaaaaacggacgcgtgggtcgacccgggaattccgggaccggtacctgcagggcgtaccagctttccctatagtgagtcgtattagcagcttggcgtaatcatggtacatagctgtatatacctgtgtgaaattgtctataccggtcaccaattccacncacaacatcacgagccggcaagcataaaggtgctaacagcctgggggtgcctaatgcaggtgagcataacctccacattaattgcgcttgcgctcacgtgcccgctatctccgagatcgcggcaacaccgtgctcagagtgcccagcctgccacttcaaatgcaaactcggccccaacgacgacggtgcgcagacaggcgtgnttnttcgcggctcatacgagggggccgccacagggggatagngcgtatctctctccctaattgt

SEQ ID NO: 36968 - DNA, 959 bp, Oryza sativa
  Clone ID: PAT_MRT4530_40741C.1
gactccgacgccgtctgggctagcttcctgccgcgtgatctccccgatctcgccgacggcgagctctcccccggcgccgccttccaagaaggacctcttcctccgcctctccggcggccagtaccaccgcccgccggtctggccccagggcatgtagttggacagggagaccggggccaagtgctatgtgctcgcggctagagcgctggtcattatctggacctgtacagccaagatactggcgctggatccctctcaccgactccagattcacagaagctgctgagctcttgagtgtatgctggttggaaatcattggcaatatcgacagcaggatgctctccccgaactcaacttatgctgcggttttggtgttcaagatagctgaggagttctaccagctggatactatagatgcaacagtcaacctcggaggctcgaaatcaagtcgcgaggttgctctcactcgatcccgtcgtcgtcctgaagaagagatcagtgcagtactgttccctcggacaagagctgacggctggatggaggtggagctaggcgagttcttcaacgaggaaggtgaagatggaaacgtgaacatcagaatctttggtaaaggacccaattggaagaaaggtcttattgtgctgggcattgagattagaattaagaaatctggcagatgatcgagcttctaggatcaaagatgcgtcttgggagtactgaaatgtataagatttccgatgcctgaagctttggtgttttagtggcatttgcttttgctgctgctagtgatgggcaaaactagagggtgtttcctcttcttgtgggtaatctgacggacctttttctcaatttctggggacaaactgaacttctgtagccgacatcttggttcagtgctggacgattgtctacatctggtttggaagatgcaactagagacagctatatattgccatttt

SEQ ID NO: 36969 - DNA, 243 bp, Oryza sativa
  unsure (1)..(243): unsure at all n locations
  Clone ID: PAT_MRT4530_40742C.1
tccacaccaactccgacgccatngccgcgcaaccngctctttcccttccttcaaggagcangagcagcaagtggtcgagtcgagcaagancggcnccacaccngtcgagcaacaagngcngnntattancanacacngctgagaggacgggtacaactggaggangtacggncagangaggtganggggngcgagagcccgaggagctactacangtgcacctacaacggctgctccatgaag

SEQ ID NO: 36970 - DNA, 711 bp, Oryza sativa
  Clone ID: PAT_MRT4530_40743C.1
atggaggggaaacgatcaggtcttccatcttctactggtggcaaaggcaagggtgttgcagtagtaggagctaacgcgtggtattcagatgatggctctgatggaagcaagagtagcagtgagagtgagagaactgtcaccgatgattatttcggaatatttgtgcatcctggtcatggtgatcaggaggtggattctcgtaaggctaatcgccatgaagcagatcattcagaaaccgatagcgagagaactggaagtgctggcttagggaagatcgcaaatagtgctggcaattctcaccatttctcagatgtagattctgggttgagcccagaaggaaaaagacagaaaagtgcaaggtttcaacctgagaggattctaagtggtggcaatagttatggagcgaatagtggtcaccagcgagatgcagactccgggatgtttttgtcgttctcagagaaaacacaagtgcaaacaaataaggatattcctgaatcatggaaggttcatccgagaaaagatgaggttgatccagatggatgggtcgtcgagatccatctccgaaatgatcaaaagaccaaggacaagatactggaaaggtcgcggtcgtggcagacctcgtacaacaaggacgatgaccctaaattcaggttctggtatgtctgcctctggagggaaaggtccagaatcccccttacaacttccgcatag

SEQ ID NO: 36971 - DNA, 464 bp, Oryza sativa
  Clone ID: PAT_MRT4530_40744C.1
catactttgatttgggaggttgtcattcatctgcatcttttgatccatttgtgaccgaaattgttctgcaaaaccctcgatttcgtcctcttggagcagatcagatccctgtgatcgaatcggcgtcgaattttggttgtggttgatgctcttgggttggatcttggtggtgagaaagatcagtgatttttgatgatgagaattaagaggaattgctatgcgctgcagggaggagtcgagctcgctgccatgtacttggcgaggcgaaccaacatgagatatgtgatctatatgatgatcgacactcacctgcaccgctactgcttcctccactacttgtcgggtgtcttcctctacgtgctttatgcgatctgcataattcgtgcgcgaatcatattgtgcgagtcaatccggcattgatactagtagtagaagagctctctagttgctggacttcttcttag

SEQ ID NO: 36972 - DNA, 711 bp, Oryza sativa
  Clone ID: PAT_MRT4530_40745C.1
cgcttcggttccttcctcgagtcgaaacctcgcgaagcgccgccgccgccgccgactctcgctagggctagggttttcctcccgccgccgggagcccctccccctgcaaccgcgcaagggatggctatgcaagttggggaatcagttgctcctttaagtccacaaatgattggaaatgcgtttgttcaacaatactacaatgttctccatagttcaccgggtcaagtttgtaagttctatcatgattcaagcacccttggtcgaccagattctaatggaaccatgacatctgtaaccacattgactgctatcaacgatgaatttctctctacggacttcagtagctgtttgattaagttagagaatgtggatgcacagttatccctcaatggtggtgtgcacattttggtaactggatctattggacacaatggcactatgaggcatagatttagccagtcattcttccttgctccacaagaaagcggaggctattttgttctgaatgatatgctaagatatgattctctgcaagaaacactgttgactgagacaaatgattctccacaagaaagactgttgactgagataaatgattctctgcctaaccatgttgatgataacactcacagtgtcacatttacatctgagccagagacttcaggcaatgtcaatgagactgcagacttggagcttccatctgcagagaat

SEQ ID NO: 36973 - DNA, 282 bp, Oryza sativa
  Clone ID: PAT_MRT4530_40746C.1
atgatggttatcgcggttggaatggtcggtaataccctccgaccgtcattggggcttcatctcaaccgtccagccaaaacctggatccaacggaggcgagggaggttcagccgaaccaggggctggcccaaactagcccactttcggctggcagcctcctccgttgttctgctccgcggacttgtgaattttggcccagtttgtcatgtcaattctatgttcttggcccattcatacataagtctgattctcgacatcgcccgattgatttatcatttgtgt

SEQ ID NO: 36974 - DNA, 1519 bp, Oryza sativa
  Clone ID: PAT_MRT4530_40747C.1
cgcgggcggcgccggcgccgcctcggcgccgccggacccgcccgcccggaccgcggaccacatgctgggccctctccgccgcgccgccgtggccgcgggcgcggcgtccgcgtcggcggcgagcctccggcagttccagtgcgcttaccatcgaagcaatgagagattactgccctgtcgagaagaccaagaagtttcatatggtcttaattgggctattgctggaagaggtgttgttgtaaaagataaggtcttctataacctggagaaatcggaacttcagaaaggtggtgctgcttacacagagtgcctgtctggcattccacttcatgttagaggaaatgtcattagcgggattcctgatgtttcaagagctcaattcgcaaagcttcttaaactggtgacctttcatctttcatcgatctcaagtctgtatgtccaagacggtgctgttggttcctctgtggagtgtgatgcaaaggtccgtgttattagcgataacccctctgctgttctgttgctctccaatatcctttggaaaacaccagatcgttctatttcccatgacacatgcccattgactatatatgttgccagctcgataagtgctaatgtcaggaattctcttggttctggatcacaatacgccaatggatttgcagcagcagacatagaacgctcgtcacttatcctatgtggtaaagcatttgctgattccgctatgctcaaaggtgctcttagtgctttgactgcccctgtattatcagcaaggggaggactaccatttcctgggtggctcctgtcttttggtggttctgctgtattgttgtttgctccagtggatgtcataaaatccttaaaacttcaggacgttctcgtgtccactgacagtggtgtagttgtctcccctaaaggatctaatgtgctattcgccacaaaggctagggaaccaaatttgtttaccagaccaactcaagttattattgtatcatcagatagtactgatgccctaccagcattatcaaagctttctccaggccaggctgcttaccatttcttagcaggatattgtgatggtaaatttatcccagcttacagcaaggacccctcccctcttgaccccattgccctagcaaattccttattttctcatctgaaagaagataatacacctacttatctgataaatgccaagagctctggaaagtacatagatggcaaggagttcgtgaggctaatagaggtgttattatcgaacaatctgccagaccgcaaatctgaagatattagaggacactattccttctggcacagctttgtggactactgggatcacaaagagatgtcagatcttcacatggtttcactgaggaggaactggtccggtggtccccttgaccatggtggcctacgcttctcctttatctccagttccatcaacaagagaagcgctggacgtctctccaggtccttgttgcaacggtcgagatcaactgaaacaaaacacattgccaagtag

SEQ ID NO: 36975 - DNA, 154 bp, Oryza sativa
  Clone ID: PAT_MRT4530_40748C.1
gacaaaccagtttggggaattaaagaatcggaatcaatttgatttaagcacagatggaacaaaacgggtatattaaactaccaaaacactctatatggactacaacaaaaggccacacaatatatgaagttacataagtcttccagtcccacac

SEQ ID NO: 36976 - DNA, 741 bp, Oryza sativa
  Clone ID: PAT_MRT4530_40749C.1
cacgcgtccggaaattcccatcgatgatggcgtaaaggcggcgccttttctctgcagttcctcccctcccgtccctttccgctcccgcgcccgagaatttattgctcgcaatgctgccctctctgatgatgagcagagcaaaggatgcagagcctttacactttaaatgcttggtcggtttggctgcaagatgccatattgccatctcatgcgtaccaccgccatccgtccgtcactgagctcctgcttgcgtagtgacgagcgttctggtttcgctcagctcgtctcgatttcacacggattggaattcggccgcattccgcgtggaaagcttcgagttcttggtgcttcttgttctccgctgcgaaaaccgcagctttagattcatcaatgttgttatcctctgaggcttcctttgtaataagaaggcagtgatcaatttgtttgacctgagtaccgggatgaccagcaaaaatgtgctaactgatagaactcacagagatggctctcgagttcataaaagccggcaagatgtcaatagaactgttgatcccaaaataggttgtgtagaggacaaattagtagtagctagtactaggaattcttcaagcaacaaatcaaccatatctccaatgaacagattagtagcaatggagatgtccaaaggagtggaatcaaagaggaagccacctagtgtcgttgccagactaatggggcttgatgatgatccacctgctaaag

SEQ ID NO: 36977 - DNA, 1203 bp, Oryza sativa
  Clone ID: PAT_MRT4530_4074C.1
atgtgggaacaatcaaaccatatgcttgagatatacccacaaagccatcggcggccgcttacagcagagtacaccctcatcttgcacgcctccgaagaagcaggagccgtgatcaacacgagcatcttgtcctgctccaccccacacagtgacgagtctagggcacgacgaaggcgcgctcctaaaccgtgggctcggggctccggccagaccggaggttcagaatgtgctgtcctaagatacataactccggtcagtaatttcgtcgaacacttcgcgttcatcgtccgtactccctcatcgcattggcagcaaaaccaacaagaactgaccgtcctcacacagtcccaccaaaaaatcaacaacccagattcgagtattccacccacccagatcatccttccaatcgaagttgcaggaaatcaagaacggacaacacaaccatccaccaaccaagatccaagaaaccgcaagagcaagctagaaaaattcctgcagaagaatgaactcaccggagcaagacgaagcatgcgccgccgccgatcggaacagaggtggaagcaagatttgtgcgttcttggatgggcaacagagagcagcagagccctagcgagcgcacgacagttcacgtctcgcctcctcgatttctttctttacttcgtcgctcgcttcccttccaaggggagatttctctggttcccctctctggcatcaattagggcgggagctgaggcacggggcgagcgacgtgttgagagaggcgtgaccccgtgcaaggcggtggcggtcaccggcgaggccaccaccacgagatatgtcgctgcccccaaagcggatctggcgagctcgataaggcgacggctatggcagcggatgaggaagaggaggtggcgcctaacctcgtttttgtcaccattcagctgccgccgagctcgtcgtcgtccccgctcaaaaccacgcaacagcttgacggagagggagaggagcttatcggtgtccagccaaaggaggaagaccgccggttggaggaggaggaggggggaggggtcgccgccgatctcgccgtctcccgcggtccaagccgtcaagcttgtcggtgcaccggccaggagagtagggccgtcggtcgggggagaaaacaaggggagcgccgcccggaaggagaggggatctgccgccggtagggagactgacggagatggg

SEQ ID NO: 36978 - DNA, 633 bp, Oryza sativa
  Clone ID: PAT_MRT4530_40750C.1
tttttttttttttttttttggttcgacatgatttttcgatttatttgtaccccgtgatagcacaggaaatcaagcatacaagatgccaattacaacgagtgctacactgaagacttccaagctccaacagctagcataacaatggcagacttgagaagttaagatgcaggtagttaaaactccggacagctaatttgccggctgagcggctcacaatatgccggagagcacgttggcggccgtggacagcgcggcgccggcgatggcgcactgcaccacccgctcgtgcgacgcgcggtccgaggtgagcgcgacggccgcgccggtgagggcgcccgccaccacgctgttcttccagtcgtgcgtcccgcgcgcctccgtcaggccgtaggtcagccccgagtgcaacccggccgcgagcccccactggagagactctttgctcacgcttttcaccatagcctcagctgacttgctgctgttccctccgttgagatccgggaacgatcgcttcctggcgccggtggagtcggacacggctcccgtgcccccaccctccccttccatggccatgaagttagactcccggcgaacgcctggactgcgccgatgccggcggccttgaaaaagctc

SEQ ID NO: 36979 - DNA, 157 bp, Oryza sativa
  Clone ID: PAT_MRT4530_40751C.1
gcgcgtcgtgccactcgcgcctcaatgaccatgcctgcaagaggtccccacaggattgatgtgatgtgcctaccgtgttagctgctaagggactgagtggacgggctgacactagaaaggtttgatgcaaaattgtgtgcagtggctgaggaacgga

SEQ ID NO: 36980 - DNA, 180 bp, Oryza sativa
  Clone ID: PAT_MRT4530_40752C.1
atgagtacaggagtacttagcaagccatgggaatttaatgagtgcttctcaaacgacatggatgagacagtgcgtcacgcccggtcggaagggggtacactttacccacacgacattactaacccggaccatccagcccgtgcagaacggccacatatagagaccttaaggctttcatga

SEQ ID NO: 36981 - DNA, 3408 bp, Oryza sativa
  Clone ID: PAT_MRT4530_40753C.1
ttagtagctacccatcctgtgcattgccgttgaagacttggagtcctgcgattgttgtgagtactctttggttagcttagagaatgtagagtcctctctctggagcagtttggtgggggtgtcgtattctaaaatactaccttcaccaagaacaagaataaggtcactatcaataacagtgttcatcctatgggcaattgcaagcactgtgcaatctttgaattcttgacgaattatctcttgaataatccggtctgtagcagagtcaactgaagcagttgcctcatcaaggactagtatcttgctcttcctcaggagaattctgcctaaacaaaatagttgtcgctgtcccatgctccagttgtccccattttcaattactatttcatccaactttttctcagtcgagcgcaccacattggcaagctgacacttgtctactacctcccatatcctactatctgggtactcgttcatgggatcaagatttcctctgattgtaccatcgaacatcaccggatctgttttctcagctggaatcacacaagttatgttttttaatactgaagggagatgttctgcatatctgacctctaagttgcttatgcttatcatgccaaactctggccatgccattggtggcttgctaccctcggttatggttggggcttcacttggaagctttgtgtactgtaatattctttcaactgatatcatgtttgcttctgcacgacttatattccgggtggcttctgataattgtgtattcaaattccatgcatacatcactaccagcccaccaatgcttggattaacaaaaccttgtggaagacgcacaagcaaaaccaacgagaacccaaagacaaagttgcataacaaattcattctgaaagagagccattctactgcagccatcaagtgaaaccatggtcttgaatgattgtcaagtagactcagatttgatctgtagaaccggtcttcttggcgaaatgctcgaattattgcagctccatagaaagtttccccaaaatgatgaagaattggagccttttgaattcctgataggcgagctaattctgttgctgttagactgtaatatctctgatacctgatgcaaatcaatattgatggaataaaaataatgagaactggccaggaaacatatgatatgattagtattgttcctagaaactgcatcactgaaaatgtgctctcacttaatgttgacgctgtctccaaatctagcacactttgatcaatcgaagccatgaactgggtggattccatttttgatttgcttccagttcgtggatggcaagctgatgccatccaatagttgcttcccacttcaaatatcttttctgattctgcatgatgctttgacaaatatatgcttgtgccttttgcgttacaaacttgttcgacggcacaaaagtgagccccaaagataactccaaaagccatgttctgttggagttcttgaaatttccctgcttgtgctatccttccattttgcatcaccataataaggtctgcatcaactagaaattcaacttggtgcgtgacgtataacacagttttatcccttaggacccccatcaggcatttcttgtatagatgcctcccagtttgagggtctacagcactgaaaggatcatcaaacaggtagacatcagcatccttgtaaactgctcttgctatttgaatccgttgcttttgtcccccactcatagtcgttccccgttctcctatatctgtcatatcaccatccgagaaaactccgatgtctttaaccaaggcacatgcttcaattgtccgctcatacctatcagtttcaaatgggctcccaaagagaatgttttctctaatagtcccagaaagtatccatgacgactgtggaacatatgctttggttccaaagaccttaaccgttccttgcacttttggcatctctccaagtacacatgacaacaggctagattttccactcccaacagctccacatactgccactttcatccctttgtgtatctttacatgtatatcttgaagtgttgggatttttgcatcagttttccaactgaatgctccctgatcaatctctgcagaaaattcattttcgtctattgctacttcctcaattgcatcagatcttatttcttcttcttggagatatgacactattctgtcagctgagatcttcccctgtgcaaaggcagtaagcaattctggtagactaaagataggctccttcagtatattcacagttgctagtgtggacaacactcttccagctgttagagggattcccatcagaatgcatgaagcaaatgtcatgattgatatgacagcgggtgctccccagaacataaatgctagtagtgcttttagtcttagaaattcccacaaccacaaatgttctcctttcctcaaatattccaatttcctaaggtattggatatcccaagcttgaagttttaagatcttcatgcttcttataacttcagatgtcatgtccattctgtcatcttttgctttcataattcctgcgtgcaatcttttctggattcttgtaaaaggaatattgcaaagcattattatggctgttgttgctattccagctaaagaacccagaccaagatttttccaaagaatataagttgctagtgtaatctgtataggcatcatgaagaccatgttcacataccatgcaacattaacaatcctctcgatgtcaacactcacatagttaattatctcccctgaggtatgtttctgccttgactggcttgataaataaaggaccttttggtatacctgagatatcagagatgttcttaggcgcaaataaacctgtagacttccaaagaaccattgtctgtaagcaagagtttcaatagccttcgcacctacaaatacaagaacaagagagtagcctctttcaaatccattatctccacttagatagcccacgaagtccttgattaagtatgcccccacaaaggaggcgactacacttaggactccaaaggttgcattgagtgccgccttcttccaaatgagaaggaaggctgctttacaaatcgatgaaactgtcagaggaaaattccctttcacaatgatattactgaatattctggagatgtgttgggcactttcctcctcaccaacatctggtatgtcatcctcattcaaaggcttattggcacctttagcaagaagaccattcatccaagagaaagtgaaatgttgtgaaatagttgcctctccataagaagatttcctcctgtttttcacattttcttcttttgaagcatctggaaatggttcttgtgtgccgcaggtgaattggatcctgttcacctgtctggctatctgggatttttcaaggtgtacacctacggtcat

SEQ ID NO: 36982 - DNA, 207 bp, Oryza sativa
  Clone ID: PAT_MRT4530_40754C.1
atggcatcaaggtaggctcgaacagatcgattttttgtacaaacaatttccaatggaggaaaccatacacccagaaggggatccaatggggtccaaacaacagaaaggccctacgagatgtggatcaaccggcacttaccctgtaatcacgtgccacagtggaatgaaagtcctctaggggctttcttctttttgggaatcagaact

SEQ ID NO: 36983 - DNA, 248 bp, Oryza sativa
  Clone ID: PAT_MRT4530_40755C.1
cataaacaaagtgggttaacacacaccacaagttactaacactccaacatttaatcaacctcataaataataaacatatacttaccaaactttttgtggtacaactcaacctatcatacaacgaaaagactaactcactccacatacttcatagcaatccaacaaaccaaataccattcctgacatacaaacaccttaaccttcaacccaatccgccaaaaacaatacaccataaacatccctccctg

SEQ ID NO: 36984 - DNA, 234 bp, Oryza sativa
  Clone ID: PAT_MRT4530_40756C.1
atgggctgtaatgatacaaggcccaagcccaagtttctgatgaaggtccatgtgcctcctcgctcttcaaaccatgaccacggtaaagcggaaacacccgtgaacctaggtagtggactagaactgctcgggcatgacaacgtggcgtgtttgtgggtccataggaacccctcgatcgtccgggaagggctatcatggcattctcgcaggcctagaaacaaggacgcggcctaa

SEQ ID NO: 36985 - DNA, 606 bp, Oryza sativa
  Clone ID: PAT_MRT4530_40757C.1
atggggaagaagagcaagaacggcggcggaggaggaggcgagaagaaggcgacgacgacggaggtggtgctgacggtggccatgcactgcaaatgcaatggctgcaaggacaagatccgtaatggcgtcaaggaactcgccctcgtcccaggggtggaggcggtggacaagtcggcggtggaaagcaaaggggaggtgaggctggtggtggcggccgcgacggcgaagcccgagaagctcaaggaccgcctccacagggtcaccggcaagaaagtcgacctcctcgtcatcgcgccgcccaagcctgccgccgccgccgacgacgacgacaaggccgccgccgccgaagcggttgccgcgctgatcaggcaggcgcaggcgcaggcgggcgtccacgtcgtcccgggcgcgtgggcgggcggcggcgcggtggcgtacccggcgtggggaatgcagcagccggagggcgggtactactactcgccgtcgacttaccctgcaggcggcttggtctacccctacgcggcggcgtatccacctcccggtcagcagctgctcggcaatggcggcggcgtggtgtcgccatggtacactcatggctactag

SEQ ID NO: 36986 - DNA, 567 bp, Oryza sativa
  Clone ID: PAT_MRT4530_40758C.1
atgtctccactctactgctgtctcgtcgccgtcctgtgcctcccgcgggcctccgcatcgccggtggcggcggcatccatctccgtctccgccgtgcagacccccgtcgagccgacgccggtgcagttcctgcgggtgcacaacgaggcacgcgcggcggtgggcgtgccgccgctgtcgtggaacgggacgctgcagctggatgcggcgcggtacgccggcgagctccggacggaatgcagcctgcggccgccgccgcccaccgcggcgcggggcaccggcgacggcgccgccgtctacggccggaacctgttcaaggcgtacggccggcgccacaccggcgcggaggtggcggcgttctgggcggacggccggcggtggtacgaccgcgacgccggccggtgcgcggcgccgcccggccggacctgcggcgcgtacacgcaggtggtgtggcgcgccacgacgcagctcggctgcgcgcgccgcacctgccgcaacggcgtcgacaccgtcgccgtctgcgactactacccgccgggcaacatcgtcggccagcggccatattga

SEQ ID NO: 36987 - DNA, 863 bp, Oryza sativa
  Clone ID: PAT_MRT4530_40759C.1
gcacgccggacgctccgccccaaaaggccagacaacgcccgttgcgccgcctcccaaactccgcctcctcctcctccgctgcacccccgcaaaaaccctagcgcaccgacttcgcgatctccgcgccgcagccatgaagggcaaggccgacgcctccaagaagggcgagggcaggctcaaggccgccggcggcgccgggaagcggaagaaggccgccgctagcggcaagccgaagcgcccgccgtctgctttcttcgtcttcatgtctgagttcaggcaggagtaccaggcagcgcatcctgacaacaagagtgtcgccgccgtgagcaaggctgcaggggagaagtggcgagctatgtctgagcaagagaaggcaccttatgtggacaaggctggccaaaagaagcaggactacgagaagaccaaggccaacttcgataagaaggagagcacaagctcaaagaaagctaagacccatgatgatggagaaggctctgacaagtccaagtctgaggtcgacgatgaccaggatggtggtagcgatgaggaaaatgaggacgatgaagagtaaatagtgtatccgggggcatgaggtagcaaactgtgtcttaggtcccctattagctttactagtttgctatcttcgaccctaagatgttgggaataggcgtgcgtgggtgtgaagggggaccgtttagaattatggtactcagaatgttttcctacagtggattagcaaagaaaaagcctgaatgccgcctgctgttctgttgcttttcttttgctaaccacttgtcacagaactttgtttcatttgctaatctagtagcaattcagttagctttcttttcgttaatttcgtt

SEQ ID NO: 36988 - DNA, 811 bp, Oryza sativa
  Clone ID: PAT_MRT4530_4075C.1
ccgctctagtagtagaggatccccccgtcgctctcgctctccgccgtcgccgccgagctccgggccgccgtcgtcgtcgcccttgaccacctcccacctcggcgccgcctcggtcggcttcgccgcatcctcgccgacctcgtccacccctccgtttcgctcgtcgaccgccggagcgccgccgtccccgtcgacccgaaccgcgccgccgccttcctccgctccggccgccttttcgtcgtcgccgtcgacctagggtgagccgtggaccgccgcctcatttccccctttccctcccttctctcggccgccgctccgccatgcctatggccgccgccggcgaccataggggcgcggacgcgccgcctcccgctggccgtgccgccgtggccgccttcgggcgcaccgagctgctgccgcgtggggcccggccgtcagccgctcgcgccctcgggtgcggctgacgcgtggggcccacggcgccggccggtgtgagcccgggtgcacccggtccaccgtggacccacctcggccatataaggaccggtcttcgggcctctgttgcaaagcgctaccgtacttccacatgtctagtgggacaaatgaaggctacacgagctacggcctggtagccaagatgtcatggcacagggccggtgtcctgctgctaggggctcagtcctgcctacctgtcccgggggttccggccgtaggtggggttgggtcgatgtacacctctgatcagagtataatctattcgaatagccgcgccctcggttatgggcaagccgagcaatgtacccaagttagt

SEQ ID NO: 36989 - DNA, 208 bp, Oryza sativa
  Clone ID: PAT_MRT4530_40760C.1
agatctaaaagggcctttcccaccccaaaagctagccattgaggtgaggggctcccccatttatatcttaggtctttcgcccttccacaaccaatgtaagactattcaacaatctcccccttcacacattggtgtccctcagcccttcaccgccccttcatcatatccgggccccactggcccacggtccatcaggtatacgagcccc

SEQ ID NO: 36990 - DNA, 256 bp, Oryza sativa
  Clone ID: PAT_MRT4530_40761C.1
tgtgtacgccaagaagcgaagtaagcggggcagggctttttggacatcgagccggggccacacccaactaaggtggtgggaacgctctccatggacatggaggagctgctgagatggggcacgaacgcggacaagatgtggaagagtgatctccacaaggagacaaaaatgttgacgcagatcgtagagaacttcgtcaagagcacaggacgaaactctgggtctgaaacaaggggcggccaccaacaaggacaag

SEQ ID NO: 36991 - DNA, 1392 bp, Oryza sativa
  Clone ID: PAT_MRT4530_40762C.1
gcactactgcaccaagctagtctcaagtgttcaattagctagctctcttttgcttagccatgagtgcagcaatggctgcctttgccttcctactagtcatcgccatcgtcttccccctcgcatccgcattcccttcccctcctgtttcatggggccaacagcagctagaccctcacttctacgaccactcgtgcccacaagcacagcaaatcgtggcatctatcgtcgggaaagcgcattaccaggacccccgcatggccgcatccctcctccgtctccacttccacgactgctttgtcaagggctgcgacgcgtcgatcctactagacagcagtgcgacgatcatgagcgagaagcggtcgaaccctaaccgggactctgcgagggggttcgaggtgatcgacgaaatcaaggcggcgttggaggccgcttgcccacacaccgtctcttgcgctgacatccttgccctcgccgcgcgtgactccaccgtcatgacgggaggccccgggtggatagtgccgctggggaggagggactcgcgtggggcgagcgtgcagggctccaacaacgacatcccggctcccaacaacaccctccccaccatcatcaccaagttcaagctccagggcctcgacatcgtcgacctcgtcgccctcctcggtagccacaccatcggcgactcccggtgcacgagcttccggcagcggctgtacaaccagacggggaacggcctgccggacttcacgctggacgcgtcgtacgcggcggcgctgcggccgcggtgcccgcgctccggcggcgaccagaacctcttcttcctcgaccccgtcacccccttcaggttcgacaaccagtactacaagaacctgctcgcccaccgcggcctcctcagctccgacgaggtgctcctcaccggcggcaacccggccacggcggagctcgtcgagctctacgccgccgatcaggacatcttcttcgcccacttcgcgcggtccatggtcaagatgggcaacatctcgccgctcaccggcggcaacggcgaggtcaggaccaactgcaggagggtcaaccacaactactgatagatcgatcgatacccatcatcgtctatcattcgtcgtcgatctgctgcttttggttaataattaatttggtctagatggttcatcttttggtcggttatattattattagttgtcgattaagtaaaacactgttttgtcgatcgagatgtgagatttgttggttgtgtttaattgtgttattttgtttcttgaattgtttgttagcctcttagaggaaatttgatacgcttggtgtatcatgcatgctgttattagttggttcttgttaataaaatgagtcatgtttgtggctgttctccaacagaag

SEQ ID NO: 36992 - DNA, 910 bp, Oryza sativa
  Clone ID: PAT_MRT4530_40763C.1
gctaatccaaatcctcctctttttcttgttttttttttctttcttcgtcttctccaacgcccaaagtaaaacaaaggaaaaaagaaaagccgcatccaagaacgcaccagaaatttcggcgacggttgcgcgcgaatccatccatccaccggcggtcggagggcggcggcggcggagcaattccgcccaaccaagcggcggagtcggtgcgggcgaaatttccgggttggtgcgcggggcttgggttggtggtggtggactggtggtggtgtgtgttcttgggagtggatctggcaggaggctggcgatggggaggcgggagtagggggagcggcggattggagtgggaggcgcggtgttgggggctcccatgggcggatgcttctcgctggaggagcaccggctccagggcaagacagaagctggtgggccagatgggttaaggaaatgcaaatctgattctaaagctacagcaagtgtccttgcccctccaaaagatgtggaggacctgcaaatcgaaggatacggaaatgttaatattttcacatataatgaactaagagcagccacaaaaaacttccggcctgaccaaattcttggagagggtgggtttggtgttgtttacaaaggtgtaattgatgaaaatgttagagcgggctttccatccacacaagttgctgtgaaagaattaaacccagagggatttcagggtgacaaggaatggttggcagaagtcaactaccttgggcaacttagccatccaaatctagtcgaactgattgggtattgctgtgaaggctctcatagactgcttgtttacgagtacatggcttgcggcagccttgaaaagcatctttttcgccgtaagctgaccctttccttcttgacagttatcactcccacctactga

SEQ ID NO: 36993 - DNA, 483 bp, Oryza sativa
  unsure (1)..(483): unsure at all n locations
  Clone ID: PAT_MRT4530_40764C.1
agagagagagagaaataataatttagacaaaatttcatgctcaactactgtactagctagctagtggantattatattatacctcttgtgtnttaattaaacattantgtttctgttccgtggaccatatatggtagtgatggattttgggggtttcagtttgttttcttccaatagccttcggaaaaccatatccgaacactttcatggtagatgacctgantaaaatatatgttctttcttttgccgaattaccctcaattataagtttggaacacatttttttctcccaacaatagcctttggaagacagtatatttccacttgatgttcatgactagaaaatttaaagtgcatgcatganatgagangcctttgattgttcagtcatattatttcatttcgcaactgatgagacgatatgatattgacacatgatatgtnattatatatagagctatatctaatagaaaattcattctt

SEQ ID NO: 36994 - DNA, 1215 bp, Oryza sativa
  Clone ID: PAT_MRT4530_40765C.1
atggcgtgcatggatgatgttcctctatgcatcctgcagtgcatcatgatgttcctgctgccggatgtgggagacgtggtgcgcgcgtcagcagtgtcgaggaggttgcgtgaggcgtggatggggatggaggcctacgagctggatgcatccaccatccctgatcatcacctcctcgacctcgactccacctttgccgccatcgtcgaccgcgtcgtcttcaaccactccggccccggcatcaagtccatgtcgctggcgcacacgcgctacgacaccgacggcgaccggagggtgacggcctggctggaccgcctggcgtcccgcgagcaccaccgcctggagaggctcgacgtcaacattggcgccgccctgcacacgccggcgtcgctgttccggtgcgagacgctggtggagctgcggctggtggtgcacgccgccgctcgtgggttgcggctggacgtggacggcgccgtccatctcccgcagctgaggcggttgtgcctggagcacgcggggttccgcagctcgacccaattccagaacctcatcgacgggtgcccgttgctggagttgctgcacctgaggttcacggcggtggcgcggagggaggacacggtgggcatcgagatccgcagcccgtcggtccggcgggtggtgttggaagggtgcggcgggtacggcatggtgccgttcgaggtgtcggcgcccaacgtggaggagttggtgttgtccgggcggaacatggtcgccgtcgagaagggcggcgtgaggaggctgtcggcgcggaaggtgagcctgctcatggacgacaagctgtggtggtacaacgtctttgcacccttccaccacttcacggccttcctcaacgtcgggaccaacatgagtcgcatcatggctggcttccatggcgtcctcgagctcgccatctccggctggtgcatcgagttggagcatcccagggagatctcgatcgatgagaatcgggagcagtatcctgcaacgccggagttcctgttcgacgccgtgcccggccggctgacccatctgaggcgcttcttcatgttcaacttcagcggcaaccgcaacgagatcagcatcatcaagttcgtcttaggaagctcatccatttccatcaacccggaccagttcggtgtcactgattacctcggcaacgactggagttccacccagcttatcctagcctcgctctag

SEQ ID NO: 36995 - DNA, 273 bp, Oryza sativa
  Clone ID: PAT_MRT4530_40766C.1
atgccaccggatgaggacatttccgttgcgaaaccggcgacccaagaaggcctttccagctctcccctagtctgccaagctgagttcggcctacggctctatgatatacttggatgtggagggatacaaaggacggacaaggctgttaccacctgccgcctacctcactttccgtggggatcacatcaaacgaagaatcctagtactagagcacttaataattcaactaagcgacgaacccgcaatgatgggaatatgtctcactcaatcaaa

SEQ ID NO: 36996 - DNA, 203 bp, Oryza sativa
  Clone ID: PAT_MRT4530_40767C.1
aaaaaaaagaaaaaaaattttttttttttttttttcacccaaagtttcaaatggcaaatatgaagattttggggctttttttaaacttccaaaccccttttttgggaaaatttaggacaataaaccgccaaggggggtaatgtttctggggccccttttaaccctaggggggataccatttttaaaggggaagttcaaagcca

SEQ ID NO: 36997 - DNA, 333 bp, Oryza sativa
  Clone ID: PAT_MRT4530_40768C.1
atggacggatccaatccaaggccacctaatttgttggcaaagcaatttggagaggggaggagaaagaagaggaaagggaatcagggcgagtggaacgggtgggtggtgaggcagtggcggtgccccgctaaagcagtagagttggtagtgaacaatgtgacgggtcaccttatccttgtcagcttgaggaggggaaaggcagcagggagggatgaaaggggaggtacatcgggcctcagtggtgcctgttggcgccttccgatgctggcgcagtggagcggctacgtgctggtggttactgatggtcatggccagaccgtcagggaactgtag

SEQ ID NO: 36998 - DNA, 313 bp, Oryza sativa
  Clone ID: PAT_MRT4530_40769C.1
cttaatgttgctgctgctaatcgcaactactgccgtggaccatggccggtgagactggggtcctaaagggcggtatgacatgccaagggagtgctagagccggacggggaggtctcacaaaaatggaaggtgaggagacctttgacatacacatggaacatgcataaggtgacagtaaagggcactgataagcccgaagacgttattgagacggactccacgacagggaagatgaccttctattgtgaggctgcaaaagccgattctgattctgcagctgcagatgcttctgcttgtgcttccgcaacagaag

SEQ ID NO: 36999 - DNA, 966 bp, Oryza sativa
  Clone ID: PAT_MRT4530_4076C.1
atggcgcccccaatcgccgggaacggacgcgccaagtccggccgccttcctttgccgccggccggcttttccgtcgccgttccgacctcccccgtggccggctccctcttctctcatataaaatgggatccccgcactccgttctaccgttttaaccccatcccgagcctccccgtggtctctagccccatccccgccgtcgccctcctccttccttcgcgccggccacctccagccgccttcctctcctcgcccgagcgccgcccggccgcgccgtcttctccctcggcctcgcagctgccctctctccctcggtcagccctccgtttcgcggggaaagcaccggagacgcgttctcgccggcgtccagtggcgtcgccaccacttctccgcctccggccgcctctgccacgtccccggagcgccggccgacgtcgccaccaccttcctcggctccacgacgccgctctcatccccggcatcacctcctcctcgcccgaactccgccggaacaccgtcgcccgcgccggcctcaccttcctcctcgtcgacatctcctccggctgcccctttcgccatgcccgtgcatcagccggcgctgccgtcccctccctcggcatggtgacccgcgacgtcgtcctcggcctcgcctcccctccgactgaacaccgccgcgtgttccacgccatcctcgccgccgtacagccgctgccggctgccctcgtagcctcctcgccggccccggtcgtcgtcgtcgtcgtcctctcgtcgttcccggtcgctgcagcccccgtcatcgtcttcgtcctcgcctccgcgtcgtcaagcatcgtgccggccgcgtctcgccttcgtccaaggatcgccgccgaagccgtcccctcgccgttcgtctccgttgtgcccgtctgtctccgccgcgcccgttcgtcgttgtcgttcccgcgcctcgtcgcgtggtggtaa

SEQ ID NO: 37000 - DNA, 1437 bp, Oryza sativa
  Clone ID: PAT_MRT4530_40770C.1
atgccgtggtcgtgcggctggtgcgggaggtggaggaggagcagcggcggaagaggaggaggcgctgatcgtgaggccaacggcggtggcggcggcggcggcggcggggcggcgtcggggagggaggaggagcagtggagcctcttcatcgagctgcccgtgctggaggccgccacccgtggcttctccgacgacaacctcctcggccgcggcggattcggccccgtctacaaggcttgtttcttactgccatctcatcgtcccctttcgccatggctttgctttgctgctaggctgttgccctgttttgcttgtggaattcacctaacattaacaaagactggaattttacatcttgggaagaatgaactactaactgacaaaaaatcggttgatcttgttaccatctctcttcagggggtgctcgagaatgggcaggagatcgccgtcaagaagctgtcgctggagtcacggcaaggtgtgagagagttcttgaacgaggtgaggctgctgctcaaggtgcagcacaggaacctggtctccctgctcggatgctgcgcttcctccggtcacaagatgcttgtctacccttacttcccaaatggcagcctcgaccacttcctcttcgacagaaagaagagcgtgcagctggattggcccaaacgctaccaaataatcgtcggcctagcgagaggcctcctctacctccacgaggaatcccccgtcaagatcatccaccgagacatcaaggcaagcaacgtgctcctcgacgaacagctgaacccaaagatttcagatttcggcatggcaaggctcttcctcgaggacgccacgcacgtcaacaccttccggatttccggcacatatggttacatggctccagagtacgcgatgaacggctacctgtctacgaaaaccgacgttttcagcttcgggatgctggtgctggagatcgtcagcgggaggaaaaacatcgataaacatctcgacgccgaaaaaaccgacctcctgaattacacatggaagctgtcagaggaagggaggcagatggagatcgtggacccggcgatggcggagtgggacgccgacgaggcgcggctgtgcgtgcagctcgggctgctgtgctgccaggccgtggtgtcggaccggccggacatgtacaccgtccacctcatgctgtccagcgactccttcacgctgcccaagcccggcaagccggcgatccacggccgggtcggccggtggatgagcaccaccaccacggcgtcctccgccgcctccaccgccaacacggccaccacgctcggcaccgacacgatgacgacgagggcgtcggcgtcggcggcggcgctgggcggcattgccgaggacgactccaggaactccatctcgatctccttcaccactgaaggccggagtacagttgctgtgaattaa

SEQ ID NO: 37001 - DNA, 234 bp, Oryza sativa
  Clone ID: PAT_MRT4530_40771C.1
gcccacggcatccagcgatgacgctggggagctcttgcgccggatcgagcggcttgaacgtggtgaacttgacgttgctagaagagcttgaacctattgaatgggtcattcaaaagacatctacatgctatctaatgactgatgcataatacagtctacatactatcttggactgacgccatatttactacacatagttgtgtctcatgcagggactatctaccaaatgcagct

SEQ ID NO: 37002 - DNA, 491 bp, Oryza sativa
  Clone ID: PAT_MRT4530_40772C.1
tttgagggcgtcaacatctccatggttgttcatcaacccagctacactctgtacaggatgttcgacgacctgatacttctagccaagggagggatgacggtgtaccatgggcctgtgaagaaggtggaggagtacttcacggggctgggcatcaccgtgccggagcgagtgaatccgccggactactacatcgacatcctggagggcatcgtcaagcccaccatgagcgccggcgtcagcgtcaaggacctgccgctcaggtggatgctgcacaatggctacgacgtcccccgggacatgctgcagagctcctccgactctgagtcctccttccgagggagcacgagcccggcctccggcgatgcctccgtcgcggccgaggtatggggcaacgtcaaggacatcgtcggccagaagaggacgagtatgactacaacagagcactgaagatttgtcgaaccgctgcactcctggcattcttaggcagaaca

SEQ ID NO: 37003 - DNA, 2344 bp, Oryza sativa
  Clone ID: PAT_MRT4530_40773C.1
gcacgaggctccgttcttccttccaccccaactcgccatggcgctcgccgccgcctccgtctcagttctccatctcccggccatctccctcccgctcccttgccttcagggctcaaaccctagccgtcccagcctcggcttgaccaatgccctcccgtggcgccgacgcggtgggcgcggggcgggggcggtggcgggggcggtgcgctgcgcgaagcgcacgggcaagcggcggtacccgtcggagaagaagcggctggataggcgacacaaggagctgctccggaaggccgcgccagaggagggctcggcggggcgggaggcgggttactggcggctctccaagctcgccgtccctgcccgcgacgaccccggcaaggacttcgctggtgtctccccgccgctcctccaagccatcgccaaagcactgaaattcccggtttcttctatgctccctgaagaggccttcaccgttattcgcaagtcgtttgatgcacggaagattttgaaagaacctcaatttgtttataccgttgatgtggctgttaagagacttctggatttggagccgagaacgtgggattttattgctagattggaaccaaagcttggaacaatagaatacatgcctgatgagaaagtagcatctgatctggtcagtatgcttaatgtttataagcaaggttctgatggtgaactgggaatcaatgatactgtcaataatggctctatctgtagtccgcgaaagaaaccaagggtggcagttgtaggaagtgggccatcaggcttgtttgcctcccttgttctaggtgaacttggtgcagaagttaccttaatagagcgtggtcaacctgttgaacaaagggggcgtgatattggtgccttagtagttagacgaattctccattcagaaagcaacttttgctttggagagggtggtgcaggtacatggagtgatgggaaacttgtgaccaggataggaagaaacactgatggtgttcaggctgaacctcttagaaattgttttggttacttattgattcaagcattagcatctagtgctatctgggatcaagatcctaaggttatgaaaacatttgttcaatttggaggtcctccaaatatactagttgatgggaaacctcacttgggtacagataaacttgttcctctgctgcggaacttcaggcatcacttaaaagagttgggtgttaacataatatttaatactagagtagatgatcttgtagtggaaggtgggcaagtaaaaggagttgtcgtgtctgactcaagactgcagctaggttctcccaaccagacactatcatttgatgcagttgtattggcagttggtcactcagctcgtgacacatacagtatgcttctgaggcataatgtagatatgcacccaaagagttttgctgttggcttaagaatcgagcacccccaagaactgataaacgacattcaaggccagggcttgtatccaaaagtgatctatgacatagacaccataaaaattaccatttactgtgtgtactctgaattggctgctgaagtacataaagggcgtgggcggatacctgtagcagattacaagatagtgaaatcttttggtgaaggagatgcagagctaccagaacaaaatcgcagttgttactcattttgcatgtgtcctggtggacaggttgttctaactagcacaaacccatcagaattgtgcatcaatggtatgtcattctcaaggcgtgcatccaagtgggcaaactcagcttttgtggccactgtgtcatctcatgactttaggccatttgaatcccatggttctcttgcaggcgttgaattccagagagaatttgaaagaagagcagctaccatggggggagggaatttcgttgttcctgcacagtgtgtcacagattttctcagtaacagattgtcagttacaactctcccaccatcaagctataggctgggagttcggccatccaaactccatgagctattcccttcgcacataactgaagttctacaacaatcaataataatgattgaggaagagatgccaggatttgtatctagtgaggcattacttcatggtgtcgagacaagaacaagctccccattgcaaatttcacgaaataccggtacatatgagagcacatcactgcaagggctgtatcctattggggaaggtgctggctatgcagggggtatattaagtgcttctgtggatggtatgtattgtggttttgctttagccaaacagctttctctattccatggcgatatagagtcaactcttggcaaagcacaaaaccaaaaaggcttcgtaaaatattga

SEQ ID NO: 37004 - DNA, 281 bp, Oryza sativa
  Clone ID: PAT_MRT4530_40774C.1
gaccgaccttgacggtcgccgtgcggcggccggtggacacgacgtggaggtctggtgcacggtacggccacgcccccgcgccaccgcccttcggctactcgccaaccctcgccggccactgggcacgcgtgcgtcctcccctctcctctggttctcttggcactgcaacacactcgacggactccgactacttcctttactttttactacttgttctcttacacacacacgtcaccacacacacacacacctttacacacacaactttacggctacacgac

SEQ ID NO: 37005 - DNA, 515 bp, Oryza sativa
  Clone ID: PAT_MRT4530_40775C.1
cccacgcgtccgcttgattcatacgaagttggcgagctatgttatgctgctgagcagatttttatgcaggagccaactgttttacaattaaaagcaccaattaaagtatttggtgatcttcatgggcagtttggggacctaatgcgcctttttgatgaatatggttatccatcaactgctggtgatataacgtatattgattatctcttcttgggagactatgttgaccgaggtcagcacagcttggaaacaataacattgcttcttgctcttaaaatagagtaccctgaaaacgtccacttgattaggggaaatcacgaggctgctgacatcaatgcactttttgggttccgccttgaatgcatagagagaatgggtgaaagtgatggcatatgggcttggacaagattcaatcaactgtttaattatctcccacttgctgccatgatagaaaagaaaataatttgcatgcatggtggcattggaaggtcaataaacactatctgagcaaatcg

SEQ ID NO: 37006 - DNA, 468 bp, Oryza sativa
  Clone ID: PAT_MRT4530_40776C.1
atggtgctaccaagtataactctaaaaataccagctatgagatgcagagcaattatcagttcccctcctcctatgacacttgaagaattcaagaagtggttcatgaagttcaacaccaacaatgatggtcgcataagtggagtggagctccgtgaggccatccgcagcaaaggttttgggtttagcgcctggtggaagagtattgtggctcttcatcaggctgataaggatagaaatggctacatagatgaattcgagattgagaatcttgttacctttgcccagaaagtgctgggcatcaaaattactacctggcagcagcatttggataatgtgcaaaaagcagtaaaaggtgtacttgcagttaccagtgtttctgtgctggcagttcattttgataattataatgaacagaagttgaaactaaatcccttcatgttttctgctgctcttttcttttccatttga

SEQ ID NO: 37007 - DNA, 1176 bp, Oryza sativa
  Clone ID: PAT_MRT4530_40777C.1
atggacgctgattccggtgattttggaagtggtaataagctaccagatgatctgaccttggatgtcctctctcgtcttccatacaagtcgttctgccgggctaaatgtacctgcacagggtggctttctttctcctctaatccacattactgcgacaagcttcccaaaccccttactggttttctctaccaaaaaagtgatagctctgccattgaggttgctagcctctgcccagatgatagatcatttgatacttctcttagtttcttgccacgttatgagtggctagaactaacggattcttgcaatggactggttctatgcaaatatgggcgcaatacttcttctccatccgttgcgaactttgtggtgtgcaacccagcaacacgtcagtggatggagttacctgaaactcttctggaaccagaaggtcacagttatgcaaccaaattagctttcgatccatcatggtccccgtacttctatgtcttcaactttgaagagaaacgtaacccagtggaaagatgggcttgtatatctaaagttgcgatattttcatcaagaaattccacgtggtttatggatgataagtgggaaccttcgaatcagattagtgtcgattgtcagccacacgtccttcttggtggaaagctgtttcttcagacatcaagttgtcgagtcttggtaatcgatgcatttcacaatacagagcagccatctcattggatatttgatctaccagggtataagcccacctcccccatggttgattgtctcactgggtatcttggacataaatcaggggtgctacactatgtgcagcccgacaccggtggtcgcacgcttctagtctgggctcgagatggctatcctcacggtgactggaatttgaagcaccgtctcagcatgagcgatgcatttgggcaggatatctttcttgatgagcattttgatggattcttgtcttgtcattacgacattcaatctcttgacttggagagagggcttgttttcctttgtcatttcgcagcagaaagactcctgtcctatagcttgagcacagggaagctgacgaaaatccgagatggtctcaggcgatacctgtactatgtgccgaactgctcaatgttcccagccaaagaaaccgagaaagatcaagatgtatcagagccataa

SEQ ID NO: 37008 - DNA, 243 bp, Oryza sativa
  Clone ID: PAT_MRT4530_40778C.1
acacattggtgagaaggccacaaacagtatccctcttctcagatgtcagggctggaaaaaggcggtggtgtacatttcataaggaacctcgctggggcactgatcctgaaaatggtaaaaatcaaagatcgctccagatatgtaacggttggtgcgataacgcctttgatctgataaatgcaactgaggatgaagcaattcttctgcgagatatatatgaccgaccacctacttttaactggg

SEQ ID NO: 37009 - DNA, 630 bp, Oryza sativa
  unsure (1)..(630): unsure at all n locations
  Clone ID: PAT_MRT4530_40779C.1
aacaaaggagcggatgacatacccagaatatgttatttggagttacatactctgagcactgttgtaaatggtttctgaaaatgacaaatgagcataattgcatctccgtctcccaattccaatccattttcacgttgctcacatgttatgtcatgaagagagaaagaaagagaggaaaaaggcatatgtttggtgggaggagcaaatcggagcttcaattattgtgctttgttttggccagggtactactttacaacaagctcatgtatctggctgcaaggagaaggagaaggtaggctccagccatggcttcccagctctccgccgccacatccgtgccgcagttccatggcctccggacctactcctctcctaggtccatggtgacgctgccatcgttgaggatgagcaagaagaggtcccagggcatccggtgcgactacatcggctcagccaccaacgttatcatggtgacgacgacgacgctgatgctgttcgcggggaggttcgggtgntaaccgtcggngaacaggaagtcgacgggcggggcttgaagcttngaggcgcgcgacttcggccttcagaccggcgaccccgcgggtttcacgttngccgacangtttgcttcgg

SEQ ID NO: 37010 - DNA, 1172 bp, Oryza sativa
  Clone ID: PAT_MRT4530_4077C.1
acggaagcggaccccgtgtgtcaaccgaggcgagtggccgacaaacggactccactagacaccacgcgggctgcacacgtcgaaaccacgcggctaccgagcgggcacactaacacggtcaccacacgcacacatgaacgactaccgacaccggtacacgggtaccggggtcgacaaccgcacgacaggcacggggcaacaccgaaaggacgagaacggggcagcgagaagagggatccttaccaccacgcgaaaaggcgcggcacgacgaagacgaacgggcgcggcggagatggctcggggacgatggaggcgaacggcgagggaacgacttcggcggcgatccttggacgaaggcgagacacggccggcgcaatgcttgacgacgcagagccgaggacgaagacgacgacagggctgcagcaacttgacgaaacgcaggcgacgaacggacgcagcttgacggaggaacgaacgccactacaaccgggaacgacgagaggacgacaacgacaacgacgaccgggaacaaacaccgctgtgatgccggaggaggagacggcgatgttggccggcgcacgggaactgcggaaggggctaccggaggagacgtcgatgaggaggaaggagaggccggcgcggcggcagcgttccggtgaaaccgagggaaggccagggtgaagggcgatgtcaccgtgccgagggaggagacggcagcgtaggatggctcaccggcgaggaacagtagccgcccggaggaggggaggtactggacgccgacgaggagaccactccggcgagcttcgggcgaggaggaggtgaggccggagatgaggacggcgtcacggagccgagggaagtggtggcgacgtctgctggtgcacaggcgaggcggcacaggtggctggaggcggccggcgccggggaaagaggaggaggagatggggagaggtggtgcggccacggggagacgcggaagaaggcgcacgcgtgagggcgcgggcgagcgcggctcggcttgggccggggcaggcccaggtgggaggaggagaggatggagtgggccgggagtgggaggggaggcccaagagaagaagggagagaaggagagggagagaaagagagggagaaagggaggacttccaccgcgggccgagagagagagaggaaga

SEQ ID NO: 37011 - DNA, 2066 bp, Oryza sativa
  Clone ID: PAT_MRT4530_40780C.1
gcacgaggcactctactccctcacagatcgggccatggcgccctcccgagcgccggccgctgacgcctccccgtctcccgaccggcagccgccgctacctccccgcctcctgaccgccggtcgccggatctagcatacgaggcgcggatcgggccaccacggcctctcccccgaccgtcggtcgctgccgcctccccgtctcccgagcgccggccgctgacgcgtccccgcctcctgaccgtcggccgccgccgcctccccgcctcccgaccgccggtcgccggatctggcctacgaggtgcggatccggccgccgcggcctctcccccgaccgtcggtcgccgccgcctcccaacctcccgaccgccggccatcgcggcctctcccccgaccgtcaaccgcttcctcctccgccaccgcaccgccaaccgccggatccgggcgcggatccggccaccgcctccctcttgaccgttggccgcttcctccaccaccgcaccaccgccagatgaatatgattgtgatgatttttgtaattttgttttgtgcccaaatgattgtgaatgtgaagtgattttgttctttggccggatgaatatcatcacagggatttttgtgtcatcagtgaccacagatcggagtagggggagggagcggtgacggtggccggagccagggagggaggggcagcggtggtggtagccggatcctggggagggagggggtggcgatggtgcggcgtcggagttggaggagggagcggcggcggtggtcggagctaggaaggaagggtcgctggggcggcagtggtcgtcggagtacgtcgggtatatatcgcgtgatacctggcacgtgatacctacctgatacctcgcaagtatcaccggcgcgaaccagaagcagggcggcttgtacccctccgccatggggatcgactcgatgacctcgatcctcttgtgcttgcccttggccgccgcggcgaggctgtacgcgcacacgcgcgtctcgccggcgaggtccacggcgaagtacacggtgctgggtcgcagcccggggcactcccgcgtagacgccgccaccgcgcccgacgcgtccacgagcaccgccacgtcgccgatgtcgtccgcctcctcccacgtctcgccgcattcgtccagcacgcgcaccacgaacccctcctcctcgtcctcgccgccgccggacgcggccacgggccggagcagctccacctgcatcagcccgcggcggccgccggcggagcctggcggggactccaccaggaagctgcgctccacgtacgcgttcggccgccgcgtcacggaggggatgatctccggcgaggcggagcccagcccgcgcagctccgggaacgcgtacaccatcccgtaccgcgtgttggcgtagagctgcccgcggtggacggccacgtcgaccacggcggggatgctcgtcggcttcacggacttccacgcgcggtcgccggggcgcgccgtcgcccactggttgcggtggtggacctgccggtagatcacgaccacgaggagccccccgtccggtgcgggcaccggcacggccttgtggatcaggccgtcgatgcgggagacggtgccgccgccatggcggacgttcagccccgctgggcccccttcgacgccgtcgacgagcgggagcgagatgacggggggaagcgccctgcgcttaccggtgacggggtcgagcaggtgcatctcgccgcggtcatcggcggccacgatcacgccacgggaggagccgaggggcacgaaccctcgtcccccatcgcggccgaggcgcgcggggagggcgacgacggggacctcccggtcgcgggagacgacgaagcggcagccatcatccggatcgggtgcgtcggcggggagcaggagccaggggcggtcggggcgcgggcggccgcggccgtcgacgaagatggcggcggcggcgcgccatgaggcgcagacggcgcggaagcggaggaggtcgagtgccgggaggcgcccgacgacgaggaggagcatgtcgtcgtggatccccgaccagcccgacat

SEQ ID NO: 37012 - DNA, 752 bp, Oryza sativa
  unsure (1)..(752): unsure at all n locations
  Clone ID: PAT_MRT4530_40781C.1
gactagttctagatcgcgagcggccgacattatttttttcctcgaaactcagctgcaaggagaaggagaaggtaggctccagccatggcttcccagctctccgccgccacatccgtgccgcagttccatggcctccggacctactcctctcctaggtccatggtcagttccttctatgatccaatgctatcaaattattttcctttgtaacgaaaagtataactagagatgcatacaattacacattcctaattgtccctggttcttgattaatcacaggtgacgctgccatcgttgaggatgagcaagaagaggtcccagggcatccggtgcgactacatcggctcagccaccaacgttgtaagaacacacacactgaattaatttatcagtgtggttaattagctgaattcaacgacgtgattaggcttggatgtgaatggaatgtgatgggcaatttatttgggggggcgatgcagatcatggtgacgacgacgacgctgatgctgttcgcggggagttcggggctggcgccgtcgggaacaggaagtcganggcggggctgaagctggaagcgcgcgactccggcctgcagaccggcgaccccgccgggttcacgctcgccganacgctngctgcggcgccgtcggccacatcatgggcgtcggcgtctcctcggctcaagaacatcggngtcctggaccagatcatcggctaatcaaatcattaagctagtnacacggaatcatact

SEQ ID NO: 37013 - DNA, 351 bp, Oryza sativa
  unsure (1)..(351): unsure at all n locations
  Clone ID: PAT_MRT4530_40782C.1
gaggacgacctacgaggccgcgacaggtggcttcggacacgtggcgggtggcgggaacgccgttgaaatcgagcggtnatttactccgngattccntgtcagaggaagaaacaaatgtcaggatggctatgtgattagattgaaaaacgagggcctatgtgtaaataatagtatttctttttaaaaaatatttttagtagtaactatagggaattagtgatttgtgtgtgagtgaacaagctgatcgacccataaatttggntaaatctcatgcttggatcgcttcaatttgtttagttcaagagtgtctgatatcacaagggttaaattgatcaaaaaaaaaaaaaaaaa

SEQ ID NO: 37014 - DNA, 141 bp, Oryza sativa
  Clone ID: PAT_MRT4530_40783C.1
atggggtcgacgttcgcctccatctcgttgtctgatatcattgtcgtccctgggagacgacgcccctccacctacaacgacatgatggttgcaagcgactacgacgacgaggatggtgttggaggcttcgagcgacgatga

SEQ ID NO: 37015 - DNA, 427 bp, Oryza sativa
  Clone ID: PAT_MRT4530_40784C.1
ttttttttttttttttttttaaaaccagagggcatggactggatattttttattcggaggcgtaccatggagataaaagtgcaggatttctcatataacaaggtcaatatgatgtttcttaactgcagagatgtccacggataggctccacggcgctaaactgacaagacaatagataaatttccagaaatggacacactccagaacttaaacatatccaggataattaggctattctggcaacagtttagtgtatatggcatggtttcatgctactgctgcagatttgaaggtcctttctgcattgcttctttctgttcagtttgcatagtcactcgtctcctgtcatagcgaggacgaggccggctccttacctgttgcctttcagtaaatcggaattgtggtctatgtatgacctgtccatcta

SEQ ID NO: 37016 - DNA, 1071 bp, Oryza sativa
  Clone ID: PAT_MRT4530_40785C.1
atggcgcgccgccgcggccggcgcgcggacaaggctaactgcagggtgccgaggaaggcgaaggtcgtccccgccgctgccacatccgtggacgacgtccccgaccaccttctcgaggacatcctcctccgcctcggcccctcctccgcctgcctcgtccgcgcggcgtacgcgtgcaagcggtggcgccgcgtcgtcacggccgcgggcttcctcgacgccttccgcgcgctccacggcgcgcaccaccaccgcgtcgccgggtactaccacaccctcacgcggcgctaccagggtatcctttgtccggccgacttcactggataccgatgcatcggcgtcttcttgctcggcggcggcggcggcggtgacatcagcctgtccaacttcagggtcatctgcgcgctctacgatctctactggttaaacaaccgccacattggcgtgcaattggcctgcgtgttctcctcaggcagccatggcggcgggtggcggctaccgaagagcgccgtcgcggatgacatccagctcacagaaaggttcaactccatcagcttcgtggggcgcgccggtggctgcttctactggggaatcgacgacgacgacgacgaagacggtgccatgctcgtcctcgacgagacaaccacggaattctcgctggtgacgttcccggacagtatccgtgagaactaccacatgacgacgttccggatcatcgccggcggcgacggcgccatgcgtgttctccgcgtgataggcaacgacctcaaggtgttcacgcagctggcgggcgacggcgagtgggtgctggagaagctcgtgcggttgccggaggcgacgcggggattgccggggcacgaggagaggtacttcgagcagaacgaggccatgatcgtcgcggcgaacgcggcgtacgtgctcctgacgccgtcggtggagaagacgtggctcttctccgttgagctggagacgatggtggtggagcggcagcatgagaggaacaagtatgcgggggtggcttacccgtacgagttgccattgctgcgggctttgcacgccggtggcagatga

SEQ ID NO: 37017 - DNA, 1353 bp, Oryza sativa
  Clone ID: PAT_MRT4530_40786C.1
atggcgcgccgcggcggccggcgcgcggacaaggctagtaactgcggcagcgcgccgaggaaggcgaaggccgtccccgccgcggcgacgtccgtggacgacgtccccgaccacctcctcgaggacatcctcctccgcctcggcccctcctccgcctgcctcgtccgcgcggcgtacgcgtgcaagcggtggcgccgcgtcgtcactgccgcgggcttcctcgacgccttccgcgcgctccacggcgcgcaccaccaccgcgtcgccgggtactaccacaccgtcgacgcctactacgcgccggcgctgcccggcggcgagagctccgtcttcgtcccgtcctcgtcatcgctcgccggcgtcgacggccgcctgtggttctcgctagattttctcccggcgagcgacgacttctcctgggagctcgccgacagccgcggcggcctactgctcctctccaagaagaggaggacacacacacgcagcggctatgcagcagaaggcgacttcttcttcactgacctcatcgtctgcgagcccctgacgcggcgctaccagggtatcctttgtccggccgacttcactggatatcgatgcatcggcgtcttcttgctcgacggcggcgatgacggcggcggtgacatcagcctgtccaacttcagggtcctctgcgcgctctacgatctctactggttaaacaatcggcacattggcgtgcaatccgcctgcgtgttctcgtcaggcagacatggcggcgggtggcggctaccgaagagcgccgtcgcggatgacatccagctcacagcaaggttcaacgccatgagcttcgtggggcgcgccggtggctgcttctactggggaatcgacgacgacgacgacgaagacgacggcgccatgctcgtcctcgacgagaccaccacggagttctcgctggtgacgttcccggacatcatccgggagaactaccacatgacgacgttccggatcatcgccggcggcgacggcgccatgcgtgttctccgcgtgataggcaacgacctcaaggtgttcacgcagctggcgggtagcggcgttgagtgggtgctggagaagctggtgcggttgccggaggcgacgcggggattgccggggcacgaggagaggtacttcgagcagaacgaagccatgatcgtcgcggcggacgcggcgtacgtgctcctgacgccgtcggtggagaagacgtggctcttctccgtcgagctggagacgatgacggtggagcgccaccatgagaggaacaagtacgcgggggtggcttacccgtacgagttgcctttgctgcgggctttgcacgcgggcggcagatatcgatga

SEQ ID NO: 37018 - DNA, 614 bp, Oryza sativa
  Clone ID: PAT_MRT4530_40787C.1
tcggcattccatcgagaaagggagaagtactcggatcggggacgatcgtcgagatgggcacacagtgaatgtggggatcccacgttaatatatttgtgcaggttcttcgaaaagatgttcatttgaagaacaatatatttctgttccgccgaaacattggagatgatttgacaagattatgaaggacaagattccagaggttttatatgccaaggcgctaagttgttcaggcaccagttggccgccgaggacatcccagtattagcaatttgcatcagaggttttcttttgtaaaaaccgccctggctaatgtaaaactaatgtaatgcacatggagctttcaactctggtagaaatttcactgtttgcttgtaaagttttatccgaaaaattgcatggtggacagactctcaactctcaagcatctctagattgatcaaggttggagaaaacttgtttctggagcatggagatgatcaaagttgagagagcttacacatgagatgaactctcaaatatcccatttgcttgttggggagatggtcacgatgaattataagaaagaaagatcaatatatacgattttatttgggaaagataaaaaaaaaaaaaaa

SEQ ID NO: 37019 - DNA, 1744 bp, Oryza sativa
  Clone ID: PAT_MRT4530_40788C.1
aaggtatcagaagagctaagccgatctcagggcatcgcccgaagccgccatgccacccgttgccgcccacgtcgccgctgattccggccctcccactcgctccctggcgcccaaaccgcataaaatcggttcccctccacctcctctaccaaatcccccacttttccccaatttttggcgccaaatcgagcccccacttcgcccacgatgtcgcccacgtcgccggccgttgccgcatcaaatccgccacgtccggccacaatttcaccctcccgagcctcctcgctctccccacgccgctcccgcgcaccgccgctttccggcgagctccggccgcccaccaccgctgctccacccaccgccgcacaaatccgccaccaccgtcggcttcgcggcgccgtgctgcagccaggcccctactccatttcccctctccgcctccggaacatcgctgcctcacgcaccacctctctccgccgccgttgtcgcctccagccacgcgccaccgccgctcccgccgctgttgtgctgcgccgcctccactgtcggcttcaccgccacgcgggcaagctcggtctccgcttcgtttccccgttccatcaccggaactccatctcctctgtcagcccgagccgccaccacctcgccgccaccgcgagcgacctccaacctcacactctccttcgtcggctccgcagcaacgatagggagcccgacatcccctcatccaagctcttcgtcgcgggaaatcctttccccgctgtgagaggtgagctccttccctcatcgccggcttccggccgagttttcccgccgccttgcgcctcctccctattccctaactttccctccttgttccccagatccttccggtcgccgtccgccggttcccgctcgcggaacatcgcctccctttggtgccgtgccgcttgctgagcatcccctctccgctctttccgccgctctccgcgtgccgacccgcgccgccggtgtcgtcgccggtggtcgccgtccggccgcgcgttgccgtcgtcgttcgccgccgctcggccgcgcctgtactttggccacccgtggaccactcctgtggtctgggtccatggtgccgccaggctgcagtggaccgagtccaccgtgcgccctcccctagtcccgctgacgtgtggggcccgcctgtcggcgcgcccttcccctttgatgacgtcagcggctgtgccttttctacttaccacaagccagcatgggcaactgctgggcttgtagtgtagctttactctagccgacgcatccaggcaagggtgggcgtgatggagtttggatgggccctgcgacggcctatgcggcttccggattttcctaggcatgagaggggactgcccgctgccttgcgaggagtgggggtgaaaccgtccttgtgttccccttgcacgtctgcatcgttggtgtggcttgctgagtacggtggttgtactcagccttgctattattcccccttttcagaagtgtagtgcttctgagtcttgcatgttgatcttgaaaacttttgtcccttgtagagatgttgatgacgaggatgtccagcagcgcgggcagcccgagtcaccggcgactattccggttctcgcgtttgaaccacatgcgttgcccgacaatgtagaccagacccttgctacggggacggagatggcgacgactttcttaggttagttgtccattcatccctttctgctcctccgactagatc

SEQ ID NO: 37020 - DNA, 663 bp, Oryza sativa
  Clone ID: PAT_MRT4530_40789C.1
atggagatggatccggctgcggctgcgggaaatggcggcgaggacgaggccgtggccgtgaagaagcatctggcgaccaccgcgctgggggcgctgcgcctcgtcaccatctccgcctccgacgcctactcccataccttggacgcgctccacgccctccgctccgcctacgccaacatcgtcgaagtcgcaccacccgatctcgccgccgcggaggctctcctcgcccacgactgcaaccactccatcgccctggcctcgcgcctcgtcacccacatggagctcatggccatggaggccaccatccacgtcgaccgctggctcacctccaccgacgccgccgtgcgcctgcaggggattccggcggtggtgtggcgctacaagatggacgcggtggtggtgtggctcggcaacgcgcggaagaagctcctcgacgccagcgccgactgccacgccgtcacccccctcctcgccgtcgccgccgccgtcgacgagtacgcacccgacgtccgcagtcagtggacggccgccgccaacacggggctcttcggagcactcggtcacctccgcggagcgtgcaacatcatcgccaacgcccccgccgtcgccgcccttgctcgcgacgccaccaccaccctcttcgacctcctcctgctgctctga

SEQ ID NO: 37021 - DNA, 5555 bp, Oryza sativa
  Clone ID: PAT_MRT4530_4078C.1
atggtgcgctgcggtggattgtgttatgcaaggggtattgtcacagctcctttccgagctcctggtttggaatggcatattcctggtttggagatagaactgtgcagccgggatggttgttcagaatggttgggcctatacaacaggatgccgcgctacaagcctgagtacttgtttggtgttgagggatttgtccaagagttgtgtacgatgtcctttgccataggatttgggactgcccctttttatgcccagattcctcatgatcgtcatgaagagaagtgccgagtcaaagtcaccttgaacagtaatagtgaagatattccctcagtaatgttcgaggctggaggaagaaactacatccatacatgtcaggaggtggcaaggatcgccataggagagctccgcgatcgctacagtgatcagttggccgacactgagtatcgctaccatcctcgccaaccacagggaagtgacgatggcagcttccttgagactgaaggaattgagaatgatgctaccacaaggcatttggttgagatgctgtgggctatggatgaaacccgtgcggagactgtgttagcagctcaagatcgtgaagatcggaatcgtggtaagatttgcaagctagaagacaaggtggatcgtttggagaaggaactagccgcgttgaagggagaagcaccaccgcagaaggccaggattcgtcttactgcaaggaagagagctctatttgtccctcgctaccaattggcgccaaagatggtgctcactcgcagcaacgggaatggccccaacaacaacaacaataacaacaacaataatggagagaatcccacacttgcccaagtcctggctcaacaggcacagcttatgaacatgatgatgcagcaactccagaaccagcagaaccagggaaataaccatgcacctccccagaacaagttagcagaatttcttcgtgtgaggccgcctattttctctagtaccactaatcctgttgaagctggtgattggctgcatgccatagagaagaagttggatttgcttcagtgcactgatcaggagaaggtctcatttgcatcacaccagttgcatggccctgcctctgaatggtgggatcacttccgcctgaataggactactgctgaacctatcacttggcttgaatttaccgctgctttccggaagacgcatataccatcgggagtgtatctgcacgagttcaatcgtctggctcgttatgctccggaagatgtgcgcactgatgaagagcgtcaggagaagttcttggaaggacttaatgatgagctttcttacccactcatgactggggattatcctgatgtccagaagttagtagataaggctattcgtcaggaggacaagtacaatcgcatggagcagaagaaacgccggattgctcaattcaaggcacaacaggggaacagtcagaagccgcgtcttactttaggaccccagtctatgccacagggaggttcttcgtccgttgttcgtccgcagcgtcagttcttcaacaacaacgctggcaacaacatccgcaatcaagctccacgccctgttgcagctccaacacagcaacagcctgccaagagggagcaaggcagcaagcccgggagcaactctaccgtaccagcatcaaaggcccgtgtcaatcatgttgctgctgcagaagctcaaggtgctccagatgtgattttgggtacgtttcttgttaacttagttcctgcaacagtgcttttcgattctagtgctacacattcattcttatctatgagttttgcgggaaatcatgggatggaagtagaagatcttagacgtcctttgatggttagtaccccaagtaatcaagcactctctttgcaacgtagcccctctgtcagaatagaaattcaaggaatatcatttctggccaatcttatcttgttagaatccaaagaccttgatgtcatcctagggatggactggttagccagacataaaggtgtgatagactatgccaacagaaaagtaactctcaccagcagtgatggtcgagttgtaactgttcatgcattgtcttctgagtctttaaggtcaagtctgaaccaaataactttggaagagattcctatagtccgagagtatcccgatgtgttcccagacgatttacctggtatgccgcctaaaagggatatagagttcagaatagatttggtaccaggaacaactccgatccataagagaccttatagaatggcagccaatgagttggcagaagtcaagaggcaagtagacgatttgcttcagaaaggatacatcagaccgagttcatctccatggggagctccggttatttttgtggaaaagaaagatcatacccagaggatgtgtgtggactatcgtgcattaaatgatgtgactatcaagaataagtatccgctgcccagaattgatgatttatttgatcagcttaaaggtgccactgttttctccaagatagatcttcgatcagggtatcaccagttgagaatcaaagaggaagacatacctaagacagcttttaccactaggtatggattgttcgaatgcactgttatgtcttttggactgaccaatgcccctgctttcttcatgaacttgatgaataaggtgtttatggaatacctagacaagtttgtggtggtctttattgatgacattcttatctactcccgaaccaaagaagagcatgaagaacatcttcgccttgcactagagaagctacgagaacatcaactgtatgctaagtttagcaagtgtgaattttggttgtctgaagtgaagttccttggtcacgtcatctcagcaggaggagttgccatcgatcctagtaatgtggaatccgtaaccaactggaaacaaccaaagacagtttcagagattcgcagtttcctaggcctcgcaggatattatcggaggtttatagagaatttttccaagattgctaagcccatgacacgactgcttcagaaggatgtaaagtacaagtggtcagaagaatgtgagcagagttttcaagagttgaagaatcgcttaatatcagctcctattttgatcttacctgatccaaagaaggatttccaagtgtattgcgatgcatccaaacttgggttaggttgtgttctgatgcaagatgggaaggtggttgcctatgcatctcgtcagttacgtccgcatgagaagaactaccctactcatgatcttgaattagctgcagtagttcatgcgttgaagatttggcgtcattatcttttcggtactcgtacagaggtgtacaccgatcacaagagtttaaagtatatctttacccagccggatttgaacatgagacaaaggagatggttggaattaattaaggattatgacatgggaattcattatcacccgggaaaggctaatgttgtagcagacgctcttagcaggaaaggctattgcaatgctacggaaggacgacagttgccattggagttatgcaaggaatttgaaagattaaatttgggaattgtcagtagaggtttcgttgcagccttagaagcgaagcccactctaattgatcaagttagagaagcccaaattaatgatcctgatattcaagagatcaagaagaatatgagaagaggaaaagctatcggtttcttggaggatgagcacggaactgtatggttgggtgagagaatctgtgtccccgacaacaaagatttaaaagatgcaattctgaaagaagctcatgatactttatactccattcaccctggtagtactaagatgtaccaggatctcaaggaaagattttggtgggcaagtatgaagcgtgaaatcgcagaatacgtagcagtatgtgatgtttgtcagcgagtcaaggcagaacatcagaaacccgccggtttgttgcaggctttgaagattcctgaatggaagtgggaagaaatcggtatggattttatcactggtttacccagaacgtcatcaggtcatgactctatttgggtgatagtcgacagacttaccaaagtagctcatttcattccggtaaagacaacctattccggaagtcgcttagcggaattgtacatggcaaggattgtgtgtttgcatggcgtccctaagaaaatagtgtctgatcgaggcagtcagtttacctcaaatttttggaagaaacttcaggaagagatgggttctaagctgaactttagtactgcttatcatccgtagacagacggacaaaccgaaagggtgaatcagattttagaagacatgttgagagcttgtgctttagatttcgatggaagttgggataagaatctaccttatgcagaattttcgtacaacaacagttatcaagctagtcttcagatggctccttacgaagcactgtatggtcggaagtgtcgcactccgcttttgtgggatcaaacgggagaacgtcaggttttcgggacggatatcctaagggaagcagaagaaaaggtaaagatcattcaagaaagattgcgagtggctcaatctcgtcataagagttatgccgacaatcgccgcagagatctaagttttgaaggagattatgtgtatcttcgtgtcacgcctcttagaggagttcatcgtttccacaccaaaggaaaattggcaccgcgttttgtgggaccttataagattgtcagtaaaagaggagaggttgcttatcagttggagttacctcaatctttggcaggagtccataatgtgttccatgtgtcgcaattgaaaaagtgtttaagggtacctaccgaagaagctaatctcgaacagatagaagtccaagaggatctgtcctatgttgagaaaccaatccgtattttggaaacagatgagagaagaaccaggaatcgagttatccgcttttgcaaagtccaatggagtaatcactcggaagaagaatcaacttgggaacgagaagatgaattgaatcgtggattcgagtttgtttcggattcgattttcccgaactttccttctcgtcgccggccgccgtgggccttcgtcgtcgtctcctagcccctttaaaaggttccccggtgtctcctctacccgctgccaccttcgccttcgcctctcgtcgtcggaaacgccctagcgccccgtgcgccgccgccgttccagacgtcgtcgtcgctcgggaagaccgccgtcgtggtcgccaagtcgtcgccgtcctcgtccgccccttcgctgtcgctgtagaccgccggagcaccgtcgccgtcgtcaagccgaagagcgtcgccgcttcttcttcgtcgccgtcgccgtccgttcctcttccgcctccgttcgcgccgccgtgccgtcgttcgccggcgagcatgcaagcccgagccgccgagccgccgccgccggtggtgacatcatcgctgacgtcatcgtggctgtccgccattccgtcgtttccggagagtccgttttcgccggagaagagtttgaagagttccaaggccagcaaggcaagtcacacagatcccaaacaaccctttgagcat

SEQ ID NO: 37022 - DNA, 540 bp, Oryza sativa
  Clone ID: PAT_MRT4530_40790C.1
gaaaggaggttggaggggggggggggaatggacgccacatccatgataacaccccctagatgactgggagcagaggagctttccacctcatttacctcaacttttgccgagcctcagctgcgagtggcaatatatttcgttactggagctcggataatcgctgacaatatttaatggctatataattttgatctggtcttttctcgtttttgagccgtgaagagtccttcaatgtctccgttcatgtgcgggcttaccatgaaatctccttgacaaaagagatggaaccggccccactgtacatatgtatcttagttcttagcactgttctgcaaatgcagaaacgggagggagttctattgtggggaagagatgtcctgtatcagtttagttacccatagattatgtcgttagcctaccggtttaccgtctcattggcaatgtctttggtatttaaatgttcaatttgtaatccaaatgttaatttaaatacattaaactgaactgattagggttaaaaaaaaaaaaaaaaaaaaaaaa

SEQ ID NO: 37023 - DNA, 692 bp, Oryza sativa
  Clone ID: PAT_MRT4530_40791C.1
atgccgccgtcatcgagcagccagctctccagcatcgagaacgccggcgcgggcttggcgccgccagtggccatcttgctgatctccgtcgagccctctggcgtctgggcagtcgccgccgccatagccaatccggcctccacctgctgcaaatgtcttaaggggaagatggcgacccccttctccgagcgacggcttcttgacaacaacaaattatccggaagcatcccttctactttaggccttcttaatacattggaagttctgcgtttcgataacaatgcgcaattgacaggaccagttcctaccaacctcaacaacttaaccaggcttacagaactcttacgcgctatgctttcatttgacactagccatcttgcaaactgcaatcttactggtccactgccagacctaactggaatgaacgaactcatgtatttgtacatgaacaacaatagcttcagttcatcattatttgaataatcactagccgacgcattataggctgaggcgctatcagattcataatttacatacctaaaataattatttgaataatcaccagccgacgcggtatatatatccattaaaaataggtctaacaacatatgtatgagaattaatggtacttgtaaaattattttgagaaacatatatatttgtaaattttacctcaaaaaaaaaaaaataaa

SEQ ID NO: 37024 - DNA, 1179 bp, Oryza sativa
  Clone ID: PAT_MRT4530_40792C.1
ttagcaccacccatcaggtaatgactcagagaacattggaacatatggtaggtatggcaggcatgactcatgtccgagtttgcgtatgacacggacttccttgcgatccatttcatacgccatcaaagtattgtgccatccataaacaaagaagatcaaattgcattctggatgaactgcaattacttggtagtcaaaatctaattggtatttctttcgtccaaacagattaattgagctaacggtgtgctttaagatccaattatctgtatcatagtcttcaagaaaccaaattgacagttcgaggatatcatttggatcaacattaaaagcacacaagcgaccctgagtttgatgaattatcccaatatcaccatcaggatccggcatgggaatcttcctccatttcttcccctccatgtcaacagccacaatatcgcaagtcgtgacagaatgcagaaaaccattaaggaaaacccttgtccgatcgaccggaaggctaaccataacttcatcatcccatccatttacatggagactccataacccagttttagacgaatagatcaccacccctgtgaccagtgcgtcgtattcatcttcatcctccacatactcttcatcctccacatactcgagcacatggaaatgcgacgagatggctggatcgaaacacaagcaggcggtgcggttctcgtcaatagcccagttggcgtccggcaacatcacacattccccggtcgcaggattgcacacagcatactggaactgcaaagtctcacgagacacgtggcagcggcagaggaggaggccattgcagctatccaagatgacgacgtggtggcactggggcaggaaggagaaggtcgggcagacgagaggcatgcctctcccagtggcgttggtgaaatggcgcgccatgtgcgggcagcgctcgtagtcgatgctcttgtagaagaagcccgatagcgtctgcggcagcttcttgcggtgctcgtggtcggcgatgagtttgcgccatgacttgctgacgcacttgaagcggcacacggagcggacggggaggcggcggaggatctcgacgatgagctcgtcggtgatgctggccgcctgctggggaggttctcccttgctaatggatggaatcagcattaatggcacgccggcaagggccgccat

SEQ ID NO: 37025 - DNA, 293 bp, Oryza sativa
  unsure (1)..(293): unsure at all n locations
  Clone ID: PAT_MRT4530_40793C.1
caaattccctcccctttccccctccccctccccctncttcgccgaaaaccctaaatcgccgccggccggccggcattggggagggcttcgcanaagcccggggaggganccttcganccttcttcccgaacttcccgaagggancgaacgaacttcccggccttccccaacggccttnccgaacggccttncttcccgaactttcggccaacccccaacccccccccttncnttttcctttccgggcaaaggcccccaagcggcccggcaaagtccttcgggccggcgggggg

SEQ ID NO: 37026 - DNA, 113 bp, Oryza sativa
  Clone ID: PAT_MRT4530_40794C.1
ggcttaaaacctaaaagtagcaaccaaacattttcatagggtttcatggcaagccctacaaggctactaacaagatcacctaaaagcagaccctcacattataaacatcccct

SEQ ID NO: 37027 - DNA, 1189 bp, Oryza sativa
  Clone ID: PAT_MRT4530_40795C.1
ctacccgtctcgtgagcaaaacggaagtttttcagcataaacccacaaagaggtgtcgcactctcgcagcggcggcggacaatcgacaaagatgaacttgtcccttaaataggggttggtcttgccctctacaaaccctcctccacgtccaactcgggatataaaccaaaggaaacccgaaacatgctttcccaagcaaggaaacccaagacccgacgaaaacagactcaggctcggaccctcacggtctgaccggccacatacctccggtctgaccagcactgtgaaggaaacccggcactttccaaacgttggcaattttcccctatttcgtccataggtgctaaattttggtgtaaacaacttggtcatggctggcgctgcatcgacatggagctgtagctgtgttgccctctcggaccgcagcttcgccactttcgtcgtcttcattgccgttcgcgcattgacaacctcgttgtgcacactggtcattgtcagccgctcagtcaacctctacatggctactgacgtcgccgtctaggccgttggtcccgctattttgccttcttcgttgtccaacatgtctcatcgccaacgtcgccatatcttcctcgactacagttcgctcttctccgtcaactgcgtgctgctccggcaattctccctctacacagttctcgcttgtcctcgggtctggcaaacccggcgtgatgtcttgtccatcacggttcgattacatcggctcttcggcgtcatcttcctcaacgactaccgcgattgtgtcaccgtctttgtctccagcgcgtcctcgcacaccattggtccacgacgccctcccgtccgtccatgaccactctacggcgccccatgtgcgccttgcggctcagctacctcgacatcataggcttccctatctcggctacatcgaccacggctactctacgcacggcttcatcgaccacggctctctcggctccttcgttttagctacatcgactacggcacaaagggctatcatcgtgttgagtactcttgtcggttttttttctccagtccaagtgttcgacgtgaacacttgaactgcggggggatattagagtatgtgtactcctatatatactagctcccgaggctccatacaatgtgtccaatatttgcagtattcctcttcccctatactatccaacat

SEQ ID NO: 37028 - DNA, 392 bp, Oryza sativa
  Clone ID: PAT_MRT4530_40796C.1
tcgcccacgcgttcgagcaggcgtacaccactgtggcgtcagtggtggatcgctgcagaacacgctggagcacatgagcgttctgtttctacaggctgtatgcaacggatgggatgtactactgcgctaacacctccagagcgatgggaccaccgggatcgtgtacaccaggctggaccggatggcctcaagcaccgcccgcttcacgctgccgaacgtgttgagcatgatgccgaccaccgaggccgcgtacagcttgctctgcttcatggtgaagcagagcataacttactcggcgctccgggagcggatgatcgtcaacacgtctcacaggctgaagcgcgccatgattgaggccatccagtccaggctggtgaacaggatcgccgtgg

SEQ ID NO: 37029 - DNA, 525 bp, Oryza sativa
  Clone ID: PAT_MRT4530_40797C.1
cccacgcgtccgcccacgcgtccgcacgagactacgagagttcagcgtaaaggaaggaagcagcagccgagccaagccttttgcagcaatgtcgggggcgcagggcgcgcagccgatgggcgagacgacgccgacgacgtacgagtcggtgggcggcggggagaaccgcacgcgcacggacctgcgttcgcgggaggaccagggcgccatccagatcgacaaggtgcaggacaaggtcgacgagcccgccgcgcgcaaggtggacgaccgcgccttcgacgccaagcaggtcggccacggcgccggcgccgacgccggggccaccgggaccggcgcgtgatatcgttcacgtgaagaccgtgcggtagaaagaatggtgctgctactttgttgttgtacgtgcgcctagagtgttcttctgtttgtaagagcaccatgtgtgtgagcctgtaacaataatgatgtaataaaactgctcttgagtttccatttcagcacagctacaatgaaaataacaatcatctg

SEQ ID NO: 37030 - DNA, 1018 bp, Oryza sativa
  Clone ID: PAT_MRT4530_40798C.1
aaagtcctcttttggctttgggccgaaagtcggcccaaaaccgctttctctctctcctcggcccagccggcccagttcgcagccgcccgcgcgcgcgccctcgctgccgctgacaggtggggtccacctgtcaggcccgtcgtcttcctcgggccgaaaccctagcacgccgccaccgccgttcctttccaaattcggccgttcctttccttctccggccgagtcaatagaggggaaatgatcctcgggatctcctctaccttttctcctttggaatcatcggctaaatcggtttggaaatcgagggattcgagttcgaatcggatcgggctctctctctccaagccgagctttccttcgccgttgccgtcgccgtgggccttcgccgccgcctccgagtccctttaaaaggctccccgtggtctcctctacccgtcgccaccctcgccttcgcctctcgtcgccggaagagctctagcgccgtgtgccctagcgccgccgtcgtcgccgccgctccagccgtgctccgccgccgttccagacgtcgccgtcgctcgggaaggacgtcatcgtggtcgccgttgcgtcgccgtcctcgtccgccccttcgccgccgccgaagatcgccggagcatcatcgccgtcgtcgacccgaagagcttcgccgcttcctcctcgtcgccgtcgccgtccgttgaccttccgccgccgttgtggtcaccggtgagttcgccgcgtcgtcctctacgtgctggtgccttccgtttgcgtcctcgcgccgtcgttcgccagcgagcgtgcgccgcccgagccgtctgctccgccgagccgccgccgccgtcggtgacgtcattgccgacgtcatcgaggtcgtccgctgtgagccgccgtggacccgatcgatctcggccgtccatcttagatcggttcgatctcggccgtccgttcgcgtgaaccgccgccgtgcgcccggtccaccgcaaaccctagcccgctgacgcaataaaccttcttttcc

SEQ ID NO: 37031 - DNA, 180 bp, Oryza sativa
  Clone ID: PAT_MRT4530_40799C.1
atgcctctcccacgctgccgccacgcccctccgccgctgctacaaggggccgccagagcagccgtgcgtgcgtgcagctcctctgccgccccaccatgccgctcccccgctgccacgcccctccaccacgaccgcaaggggccgccagagcagctgcagcgccctgtgaaggggaggaga

SEQ ID NO: 37032 - DNA, 3996 bp, Oryza sativa
  Clone ID: PAT_MRT4530_4079C.1
cccacgccaagattgaccgtcaacgccggaaaccaaaaaaccggagttcgggaaggttttaaaaagcgccgggggaaggaaataccgcccggagagcaggacgtgacaaacgcccagacccacaaggtacgacgcaaagaaagcatggtgccccatacacaagacggacagacattctttggaagattgccttgtttttaaaaagtcgttcgagaagcacatggcattggaaaaaggcaagcgagtacgcgtggtcgagaaagatgcggaggcgactgctccagaatcggattcagcatatccagactctgaccttcgtgtctcacacattttcggaagttctacaagacgttatccgatcgtggtcgaacccactattcggaacatcaaggtcgcgcaggttctcatcgacggtggcagctcaatcaaccttctcttcgccagcaccttggacgtgatgggaatcccacgaagcgagttgacacccaccgatcaacccttccatggaatcactccccagtcctcgtccaaaccattgggcaaaattacgttgcatgtgactttcggccaagcaaacaacttccgaacggagcagatcacctttgatgtcgctgaattcgatacagcgtataacgccatcatcggttgaactgcacttgcgaagttcatggccgcatctcactatgcgtatcaagtgctcaagataccgggaccgaaaggaacaatcactattcaaaggaacgccaagctagcggtacaatgcgacaagcggagcctcgacatggtcgaacaaacgcccagcccaccagccacaactgagcctcccaagaaagtgagcaagacaaataagacgccgaaaccagacagcgcgatcatgatcgtttcgctctctagtgccaaccccaacaagaccgaactcgcgctcatcatcttcctccgcgacgtgttcgcttggttgccgtccgacatgccgggggtccctagggagttgattgagcacaaactcatggtgcgacccgatgccaagccagtaaagtaaaaactgcggagatttgcaccagaccgaaaacaagccatatgagaagagctcgacaaacttctcaaagttggctttatcagagaagtatttcatccagagtggctagccaatccagtcatggtgcggaaggccaacgggaaatggaggatgtgcgtcgatttcaccgacctcaacaaggcgtgtcccaaggatcacttcctcttcctcgaatagaccaactggtggactcgacagccggctgtgagctgttgagtttcctcgacgcttactctggctgtcaccaaatcagcatggcgaaagaggacgaagagaagacagcattcatcatgccgttcgaggtattttgctatgttaagatgccattcggactgataaccgcaaggaatactttccagcgcacggtccagggcgcacttagtgaccagctcggcaacaatgtcgaggcatacgtcgacgacattgctgtcaaaaccaagacaagcaactcattgattgacgatctgcgggaaacatccgacaacctccgacgatatcgcctcattcttaatccagagaagtacacgttcggagtaccgtcgggcaagctgctcggtttcctcatctctggcagaggaatagaagcaaatcccgagaagatcaaggcaatcgagaatatgaagtcgcccacaagactcaaggaagtacaaaagctaaccagatgcatggcagcactaagcaggttcgtcgctaggatgggagaacgaggacaacccttcttcgctctgctgaagaagcaagacaaaattgtatggacacaggaagccgaagaggcattcgttgcactcaagcgctacctaacaaacccccctgtacttgttgctccccaacctaatgaagaattattcctctatattgccgccacgccatattccattagcaccgtcattgttgttgagagagagaaagtacaacgaccagtctactacgtcagcgaagctctccatgacgcaaagacaagatatccacagatccaaaagctactctacgcagtaataatgacatcaagaaagctacgccactactttcaagcccacagagtcacaattgtctcctccttccctctcggtgaagtcgtgagaaacaaagacgttgtcggccgcattgcgaaatgggtagtcgagctaagccagtttgatgtccactttgtaccacgaacagccatcaagtcccaggtactcgccgacttcgtagccgattggactatgcctaacaacaaatcagacaatcaaatcgacaacgaaacatggacaatggcgctcgatggtggactcaacagctaaggagcaggggcaagattcatcttgacatcctctccgaagatcaattcaagcacgcaatccacctcaacttcagggcgaccaataatacagccgagtacgaaggactactcgccgggataagagctgcagccacacttggggtcaaacgactgatcgtgaaaggggactccgaactagtcacgaaccaggtgcacaaagattataaatgctctaaccccgagctatccaagtacctcgcagaagtcaggaagctggagaaaaggttcgatcggatcgaggtccgacacgtctatcgcaaggacaacatcgagccagatgatctagcacgacgcgcgtctagacgagaaccacttgagcccggcacttttctagacgtcctgacaaagccatcagtaaaagaggtcagcggcgaagttaacccagacgcccccggcatcagctcggaggccacagaggcagaacgcgtcattgccgaaatcgaaaccacagacgactagcgcaccccactgatcaaattgatcaacagcgaagagttgcccgaggacgacacagaggccgagaaaataactcgtaaagcaaaaatctattgcatgatcagcaacgatctatacaagaaagcgccaaacggggtacttctcaaatgcgtctcgtccgacgaccgcagacacctcctccttgatatacatgaaggcatctgtgggtcacatgccgccagtcgcacattggtcgggaaagcttttcgacaagggtttttctggccaaccgccctcaaagatgcatgcgacatgcaagcacacaaggctacctgcacaagcgctccagactatccctcttacttggccgttctcgtgctgggggctagatatactcgggccattcccacgaagacagggcggctaaaggttcctattcgtggcgattgacaaattcaccaaatggatcgaagtggtacccatgggggaaatcaaggccgacaacgccattaaattcatcagagggatattttgcagatacggattaccgcaccgcatcataaccgacaacggctcccaattcatcaacgccaatttccaggattactgtatcgggctgggagtcaagatatgcttcgcctcagtttctcatcctcaaagcaacggacaagtcgagagggcaaacggcatagtactacaagggatcaagaccctactatggaccgtacgcaccacaccgacgacgtctaacaaggagacacccttcttcctcgtgtacggctccgaggccatgctccccagcgagctacgacatcagagtacacgagcacaaaactattccgacgagtatcaggaggagcagtgaaacgacgatgtgaatctactcgaggaacatcgcgaatgagttgctgtccgagcagagggctaccaacaggccctctgccgttaccacgagaagcgcatccgagcatgcatactttcgatcggcgattacgtcctccaacgggttcaaagccaagcagggcgaaacaagctctcacccaaatcggaaggaccatacacgatcacacaagtcttgcggccaggcgcattcaaaattgcagacggtgacggtcgcgagttagcaaactcttggaacattgaccaactacgtaaattctatgta

SEQ ID NO: 37033 - DNA, 204 bp, Oryza sativa
  Clone ID: PAT_MRT4530_407C.1
atggcgggggcttttttcctttttcttccttcaactcctagagaccgtggccatgacatccatgtcaccgttgacgtcaaggacgcgataaccatgctgctggcgatgacatggatgatggatctagcacctcgagcaaatccagtgaccctccctcttccgcttgggcatgaggccgccagtgatgggaaaggccagatctga

SEQ ID NO: 37034 - DNA, 648 bp, Oryza sativa
  Clone ID: PAT_MRT4530_40800C.1
atgcatgacccacgcggcttccccatccacccgcagccgtaccacctccaccccacggccggcggcctcggcgagggcaggatgcggggcggcgggcggcggcgccccggcgccaagctctccaccgacccgcagagcgtggcggcgcgggagcggcggcaccggatcagcgaccgcttccgcgtgctccgcagcctcgtgccgggcggcagcaagatggacacggtgtccatgctggagcaggccatccactacgtcaagttcctcaaggcgcaggtcaccctgcaccaggccgcgctcgtgcagcacgaggagggctgccagcacgccgacgtcgccgcggcgttctccgccgccgacgccgatctggcccttgagctgaaccatcgccacggcggcgccggcgatgatgacgccgggatgacgacgctggagatggcgccgatgcaagaggcggtgggctacggcgacggcccggctcatcagatgatgcagcaagcgctcgatccagcggggcagctgatgatgggcggcgctcatcagctgcctcctttgccttgctgtgtcttcgtccaggagactgacccctcgtgctactcggtgtgcaatgtccacggtgaggagtctggtgcgcaaggatcttattag

SEQ ID NO: 37035 - DNA, 648 bp, Oryza sativa
  unsure (1)..(648): unsure at all n locations
  Clone ID: PAT_MRT4530_40801C.1
ctcactcactctcactctcgctccagtctagctctagtaaagcagctagctagctcgtagctcgcaatgcgaagaancagcatgaaggcggcgaccacggcgtgcatgccgcggctggtgcgcggcggctgccgcgcgtcgacggcgaggccggcggcgtcggtgtcgctgctggagcgcatccgcgacgtcgtgctccgcctcatcatgctctccgccgtgtccaaggcgtcggtcaagcgcaccggcggcggcaaggcgtcgtcgtcctcctcgccgcgcgccgcgccgccgccgccggtgatgacgtcgtgccgccgcgacgactcgatcaggaacgaggccgtcgaggactgcatcgagttcctgaagcggtcgtcggccgagggcgacgcggcgaagctgtcgagcgtgaccgccgccgagacggtggccgtagcgcgcgatctggccatggccaccaccaagccgtcgtcgccgtcgtgcgcgatcaccaccgacgacgcggtgaccgcgcacggcgccgccccggtgaagcagcctaccatattggcgagcacctcgccgcatcttcgccagcctcgcctgtcaccgccggcgccgtctacctcgccggcggcagcctcttccagccctaggttggtgtag

SEQ ID NO: 37036 - DNA, 185 bp, Oryza sativa
  unsure (1)..(185): unsure at all n locations
  Clone ID: PAT_MRT4530_40802C.1
ggcggcggcggnaancnncnccgaacngaacagccccgagcaagaaagganccaacccaccnaggaggacnaaccngaacgngcnaangagnncaaagcnagnaacaacaccncngaaanccaaggagcagggccaacgagagcaaccncngcgcgaaccgcaagcgccggcggagcagcangac

SEQ ID NO: 37037 - DNA, 509 bp, Oryza sativa
  Clone ID: PAT_MRT4530_40803C.1
ctccttcttcttcctcctctcgctcttgggagaagtacacgctgtacgccgacgacgccatggatatggtctactccctccgtccaaaaagtgaatctagctctgtatgtgacacattatagtacaacgaatctggatagaaatatgtctagattcgtagtactaggatgtgtcgcatcgagtgttggttttttatgggacggagggagtggtaattactggcaaaatcatcatcatcttctggttaatcttgagccctaacagttgatctacttagtgtgatggcttggttattattagggataggttttgtaaaatttttggtggcaatataaaggagaattaatgtatgtttcaaaatggggaagaattgaagtaggtttcatccgccaagttgtgtacacacacacttgcatttccattgtacagctgttatttatatcattgttatatgtgtttcctatacaatcaattattcaacagcgaaaagaaaaaaaaaaaaaaaaaaa

SEQ ID NO: 37038 - DNA, 1365 bp, Oryza sativa
  Clone ID: PAT_MRT4530_40804C.1
atgaggcagcagctggtgacgctgctcgtcttgatcgcgctgcccgcgcgcgccgcgtccgcgccgggcgccggcgccggcggcgtcgtcgtggcgcgggtcacgcacgccgacgccggccgcggcctcgccatgccggagatcgtgcggcgcatggcgcaccgcgccagggcgaggcggaggctgctgtcggcggcggaggcggcgccggtgcgcgcgcgggtgcgcgccgggctcggcgccggcggcgggatcgtgacgaacgagtacctgatgcacgtgtccgtgggcacgccgccgcggcccgtggcgctgacgctcgacacggggagcgatctcgtgtggacgcagtgcgcgccgtgcctggactgcttcgagcagggcgccgccccggtgctggacccggccgcgtcgtccacccacgccgcgctcccctgcgacgcgccgctgtgccgcgcgctcccgttcacgtcgtgcggcgggcggagctggggcgaccggagctgcgtctacgtctaccactacggcgacaggtcgctcaccgtcggccagctcgccaccgacagcttcaccttcggcggcgacgacaatgcaggtggcctcgccgcgaggcgcgtcacgttcggctgcggccacatcaacaaaggcatcttccaggcgaacgagacgggcatcgccgggttcggccggggacggtggtcgctgccgtcgcagctcaacgtcaccagcttctcctactgcttcacctccatgttcgacaccaagagcagcagcgtcgtcacgctcggcgcggcggcggccgagctcctccacacccaccacgcggcgcacaccggcgacgtcaggaccacccgcctcatcaagaacccgtcgcagccatccctctacttcgtcccgctgcgcggcatctcggtgggcggcgcgcgggtcgccgtgccggagtcgcggctccggtcgtcgacgatcatcgactccggcgcgtcgatcacgacgctgccggaggacgtgtacgaggcggtgaaggcggagttcgtgtcgcaggtcgggctccccgccgccgccgcgggatcggcggcgctcgacctgtgcttcgctctgcccgtggcggcgctctggcggcgccccgccgtgccggcgctgacgctgcacctcgacggcggcgccgactgggagctcccgcggggcaactacgtgttcgaggactacgcggcgcgcgtgctgtgcgtcgtgctcgacgcggcggccggcgagcaggtggtcatcggcaactaccagcagcagaacacgcacgtcgtgtacgacctcgagaacgacgtgctctccttcgcgccggctcgctgcgacaagctcgcggcctcactgtag

SEQ ID NO: 37039 - DNA, 1440 bp, Oryza sativa
  Clone ID: PAT_MRT4530_40805C.1
cccacgcgtccgcccacgcgtccgctcactcttttactcttcttgacaagagtagaacaacaacaacatcatcatcatctatcacacacactatcagggcaggtgatcgaatagctaggaagcaagcaagcagagagtagtagatcgagtgatcggaggatggggtcgcggtacgaggtggaggtgacggtgtcgtcggcgcgggacctcaagaacgtcaactggcgcaacggcgacctcaagccctacgccgtgctctgggtcgacgacggcgccaagtgctccacccgcgtcgacctcgacaacgccgacaaccccaactgggacgacaagctcaccctccctctccccccctcctcccgcctcgacgacgccctcctctacctcgacgtcgtccacgccaacgccgccgagggcgtcaagccgctcgtcggctccgcccgcctcccgctccgcgacgtcctcgacgacgccggcgtaggcgcccgcgtctcccgctccctccgcctcaagcgcccctccggccgcccccagggacgcctcgacctccgcctcgccgtccgcgagtccgcgcgctactacgacccctcgccctacccggctccctacggccaacccgccggaacacgcgacccctatggcgccccgcctccggcctacagctccggctcaggcgggcagtacccgtacggtggtggctacggctcaggcgggtacgcggcgccgccggcagggtacccgagcgcctacggggcgccgccacagccagcgtacggcggcgcgcctcctgtggcggcgtacggtgcagcaggtggggcgccggtggttgtggaggagacgaagaagaagagcaagatggggatggggacagggctggcggtgggcgcggcggcgggcgtgctgggagggctggcgctggccggcggcgcgagctacctggaggacaagttcgaggagggcgtggcggagaaggtggaggacgatctcgacagagacgacgactacgccgccggcggctacgacgacgactattaattaattccattttcattttattcatccaaccacaccacgcctatccctgcacttcaaagttcaaactcatcctaatataaccgaataataatacctatacttactattacctctttttatatgatactccaataattgagaaacacaaattaaacaagagtaataatcaatttttggtttagaaaacaactcattattcatgctgatgatgatgtgttgttcatttctttttcattcaaggggggaaaaaagaatctttctcctcgccaagaaagagagatgttgatgaacaatatttatatcagaccgatccagtgtggatttggacattcctgcactgtcgtctatcggtgtggaattgtctataaaatactccatctatttctaaataaaaaaaaaaaaaaa

SEQ ID NO: 37040 - DNA, 666 bp, Oryza sativa
  Clone ID: PAT_MRT4530_40806C.1
atggattctaccggcggcaagctcttcgactccaggctccaggtcgcgccgtcgttctccatcctcccgacgtcgccgtcatcactcgaggccgcggtggcggaggttggactggcgacggcggctgagctcggggatgacacgagcgaaccgagccgccgtcgctccggtggtcgagctccggcggctgacctcctccaagccaccgtcgacggcgtcctccgcatccccatcgagtcgccctccgccgtcgcggcggctgcccgcggcgacgagcccaccgcgaagcggcgccgcaagctacagccgacgcgcgcggctgtcggcggcccggtggaggcgctggccacggctcctccccccgcgctacccccatcgtcgccgaccccctcctccaagccaacagtggcggctcgatctcaatatccggcacggcggcaagcaggcgatgtcaccggcgaccgtgtggatggtcccgcccagcagcgcaggcgctggtgtggggaggacaagctcgccggcgtgggggaggacgagctcgccggcggtgagggcaaacggggcgagaggaatgaactgacgacgcgcggttttgggatgacggagtgtcacggaacgaagaaaattcacactctagtggtgtattctgaaagtagtgtgaattga

SEQ ID NO: 37041 - DNA, 2654 bp, Oryza sativa
  Clone ID: PAT_MRT4530_40807C.1
atggcgaagaagaagctgaagaaattgcatgccaaggatgcactagaatttttcaaccaggtcatggtggagcagcccttgctccccttcctggtccctcttgtcttgtttgcatggtttgttgaacgatgggttgtgccattctcaaactgggttcccctgttggctgctgtatgggcaacaattcagctgaccagtgagtgttctctgaatttgcagaaacgtttaaagcatcgaaaaccaaaactaatagataaaatagagttacaggaattctcacttggttgttgtccacctaccttgggggagcatgggatgcgctggatgacttcaggtgaccagaaagtcatgcgcttgggttttgattgggacagcaatgagatgagtgtaatgtttttggcaaaattagcaaaaccactgattggcgctgctcgaattgttataaacagcattcacatcaagggagatcttctactgttacccatccttgatggtgaagctattctttattcttttgaatccactccagaagtcaggataggagtggcatttggaagtggtggaagccaagcagttcctggtatggagctacccggtgtctcaacatggctggttaagcttttgaccgaaaccatagtgaagacaatggttgagcctcgcagattgtgtttttctttgccaccagtagatttaaggaaacgagcagttggaggtgttctttcagtcacagttgtttcagctagtaacgttgggagaaacacaactaatgaaatagggatccgccaaagctcaagtggaggttctacatctggaattgctgataacaaggtatcacagacatttattgaggtagaagttggtagtttagtgagaaaaacaagtacaagcaagggtccaaaccctgcatggaatagcacatttaacctggtattgcatggagagacaggtgttgtcaagttcaatctgtatgaattggactctggtggtgttaaggtcacctacttgcacaagctgcgagataaaggtcaagtatgttctagatgattcaacaatattttgggctataggacataattctggtgctgttgcaaaacgtactgagctttgtggacaagaagttggaatggttgttccatttgaggacatcaggggcgagttaactgtcactcttgtgctaaaagaatggcaattctctgatggctcagttacgttgagcaattctctgagcaacggatcccactcttcatttgatgtatcgcccaagcttcagtccagaacaggacggaaactcagagttgcagtagttgagggtaaagcccttgcagttaacggtaaatctggaaagtgtgatccatatgtgaaagtgcagtatggaaaggctctatacaaaacaaaaacactatctcatacaactcgaccggtttggaatgataaattcgagtttgatgagatcactggtggtgaatatctcaagatcaaatgctatagtgcagatacatttggagacgaaagcattggcagcgcaagagtaaatctagaaggacttttagatggtgatagccgtgaagtatgggttccacttgaaaaggtggattcaggagagatcaggcttcaaatagagccaataaagagtgatttcaacggtatcctgaagacttcaagtggtagagttgaagctacctggattgagctagtgataattgaagctagggatcttattgctgctgatctcagaggcactagtgatccttatgtcagggtgcattatgggagcaagaagaagcgaactaaggttgtttacaaaacactctctccagattggaaccagacatttgagtttccagaaacaggagaacccctgattttacatgtcaaggaccataatgcagtccttccaactgctagtataggccaatgcactgtcgaatacagcatgcttcctccaaatcagcccgccgtaaaatggataccactccaaggagtaaaaagcggagaagtccatgtaaagatcacgcgaaaagtaccacacttggagaagaaaacaagctttcagactgatgcatcttcccttggcaaagggcacaagatatcatcgcagatgagagatagcctgaagaaattcacaggtttagttgatgagggtggcgacacagaggccatgtcactggccttgacagagattgaaagcatccaggatgagcaagacatgtacatacagcagcttgagcgggagaaagcggctttgttgcgtaaaatacaagagcttggttctgaaatcgtcagaacatcctctggtccggcaaggatgccctactagttaacaaccaatacacaggaacaaagaatagccttcacagttgtattcattggcaaagacctgaattatttacatagaactatactctagtgcagatatgtttttgaacgaaccggcacagagtgtgccaatttcattgaatatagcatagtgcagatatgttaccatgtaagtagatacacagcaagcgaaccacaaactcaagactcagtgcagtatattttgtagtgctgaaagaccaatcagtccatgtaacttactctataatctatatatatgtacacatcaatacatacagacaatttaggtgaatcctgaaaaaaaaaaaaaaaaaaaa

SEQ ID NO: 37042 - DNA, 237 bp, Oryza sativa
  Clone ID: PAT_MRT4530_40808C.1
atggcgggattggatggggatgcggcggccggggtagctttggcggcggcgaagctaatggcggtggcaaattggctcggcggcggctccagcggcggcgagcggcgaccggaggagtggaaaagccgccgcagcggtagaagccatggtgaaacagaagtagaggaagatgcaacattaacgtcgaagaacaaagaacaggagcagtcacgcttgaagcgctacccaaaaacttga

SEQ ID NO: 37043 - DNA, 314 bp, Oryza sativa
  Clone ID: PAT_MRT4530_40809C.1
ctccgaccaacttttggaagcaatctcttgtagctcaatgcagcaacaacatctatctcctctctgcttagtaacccctttgccctcccaagaagaagaagatgtcttgctgcggcggccactgcggctgcggcagcggctgccagtgcggaggcggctgcggcggatgcaagatgttccctgatgtggaggccacagccaccaccattattcttcttcctcgctgctccatccaacacggcgagctctgcaggaatggagatggcggccgacagcggcgagaacggaggtctgtgcctgaaacacctgcaagt

SEQ ID NO: 37044 - DNA, 2367 bp, Oryza sativa
  Clone ID: PAT_MRT4530_4080C.1
atgggacgccggtcaaagctgcggcgcggcggccgggccatcaccgccataccggggggattcctccacctctccctcctcgcctccctccgccgccgcccctcgctccaggcgcacgcgcagctgctcctcctcggcctcccgctcccggcgccgaccgcctcccgcctcctctgcccgcacctccgctccgggaacccctccgccaccctccgcctcttcctccgcgtcctgcgcgaccgcgaccggcggccgtgtcccgtcgactcccaagaggatgtccccgactcaagctccttctccgccgccctcgccgcctgctcccaccatgcctcgccgtcgcccggattctctatccatgccttcctcctcaagtccggattcgcctccgacgtctttgctgccaattcactcctccacttctatggttccttcggtctccactccctcgcgcgcaacctgttcgatgaaatgccggctagggacaccgtctcgttcaacactctgatcagttcatatgtgcattcctgttgtagtagcgatgcattcgaggtattcaggattatggtggacagcgggttacggccggatgggtggaccgtcacggcgttgattggtgcatgcgctgagctgcaggacttaagggcagcaaaagcagtgcatggggttgccaggaggatgctagagccacgagtgtttcattcaggagaggtggcaaccagtttggtggatgcatatgtgaagtgcagaagcatggagcttgccaggcaggtgtttgatttggcaggggataatgcaaggaatgcgaggttatggacaaccatggtgtcagggtatgcaagagctcaggagtttgacatagctcaaagattatttcatgagatgcctgagaaggatacggtcgcgtggactgctttgataggtggctttgtccgggcagggaggtacaaggaggcagtggtgttgtttgaggagatggaagaggcagggtttgaggcagatgaagccacaatagttacagtgctttcagcttgtgttggttatggtaacatcgatctggcaaagaggcttcattgtcttgtggggcgtgatggtctgattaacagaaatgcaaagcttgctactacttttgtggacatgtatgcaaagcatgggtgcatacagacagctcaggaagtgttttctggtgttgatgatgattttaagacattggagttgttcaatgctatgataaatggacttgctcggtgtaaatttggcgagaaagccattgcactttttgatgaaatggggtcacttgggctccatcctgataagataacgtttgtgtgcgtcttgtctgcatgcagacacagcggcttggtatctcaagggtttcatatatttgattcaatggaggagaagtatggtgtcaaaccagagattgagcactacacttgcatggctgatcttcttgcaagggatggacaacttgacgatgcgtacatttttatccagaacatgcctttcaaagcaaattctgttgtgtggtcatctcttgtgagagcatgtatgctccacggaaatattaagatcagaaagcttgcagaggagcaacttctttggcttgatcccaactacaagcctgaaaatctccccttgtcaaacttattttctgagggaaaaagaaaagagcgaactgcaaggctgatctttacaggacgcggtatgagtggggataatactgttcaccacatagagatggttgccgtagcatttgggttcattttcaacaaagatatatggctgaataacagggcaacctccatgaaatggaaacaagaggcatgcccttgcatggacaatggtgatgcatttgcagatcttgtgaacactggcagtgcgttctctagctgtggtttgccttttgtatacatggtgcacgcggaaactaagtttgtgctcagttcagtaaaaagatccagaagtccccaggttaatctgataacagaagtcatggcttctgaaattactgcacagcagcccagaagaaaaaaaaaggtcgcaggagaattttcagggctatgttcttcctggcaagaacgttgcaaggctaatgggttaaagacttctgtattcagcgttgacatacactgcaagtgcaatggctgcatcaagaagatcaatgatggtatgaaaaggatcagcctttcagaagtggtgcatatcttctgcttgcatttcattgatgagttatctaagtttagaccttggtatcacttattcactgatgaaggggtggagtgggctgatctgatgatggataaaagcagaggtggaagtggtcgggactacggatccagagaagctatgctgtctgttgcgtga

SEQ ID NO: 37045 - DNA, 1850 bp, Oryza sativa
  Clone ID: PAT_MRT4530_40810C.1
aaaacaaaaaaaaaaaaagaaaaatcagaatcgaattttgccctcagaacgaaacgcctcgtctccccttccaggcgattagggtttcgcccatcttccggaggcgcgcctcgccgccgccaccgcggcgatcccgctccgtcccctgcaaccgacctcccgctcgaccagggccgtcaagccttcatccacgcgcgagcggcgtcgcgtaggcggggggtccgagcgagcgctgagcgaggcgtccggaggggatcgatccatcccgctctagggttcgcgagcgtctcgcgtgtttgcattcgctgaaagatggagatacaaacttcagggaagcccattgatctgctgatggagaaggttctttgtatgaacattatgtcttctgattacttcaaggagctctacaggctgaagacctatcatgaggtcattgatgaaatatacaatcaagttgatcatgtggagccttggatgactggcaattgcaggggcccctccactgcattctgtctcctctacaagttcttcaccatgaagcttactgtcaaacagatgcatggtttgttgaagcatcctgattccccatacattagagctatagggttcttgtatcttcgatatgttgcagatccgaagatcttgtggacgtggtatgagccctacttgaaggatgatgaggaattctcccctggatctaatggtcgcatgacaaccatgggtgtttatgtgcgtgatcttatacttggacagtactacttcgatagtcttcttccaagagttcctcttccagtaattcgtcaagtgacatccaatcttgagaagatgaagttgcccactaagctttctgggattactggagagtctaatcgtcatggatcagaagatactgcccgccggcctccttccgtgaaggcttctctgtcagtttcctttggacagcgtgctccgcatcgtgcatccacacgggagtcatctccagttcggaggacagtcacccatgatggccatcgtaaatcttcctcaccatctcgccgtagcggaagccgcgaggttcctgatcgtgatcgatcaagccgtgaccgttctagtcgtgactatgaccgttcaagccatgaccgtgatcgtgaccattccagtcgtgactatgaccgtccaagccatgaccgtgaccgtgatcgtgaccgttccagtcgtgactatgaccgttcaagtcgtgaccgggatcatgatagagacatcagagactatcatcggcgtgatcgtgacagcagggaccgtgactataggtctaggcattcatccgaaagacaagatgaccgaagggaccgtgaccgtgagggtagcaggcacagacggtccagctctcggcacagaagcagaagccgcagccgcagccgcagccgcagcagaagcaggagccgcagcagaaatgaggagagatccagtccttttggcaatgcaggcaaagaaaagactgctgccatctcgagcaacctagcaaagctcaaggacttgtatggtgatgtaactgagaagaaggacgacggtgaagcccctcgccgtgattcgtgcgcggaggaggttatcaggttgggtggcccgagatggagatagaatttgtgactgtaaccctgttgttcctcaaagaacctgatatgttgtcagtacaccttttctttcatctgccagtttctcaagaaacttgttaatacttggcatctcaaaacaccttactataatatgtcaacaatggtagtttgtatggtatggatggatgacattgatacatgttggttccctatgttttagtattataccgaactgttacttaaaaaaaaaaaaaaaaa

SEQ ID NO: 37046 - DNA, 292 bp, Oryza sativa
  Clone ID: PAT_MRT4530_40811C.1
attaccttggaggcttctgagctcgaachmcccgcygycgccgccgtcgcctcctccatccgccgccatgaccttcaagcgscgcaatggcgsccgcaacaagcacggtcgsbggccacgtccaagtacatcckctgctccaactgcgccaagtgctgccccaaggaccaggcgatcaagaaggtttcamgtgkargracmtcgtgghrcmrgccggccmtcagggaccttccargwrgcgctaccttcmccvtgggatacvcttcyyccccmarcttttacacccmaagtg

SEQ ID NO: 37047 - DNA, 1215 bp, Oryza sativa
  Clone ID: PAT_MRT4530_40812C.1
gcacgagggcaactgtgccaaacacgggccacccggtctctttccaccacggtgccctgtgtccgtccgagcgcgccgagtcgagccggctccggggagcggagcggcgagatggcggcgaccggggacagcagcggcgccctcgtctgcgtgacgggcggcagcggcttcatcggctcgtggctcgtccgcctcctcctcgaccgcggctacaccgtccacgccaccgtcaagaacctccaggacgacggcgagacgaggcacctgcaggctctggacggcgccgacacgcggctccggctgttccagatggacctcctcgacccggcctccatcacgccggcggtggacggcgcccacggcgtcttccacctggcttcccctctcacacttcacccgactcaagaccccgagggtgagctgctgaagccagcggtgagtggcactctcaacgtcctccgtgccgcgaaggactgcggtgtcgcccgtgtaatgctgatggcgtcgcaggttgccatagtgcccaatcctgagtggcctgctgataaggtcatcgacgacgacagctgggccgacgtcgagctcctcaagaaacatcagcattggtacaacgtatctaaaacgctggcagagaaggctgcctgggacttcgccgcaaaggaaggcttgcagctggtcgccctcaatccaggcttggtattgggcccaatgttgatgccatcccctacttctagtctccatatgctgcttcagattctcggaggccagaggtttgacatcgatgacttctacattggctgtgtcgatgtcagagatgtggcacagtccgcggtagtgatctatgagaacacatcggcacagggacgccacttatgcatcgagtccatagagcgtctgattgatttccatgataaacttgctgagctttaccctgaattcccgatccacagaatccaggaggataaacaagggtgggtggtgagatcaaaggctgcctcgaagaagctaattgatcttggtgtgcatttcattccgttcgaaaaaaccatcagggactctgtggattgcttgagaagcaaaggttatatataagcctgtgaacatatatttcgtactcaggttcagaaactgctgtatttcaggtttcacggttgaataaactgtcggaatgcgtaggcatttcctccccatcaataatacactttttttaacttc

SEQ ID NO: 37048 - DNA, 953 bp, Oryza sativa
  Clone ID: PAT_MRT4530_40813C.1
cacggtcattaagttaattagccagtatcattacatgacattttggtcatttctcatcaaaaagcttaaaatgcccttaacatgcgtgcccgtgtagagtggcttctataaatagacaagctaagctggctagctggggggagaacaagaagtgcataagtgacacactgattaattaagcaaaaaacagtagtagcttaatttgctaccatgtcgatgatcactagcatgctggggcggaagcagaacgcgcagcagaagggcggaggcggcggcgggcgcaccggcggtggcggcggcggcgagatcgagccggtgagcgtggacatcatggagccgttcatggacgcgatctcgctgacggcgttcgcggcggcgccgtcggcggcggcggcggcggcgggcgtgccgtcgacggcgagcatggactggaaggagacggcggcggcgcacgtgttcatggcggacatgcccggggtgcggagggaggaggtgcgggtggaggtggaggaggagaaggtgctcaggatcagcgggcagcgggcgcgcgccgcggaggagaagggcgagcggtggcaccgcgtcgagcggagctccgagcggttcgttcgcaccgtccgcctgccgcccaacgccaacaccgacggcgtccacgccgcgctcgacaacggcgtcctcaccatcaccatccccaaggacaacgacaggaagcctcacgccaggatcatccccatcaccaattaaactaactattaattactagctaatattccacagcttaattatcgagtaattatattagtactgttaattaataataattactactcctactactaataataagaagcatcatgcagcgtgtatgattgcattatatgcatggaatagatgtgtaaacaactcaccagtttgcttggtgaaagctgtggcataatgcattggaggaatat

SEQ ID NO: 37049 - DNA, 363 bp, Oryza sativa
  Clone ID: PAT_MRT4530_40814C.1
atgaagttaagcatgaaacgactctcgtacaaccgtatttctcgtatgggtatagacctagcggagtacatagccgagcgaaggcagtatccctgcatagtggttattcttgatgtgtgtgaggcagggcctacggtggggcagccattggtgggaccgcgaggggcgagtgcttacagtggtgtcgccatcgtggatggcaatgaagtcgaggaggatccctatgcttatcttcaggaggatgcggaggataacgacgcttccgtaaaacggcctgaaagtgctcacaagaccgatgactgtgaagacgttcagcatgaagaataccaggtggtcgcctgcaaaaacagagagcaggtttaa

SEQ ID NO: 37050 - DNA, 3006 bp, Oryza sativa
  Clone ID: PAT_MRT4530_40815C.1
atcccccgggctgcaggaatcggcacgaggcgagaagatcaactcaagttaaccaacctggcactagcagtggaaggcacccgatgtgccccttgactgccctccccccccttgggccgctgccaccaaataactagggttggagggagtccagtccaccaccaccaggcgcgcctccagtgctccctgctgtccacgccggcgccgcgcctccccaccgtccccgccgccgtccgctccgtccccaccgtccaagccgccaagccgggggccgcgacggagcgactcctcgggtcgccgcctcgccggttgcgggttgccggcttggtggcttggcgcggcgccttctccagttctcttgcttggcaactgatccggcgctccaccattcaaccgacccctgttgaggtaaggtgaggtgaggtgaggtgaggatggcgatgatgaaccggacgcgggatctgctgatggaggggttcgagggcctcgtgcgggagggctccttcagctgggccctcccccgccgcggggcttcgccggtggacgacgccgatgaccccgacagctcctcctcctcctcctccggcaagcagccctccatctccggcctctcccccaaggccaacgccgtcgtctctcgctgctcccgggtacttggtacttccacggatgagctgcagtatgactttgatatgcaagcatctgattccataaagcagccaagaaattatgcaagaaattttttggaatattgttgtttgagggcacttgcacatgcctcacaagttgcagggtatctttctgacaaaagctttcgtcgcctaaattttgatatgatgctagcttgggaagttccctcttcttcaagcgagctcactgttaaggttgaagtagacaacacagtcagtttagaggctttttcaagaatagcacctgcaattccaacaatcactgatgtggtaacatgttcaaatctatttgatgtactttcatcttcaagtggaggccggcttacatttcctgtatatgataagtaccttacaggattggacagagcaattaagaaaatgaaaggacaatctgagtcctcgcttttatctgcccagcggtctcagagaggagaaaggattgtagaagtagatggaacattgacgactcaaccagtacttgaacatgttgggatttcgacatggccaggaaggttaacacttactgatcatgctctttacttcgaagcacttcgggttgtgacctatgataagcctaaagcttatgagcttgccgaagatctaaagcagtctgttaaacctgagctgactggtccatggggctcacggctatttgacaaagctgttatgtataaatcaacaactttaacagaaccagtgatcatagaatttccagagttggctggccactttcgtcgtgactattggctggccatcatatcagaaattctctatgtccacagatttgttaggaagtttgacataagtggagttgacaaagaggaaacaattttgaaggctgtactaagcattatgcggctacaagctattgaagagttagccattccagtttctaatcgattcgagtctcttttgatgtttaatctatgtgacaaacttcccggaggtgatgtaatacttgaaacactagctggttctatatcatcgagaagatcaactcaagttaaccaacctggcactagcagtggaaggcattcaatgtccccctttactgttctgtcgaatcttggagtggtatcaccaattaataaaggtgagagactctttgttggcgagatagttgttggggaaatgagtgccttgcagaaggtagttaatgagtcaatgaacaactataagaaggttgaattggcccaagccacagttgatggagtcaaagttgatggcctggatacaaacttggcagtgatgaagaaattaatcagcaattctttgtttgtgaccattcaccatatgttgtttttagacttcactgagatccttattccaatagaatttattcgcttatggaaatttgaaggtataaacatgttcaatgcaaatcccgttgggtcaacatttggtccaacttttcaaactttgatcatcaattatttctcaatgcttagtttaaaaaggaaaaaaatggaattgctatctcccgtaagtgagctatggaggtttttggtgttgctggcatcttgggatgagccaattaagtccatggtattttgcttttcatcgtcttatatcattatcagtatttttaggaaattcttggctatcataacttgcatttgcacttgcactcatccacaaagtactgatgaggcttttcctagcttgaggaagccaatatcaaattgcctttttcagtacaatgagctccatgtcttaagggggtggttagtctattttcttgttttggtgctcttgttttcggcagctttcatgttccttacaagactaactagccatggaaaaccaatgacggaggtcaaagtgacatctccacctccaatgaacacaatggagcagctcttagctgttcaaaatgctatttccaaagttgaagagcttgttcaggatgcaaatattgttcttctgaagattagagctttattgttggcttttccctcccaggctactgatagagctatacttgccttggtagtgatggctctgagccttgcattcgtgcccacaaggttgcttgtcctgatgatgtttctggaggcattcacgaaccactccccaccaaggagagcaagcacagaaaggtggaccagaaggttaagagagtggtggttcagcattcctgcagctccagtagtcgtggagaaggataaagaagacaagaaaacaaaataaaagatatatatgtatattcaatgtaattatgtgccatgtttggccgatgggttggggtggatcaccaacgcccgtcttgtacagtagcagctagtatttttcaataaaaatgcgagttctcacctag

SEQ ID NO: 37051 - DNA, 213 bp, Oryza sativa
  Clone ID: PAT_MRT4530_40816C.1
atggggaaaaacaacgtgtgctggacagaagcgctagctaccgcaggcgcgtgcgccaacaatggagctgacacccaccgcaccagcctctgccgacagtggcttccttccatcgctgaccgcgtcgcgtcggcctcctgccgaccatcacgtggcatggacactgacctcctgctccgtgcatcgtcgtccgctgccgaccgcccgccgtag

SEQ ID NO: 37052 - DNA, 306 bp, Oryza sativa
  Clone ID: PAT_MRT4530_40817C.1
atggtgccagggctcgtgcccccgccgcagatgtacagggcaaagccgatgcaggcggcggcggagccgatgcaggcggcggcggagccgacgcgggtgtctctcatctcttcggcggaggggcttgacccggcggcgacgctcctaccagcggcggtggcgagcacacgtggaggattcattccaaaaggatgtgcgaagtccattgttggcatgcgatctggtgaggatctcgagctggggcatgagcttagatatagaatgccaatgaggtccaagcttgctgagctcaacgagcgattttag

SEQ ID NO: 37053 - DNA, 2166 bp, Oryza sativa
  Clone ID: PAT_MRT4530_40818C.1
atggcgatgatgaaccggacgcgggatctgctgatggaggggttcgagggcctcgtgcgggagggctccttcacctggggcctcccccgccgcggggcttcgccggtgggcgacggcgatgaccccgacagctcgtcctcctccggcaagcaggcctccgtctccggcctctcccccaaggccaacgccgtcgtctctcgatgcgcccgggtacttggtacttccacggatgagcttcgatatgactttgatatgcaagcatctgattccataaagcagcaaataaattatgcaagaaattttttggaatattgttgtttgagggcacttgcacaggcctcacaaattgcagggtatctttctgacaaaagctttcgtcgcctgaattttgatatgatgctagcttgggaggttccctcttcttcaagccagctcactgttaaggttgaagtagagagcacagtcagtttagaggctttttcaagaatagcacctgcaattccaacaatcactgatgtggtaacatgttcaaatctatttgatgtactttcatcatcaagtggaggccggcttacatttccagtatatgataagtaccttacaggattggacagagcgattaagaaaatgaaaggacaatccgagtcctcgctattatctggccagcggtctcagagaggagaaaggattgtagaaatagatggaacattgacgactcaaccagtacttgaacatgttaggatttcgacatggccaggaaggttaacacttactgatcatgctctttacttcgaagcacttcgggttgtgacctatgataagcctaaagcttatgagcttgctgaagatctaaagcagtctgttaaacctgagctgactggtccatggggctcacggctatttgacaaagctgttatgtataaatcagcaactttaacagaaccagtgatcttagaatttccagagttggctggccactttcgtcgtgactattggctggccattatatcagaaattctttgtgtccacagatttgttaggaagtttgacataagtggaattgacaaagaggaaacaattttgaaagctgtactaagcattctgcggctacaagctattgaagagttagccattccagtttctaatcgattcgagtctcttttgatgtttaatctatgtgacaaacttcctggaggtgatgtaatacttgaaacactagctggttctatatcattgagaagatcagctcaagttaaccaacctggcattagcagtgcaaggcattcaatgtccccatttactgttctgtcgaatcttggagtggtatcaccaattaataagggtgagagactctttgttggcgagatagttgttggggaaatgagtgccttgcagaaggtagttactgagtcaatgaacaactataagaaggttgaattggcccaagccacagttgatggagtcaaagttgatggcctagatacaaacttggcagtgatgaaggaattgctatctcccgtaagtgagctatggaggtttttggtgttgctggcatcttgggatgagccgattaagtccatggtattttgcttttcatcgtcttatatcattatcagggggtggttagtctattttcttgttttggtgctcttgttttcggcaactttcatgttctttacaagactaactagccatgtaaatccaatgatggaggtcaaagtgacatctccacctccaatgaacacgatggagcagctcttagctgttcaaaatgctatttccaaagttgaagagcttgttcaggatgcaaatattgttcttctgaagattagagctttattgttggcttctccctcccagttctatagaaacgagtggatatgcttctgtgtttatgttacttttgagttccatttgattttttttcccttagataaggccactgataaaactatacttgcgttggtagtgatggctctgagccttgcaatcgtgcccacaaggttgcttgtcctgatgatgtttctagaggtattcacgaaccactccccacctaggagagcaagcacagaaaggtggaccagaaggttaagagagtggtggttcagcattcctgcagctccagtagtcgtggagaaggataaagaagacaagaaaacaaaataa

SEQ ID NO: 37054 - DNA, 455 bp, Oryza sativa
  Clone ID: PAT_MRT4530_40819C.1
cttcccggaggctgatgtaatacttgaaacactagctggttctatatcatcgagaagatcaactcagttaaccaacctggcactagcagtggaaggcattcaatgtccccctttactgttctgtcgaatcttggagtggtatcaccaattaataaaggtgagagactctttgttggcgagatagttgttggggaaatgagtgccttgcagaaggtagttaatgagtcaatgaacaactataagaaggttgaattggcccaagccacagttgatggagtcaaagttgatggcctggatacaaacttggcagtgatgaagaaattaatcagcaattctttgtttgtgaccattcaccatatgttgtttttagacttcactgagatccttattccaatgtaatatttttgctgaagtatttctgttggagaaatttgcctgatcatacctatattttc

SEQ ID NO: 37055 - DNA, 1660 bp, Oryza sativa
  Clone ID: PAT_MRT4530_4081C.1
atggatgaagtcgggggtcgatggacattctccagggcaaatgaaggctacacgagctgcggcccggtagtcgagatgtcatggcagagggttggtgccctgctgctaggggctcagtctcgcctgcctgtcccgggggttccggccgtaggcgggattgggtcgatgtacacctctgatcagagtataatctattcgaatagccgcgccctcggttatgggcaagccgagcaatgtacccaagtcagtgtttcaattcttaaaatttgctcaacaactaaaatgtggagtggttggcctgggttggcttgggacgagctgggacccagggtcgggttgccagttcggtctgaatcatcgtaggccttgggttaaggcaggccttaagtgcctttgtaataatatgtttaacagagaaaaaggaaagaatgtcagcgggtatgcctcaagtaactcaagttttcaactcaatccaccactggcctcaagagagttaaccagggcacacccttggtccattccaagcatgctgcttagttcacagctaccattggttggaagtcaagaccaaaatcaatatgtgtttgatcgagcatttgccacccaggtcaatgagcttccaatgccagaagaggatgtccccttttgtcatgattgcagagagcaaggacactatgccctgaattgtccatgggtatatgtcaaagaagccccttcccttggtttagcagggcagacatcgctaaaccagcctcctcacaccaagtcaagcttgcagcctagtgtgcaaagtagagagctcaacggagagaatccattgaatcccgggaaatgctttcctcctagcctctcgtaccacgtggggtcacatactaagcaagccaaaggcaagaagagtaagaatcagaagagaaaagcaccgatgcgaactgaagcagaagtacgtaagatgactattaccagcaccgaatggcctccagcagggataactattcctagacgtcaaagaggaaatactttccgaggtgcacaacagttgacccagcacctcctaagccatgatggcagagtatctgatagtgaagggtcagatcaagtctcctcggattatgaagatgagtctccccgacatctcggcgaggaagagatggaatcaaaggcatgcacccgttgcggggaaattggacacgttgctagcatgtgtctcacactctgcactcattgtgaagaagaccatccaccaggggagtgtctcacccgcaaggtcacatgttttctgtgcgaaggtgcaaaccatgtgcccaaggattgccaactcagtgtgttgttgaccaagaccgtagaaatccaacgaacaaccctacgattgtctcatcagctagtcagctccaacagcaacatcgacgatatcatccccagcaccaatgctcctcctgctgcacctgactttgcaataaatcatagcgataataccttcaacaccaaccattctctgcaccgacagcctcagcaaagaattgtcgtcgatgaaagaagttgtgtctctccccgacctactccaggccaagcaaagggcaatcaacctccggagggcgataccgagcagaagaccgttattcgcctcaaccagcaatcagaaggaaacttctccggtgaataa

SEQ ID NO: 37056 - DNA, 279 bp, Oryza sativa
  Clone ID: PAT_MRT4530_40820C.1
atggagccagccacctcggaggcggatctgcctcccccctcagccccccccacacaccccgcaaccagatcgggagaggacggcgaagttcgcggcgacggcagcacagtggagtcgcggggcggcccgagaaagtgcggtcgtggccggcgaagggggatgcacgacgcggccggtggcaaggccgacgcgttcggggtcactgcgctgtgggagagggagctagcaagctgcggaggcgtcatggctgtggaggagaccggtggcagggccagctag

SEQ ID NO: 37057 - DNA, 653 bp, Oryza sativa
  Clone ID: PAT_MRT4530_40821C.1
tattcactgcaaatcccattgtgacaagatttggtccaacttttcaaactttgatcatcagttatttctcaatgcttagtttaaaaaggaaaaaaatggaattgctatctcccgtaagtgagctatggaggtttttggtgttgctggcatcttgggatgagccgattaagtccatggtattttgcttttcatcgtcttatatcattatcaggtatgctaaactcacatggatattttctttttgactttattctgcatgatgcttttttaactgtggtacactattgtgatttttttttataattttgtgcaacttactaatataatgcaatataaatatatatcactagctcctttggaggggtggttagtctattttcttgttttggtgctcttgttttcggcaactttcatgttctttacaagactaactagccatgtaaatccaatgatggaggtcaaagtgacatctccacctccaatgaacacgatggagcagctcttagctgttcaaaatgctatttccaaagttgaagagcttgttcaggatgcaaatattgttcttctgaagattagagctttattgttggcttctccctcccaggtaactatgcatgcaagcttgagtattctatagtgtcacctaaatagct

SEQ ID NO: 37058 - DNA, 292 bp, Oryza sativa
  Clone ID: PAT_MRT4530_40822C.1
cccacgcgtacgtatacgcgtacgctcacgcgtccgcatactgaagaggaaatgctacatatacagctgtagcgattgcatgatcgagcatcagtggatggcgaggtcaactatttcgcggctgcgctcatggcggtcatggtggccatgctaacggcgtcgcaatgcaacagtctttatgatgttaagaacaggcagtccagcgataggagcatagacagtccgatagacacgtgcctgccagtgctaaaccgatagctgaccagacctgagaggttccagccgatgctgc

SEQ ID NO: 37059 - DNA, 625 bp, Oryza sativa
  Clone ID: PAT_MRT4530_40823C.1
ggcaagaaccttgctcacagtaaagatattattatgaactggttaagtaatccatattaggtacagaacctttgcccacattcatcatgcatgcaaacattattttaataaaagaaaagacatgtatatataggctatataaactttgcatgcatacagaacacagcatgaaaaagataacgtttctacttcatgagatagcaactatattgtattctgtaaaacatccaggcattgcaatggagcattgtataacagaagacttaagcataatgagaaacgttgaacagattaactttcatgccacctaaattagagattgtcgcattacactgctacttgtaaagataatgacaaagatacatgcagatagccaccatacaggtcagcacccaggtcacagatgaggcatgtaaactactgcaaagggacaggacatgcctaaaacctacacctaaaaggattctgcagtttgtaatctagagtacatacagacaattactcagaccaaacagctgcagagcaacctacaaagccaacaaattttagaatttcattgtcttttaccttatggtaacaaacttgtttgttccatgcttcgcccaaaagggttttaggtcaattg

SEQ ID NO: 37060 - DNA, 421 bp, Oryza sativa
  Clone ID: PAT_MRT4530_40824C.1
gttgttggggaaatgagtgccttgcagaaggtagttaatgagtcaatgaacaactataagaaggttgaattggcccaagccacagttgatggagtcaaagttgatggcctggatacaaacttggcagtgatgaaggaattgctatctcccgtaagtgagctatggaggtttttggtgttgctggcatcttgggatgagccaattaagtccatggtattttgcttttcatcgtcttatatcattatcagtatttttaggaaattcttggctatcataacttgcatttgcacttgcactcatccacaaagtactgatgaggcttttcctagcttggaggagtgtgttcctataacatttcacccctgttggagattactcgtctttgatcaagaagtctggatagcacaagctaaaaccaccc

SEQ ID NO: 37061 - DNA, 306 bp, Oryza sativa
  Clone ID: PAT_MRT4530_40825C.1
atgggcccacaaaaacaggagaatgccagatgtgcgggcacccgatgtagtgcgcatgcattgggcgctgctaccgcttgggcgcaccacgccgcctgttgtgccacccacgtctctcctacacgcgtcctcgtgctgccacgtgtccccaccacgcggcaccagagaggttggcaccgtcccatttgcgcgtccccccttcgcccgtcacagtcggcgcgcgtgacggccttggagccagacgaaaagcaggtcgagaccgctccaccgcgcatatccacgcaacgcaactggtacgtgctgcct

SEQ ID NO: 37062 - DNA, 273 bp, Oryza sativa
  Clone ID: PAT_MRT4530_40826C.1
gtgacactatagaatactcaagcttgcatgcctgcagcaatttcacaggccactgataaaactatacttgcgttggtagtgatggctctgagccttgcaatcgtgcccacaaggttgcttgtcctgatgatgtttctagaggtattcacgaaccactccccacctaggagagcaagcacagaaaggtggaccagaaggttaagagagtggtggttcagcattcctgcagctccagtagtcgtggagaaggataaagaagacaagaaaacaaaa

SEQ ID NO: 37063 - DNA, 346 bp, Oryza sativa
  Clone ID: PAT_MRT4530_40827C.1
attttcgttgtctcacgtgcgattaagaaaatgaaaggacaatttgagtccttgattttatctggccagcggtctcagagaggagaaaggattgtagaaatagatgaaacattgacgactcaaccagtacttgaacatgttaggatttcgacatggccaggtatgttaatacttactgatcatgctctttacttcgaagcacttcgggttgtgacctatgataagcctaaagcttatgagcttgctgaaaatctaaagtagtcggttaaacctgagctgacttgtccatggggctcacggctatttgacaaagctgttatgtataaatcaacaactttgtaagttc

SEQ ID NO: 37064 - DNA, 225 bp, Oryza sativa
  unsure (1)..(225): unsure at all n locations
  Clone ID: PAT_MRT4530_40828C.1
taccagctgatgagccctggagtgacgcccagcttttattacgactgcactatgaggggaactggtacgcctcgccggtgaccggtgcccggaatttcccggggcgacccacgcgtgccntggagaaaaaggtgttgagtttcgttgactgcgtgctgtgatgctgctgcccataatgatgagattaatgaanccctggaagcttggaaatgatgacaccccccc

SEQ ID NO: 37065 - DNA, 367 bp, Oryza sativa
  Clone ID: PAT_MRT4530_40829C.1
tggttttttaaatattttggttttttatttttttttttttttttttttttttttttttttttttttttttttttgcaaaaacaaacaattttggtttgaaaaataaagccataacggggcccatgccttaaaatatccaaaaattaaaaacttaaaaagtccccaaaaccgactaattggggccaaaatttaatccaaaaaaaaactggtaccccaaattggaaaaaattttacaaaaagtcccggagggcttaaccccaaaccaaaattttaaaaagacccattcaaaaaatttgaaaagctcaaacaagaaaagccattcccttttttaaaaagccgcacaaaaaggttatcaaagcttggcaaa

SEQ ID NO: 37066 - DNA, 901 bp, Oryza sativa
  Clone ID: PAT_MRT4530_4082C.1
cggaatagcccgtgacgctccaaattaactcatcgtagccggcttgctcctggaagaactccacatcagcaggatccgcttcatcttcttcagcaaccggatcacccagcccgtggggatcagccacgtcgggagacctccaagctttcatgacaaggcatttccaaagccgacacaggctcaagatgttcaaaggtggcttgccttgctcgagatcttgagcttgatcctcgaaatccttggactgcgggtcttcggggcgcgcggaaaacgaattaagcatgccagctgcgacgacgattcagatggaagcgtcgccggcagaccattggtctccccgtcatcgccggcggtgcggttgccatgggatctggtttactccgcctcgatcgacgccgtctccggcctcgatctcgaccacccgacgctggacccggtgttcaacctcacagtccgcctctcctcgcagaaccaggtgaccaactacccaaactgcatctggcctggtacaaccgtggaggtcacctaccgcggcgtccagctcgccatcgggtccgtggagcagctctgcgtcggggcgcgggagacgaaggagcagcacgtcgtcgcgtggggcgccggcgtgcgcttgccgggctccgcgctggacgcgctcgcggcggacgcgcggcgcggggcggaggcgttcgacgtcgcggtgaagatcccgaccgtcatccacagtggctaccacagctacgacccccgccacgtccacctggggacgcttgtgtcgtgcatgtcgaggcgggtcggggacgaccccgtcgccgcgctgaggactccgtgccatgcgtccagtacggacatcgctgcgtcatacccaaacaaggggaggacgcagcctgggggtgccagttaa

SEQ ID NO: 37067 - DNA, 450 bp, Oryza sativa
  Clone ID: PAT_MRT4530_40830C.1
atggtggagcgccggatcagttgccaagcaagagaactggagaaggcgccgcgccaagccaccaagccggcaacccgcaaccggcgaggcggcgacccgaggagtcgctccgtcgcggcccccggcttggcggcttggacggtggggacggagcggacggcggcggggacggtggggaggcgcggcgccggcgtggacagcagggagcactggaggcgcgcctgcagccgcagcgccgcgcctccgccatccgccgtcgtctccgctgggcgcagccgcagcgccgcgcctccgtcgtcagccgtcgtctccgagggcgcaacgtcgccgccgtcgaatttgcgtcttctttctaggaaatctgaagagtaccatagtggcccatcaactatgtgggatgttgcaggagatagctttgagttatttgatggtggtgctaattttctttag

SEQ ID NO: 37068 - DNA, 380 bp, Oryza sativa
  Clone ID: PAT_MRT4530_40831C.1
atccccacaaagaatgacagttcagagtcttcaatgcgagtaagcgaaagatgttgtgtcattgaaggcatttgtgcaagagtatgggaaacattggaaagagcaccgaaacccatccagcgagataatatatacattccagaattgcaatttagcgcacgtacgttgccagttcaatattttcagatgaaagtttcgtattttgaattgaagtttttgtaattcaaaaaaaataaagttttaaggtcacagtcgaaagttttgtatggtttgagttaaaagttgcactgtttgagttgaaaaattcttgtgaaagtacaggtgtatgttagaaacacatgttcggtaattagcaatccatttctctctgattatggatt

SEQ ID NO: 37069 - DNA, 190 bp, Oryza sativa
  unsure (1)..(190): unsure at all n locations
  Clone ID: PAT_MRT4530_40832C.1
cgaatcgggttagttatgtgggtaaagaggtacgtacaaacgtagtcgttggggtgaggaantangtggtgaaagcaaagcgtccggcgtagtagtacacaccaagagtatgtatctagagcatatctgataaattcgtcgacaaataaaaaaaatggatggtattacgtaaaaaaaaaaaaaaaaaaaa

SEQ ID NO: 37070 - DNA, 539 bp, Oryza sativa
  Clone ID: PAT_MRT4530_40833C.1
gtattttcaaaacagagacggaaagggagaaactattggacggttcaagcgatgttgggggaccaagaatgaaaagcacccaagagatcctcaccaaatacaaatttggcggggatgctgctgcagctgcagctcatgcaaaagataagctcaaggaacggggcgagaaacttgctagaataagccaagaatccgccgaacttcagaacgagtcagagaattttgcctcccttgctcatcagatcgcaaaatccatggagaacaagaaatggtggaagccatgatccctggttgggctttctgccatcttttcatacgatcgccttccctatgctccttaccattttggcctacatggtttctgtggccataacttgtattacgttgagaccttgatggcctaaaccaccttgattaccaaccaaccgatgacagtaatgtgtagtaccacctttgagcttatcattttctttgaactactttgtactaccagctaacgcatagttaatgaaagcaaagcagagcaacgtgctttcact

SEQ ID NO: 37071 - DNA, 184 bp, Oryza sativa
  Clone ID: PAT_MRT4530_40834C.1
tctttccctgatcctgatcccacccctgacctgacctaacccaccacctcctcgtgctgcctgtgcccatccatcccacctggcctggcccaagtcaaccccctcgccccgccgggtcacgacctgtgatccccctcgcctcaatcccaccacccccatcacctgcctgcccctaaaccatgat

SEQ ID NO: 37072 - DNA, 299 bp, Oryza sativa
  Clone ID: PAT_MRT4530_40835C.1
atttcaacgataaatcaatcggacgatgtcgagagatagacttatgtatgaatggaccaagaactcagaattgacacaacacaatgggccaaaattcaaagtctacggagaagaacaacagaggaggccaccttctgaatatgggccaggttgggccggcccctggttcggccgaaccaggaggttgggccgaacctcccgtggcgccgatgggtgcagggtttggatggacggctgggattgacccccaatggcggttgaagggtattaccgaccattccaactgtcacaaccatcat

SEQ ID NO: 37073 - DNA, 420 bp, Oryza sativa
  Clone ID: PAT_MRT4530_40836C.1
atggtcgaggacgcgcatggggcgccgcagagtggtcgtggacgcacgggaggggcgtcgtggactaagggaaggcctccgagacggtcgcggcgcgagaacagcgtagagggagaattgccggagcagcacacagttgctggagaagagcgaagtgtagtcgaggaagatacggcgacgctggcgatgaatcatcttggagatgcggcggcgatgctcgaagtcgatgaagaagaccctgagcggccgacgatgaccactccatgtcgatgtagcggcaagaagtccactggtgatgtagaaatgctgaggagggcgcctctcagcactgcaacaaccagtggaggtgtggaccacaggcagcggcactgcgacccgaggggggcgaacgcagcggcaccccaaagcttgatggcgtag

SEQ ID NO: 37074 - DNA, 756 bp, Oryza sativa
  Clone ID: PAT_MRT4530_40837C.1
atgtccagtcgcctgttatgcgaacagaggaacaagtactggcagcctagcaatgctggcatcttcgttgcttcgcatcacagcggcaggcggcagtggttcctctggtcaaacggggcagatcaaggatttggagccatcggggaatgtttgaaatttgaacgtcatcgagcacgcgtctacgccatcaagctttggggtgccgctgcgttcgcccccctcgggtcgcagtgccgctgcctgtggtccacacctccactggttgttgcagtgctgagaggcgccctcctcagcatttctacatcaccagtggacttcttgccgctacatcgacatggagctgtagctgtgttgtcctctcggaccgtagcttcgccgctttcgtcgtcttcatcgccgttcgcgcatcgacaacctcgtcgtccgcactggtcatcgtcggccgctcagggtcttcttcatcgacttcgagcatcgccgccgcatctccaagctgccactgtcgccactctaggccggtggtccagctacctctacatggctaccgacatcgccgtccaggccattggtcccgctacatcaccttctacttcgtccaacatgattcatcgccagcgtcgccgtatcttcctcgactacacttcgctcttctccagcaactgtgtgctgctccggcaattctccctctacgctgttctcgcgccgcgaccgtctcggaggccttccctgctagtctcctccgacattagcgtatga

SEQ ID NO: 37075 - DNA, 573 bp, Oryza sativa
  Clone ID: PAT_MRT4530_40838C.1
atggcgtcttcagctgcttccatgctcgacatggcgttgctacttgcagtttttgcctccatcctagcagcttgcaatgcgaaaagtttattgtcctatgtgaagagttgtgccgtgaaaaagttgaaattggtgtgcaagccattgccgaacgtacgactgcacctgtgtcgcccctatgggtcacgatgttgcccctcgtcgtcttcatcgccgttcgcgcttcgacaccctcgtcatccgcactggtcatcgtcagccgctcagggtcttcttcgtctacttcgagcatcgtcgccgcatctccaagctgccaccgtcgccgctctaggccggtggtccagctacctctacatggttactgacgtcgccatccaggccgttggtcccactacttcgccttcgtcttcgtccagcatgattcatcgccagtgtcaccgtatcttcctcgactacacttcgctcttctccggcaactacgtgctactccggcaattctccctctacgtcgttctcgcgccgcgaccgtcccggaggccttctctgctagtctcctccgacattggcgtatga

SEQ ID NO: 37076 - DNA, 5871 bp, Oryza sativa
  Clone ID: PAT_MRT4530_40839C.1
atggggaagcacaagggccgagctgccagcagcggcttggcggcgtcgctgctgccgcatgcgcagggtgccgtccccatcgttggtttcgggggttaccatggcgcctcccgtgttgagcccgccgcgccttcgtcctcgaccgaccccgatgcctcgattctcctccctcccgatgtggacagtgaggtgctgcagcacctaaggagattaggaaggaaggatccaacaacaaaactcaaggcattatctacgctctctatccggtttgcacaacaacatagtcaggaggttttgcaaattgcatcacaatgggcattcgagtaaatgaggctgctgcttgattataaaaatgaaattcgtcgtgctactcgcgataacatgcctggcctcgactgaactgtcaatgggggtgctgatccgcatgttaaggtttttatgtgtcctagctggttttctcagtgtgaccctgttcttgaggctgcgtaagctgctcggcattcgtttgaggctgccttcccacaatcagataaaaggttggatgctttaatgttatgtgtgaaggaaacatttcttcacttgaacgagaatttgaagttaacaacacaagcattgtctgacaaggctacaccaatggatgaactagaagatatgcaccagaggggaggcattgaggcaggtcaggttactggcacagtatgtcacaagtcactgcaacaaccaagtgacgagcacaaacagttattcgttggatgggtaatatcatcatcattgttagcaatggcaactctgattgacattttgctaggtgtaaaattacaaaattgtgtccgtgacaattccagttctgaaaatacgagtctttcaaaagttctatctggcacattgtcttctgctgaatctgcattttctatgaataaatattttcttgatttcctcaagtcaaaaagtgcgattatacggtctgccacatactcactgcttgcaagttatatcaaacatgtttctcatgttttcaatgaagaagccatgaaggtactatctcctgctttacttggtgccttcaatgaaaaggacccatcatgtcactcctctatgtgggatgcatttcttgctttctctagaaggtttccagaggcttggtcatattgcaacattcacaaggttgttttcagccggttttggcactttctacaaaatggatgctatggatccaagcaagcctcataccctctcctggttcagtttttggagtctataccatctaaagctgtaactacagagcaatttgtttttgacttcttacataatctctgggctggaagaaaccagaggcaattatcagctgctgacagtttggcattctttactacctttaaacagagtttcttgtggcttctaaaagttctaccgagacattctggaggaggttcttcggatgatattcctatcaagctcataacttactttcttgcaaaagttgtttggcatgattaccttcgaataccatcttccaaaaaccaggatattagtttgagtggattgtctgatgaagcaatcagtggtgattgtcagttatctcataaggagtcactgttggcatcaagcacacgctacccaacttattatcttcaggatttggggaaatgcatcattgaaatattggatgagatttcagctatggaaaatcatttgttaaatattgcttgtgagactctattgaaggactgtttggatataatccatcaaagggagagtttgccaaattttcagtatcatgtggaacaagttgtgtccttttttatttcgttggatcagctcattgtacagaaaggtaaaacatggccattggaaagcttagcaagaccactgaatgaacaatctgtgccagctatcaagtctatgatccagaaggacactccaattgttgttaaacttctatcagttttggttgaaatattcaggcctgtccctttgttcttgaagaattcacagaaagagagtgaggaatctgtccaagatgagtgcttctttgaccagtggtgtacgattattaaatatactagtgctaagcaaaagcaccctgttgataataagaactcacacgttgatgaccaatttgaattgctgacacttatacttcaaaaggtaagagaaagaattgctgggggcaagttgagaaatttgcagaaaaatggctctctaccagaacattggcggcatgacctattagattctgctgcagaatctgtcttctgtgatttgcctgctacagattcccatgtccattatgtatgtgctgcacttggtggctcagatcaagatgaccaaatttgttttctttctgctgatactgtccacaaaatgctcgggtccattttgaagtgtttgacatcagtactcatgacatcaacttttgagtgggcaaggtttgcatatgtggtgttattgcctactgaaccaaaggactcgaaggttataggagcacaatccttttcatcaaacattaagatggctcattttgctttcaaagttcttgagggtagcttatttgccctgagaagactagaggaagattctttatttccttctgttctggcagctctgtttatcattgaatgggaatatagcatggccttaacactcgatgaagaacatgacttgaaaggttataaagaagatattgatgttgggtcttctgcatgcaacagttcagatgatcatttggatgagggaatacatttgaaagctaaccttgcagagagtatacataccttttgccaaagcttaagtccatccttttggagtgatcttcatccattcaccttgaataatttgttaaatattttagctcaatctgtcaggtgtgctttatttcagacactagagttgccaactgagagcacatcagtcttatgctcagagtggatggtgaacatgttgaagctcatctctcttgatcacacaaaattgcagagttttttttatcttcttttatctgagggagaatattggccactctgggtgaaaccatctttacaaaatgagaatgcaccagtgaagatcaaatttgagccagttattacaaatgaaacgggactgaaacaccatcaatttgttgcttttgttgacaagcttgttcttaaccttggctttggtgaagtgatcttaggtgttccaggaaatacatgttacaacacatcacaatcaattgatactacttcaactgttccttcattgtctagagcatgggttgctgctgagattctttgcacttggaaatggaaaggggggagtgtattcagcacattcttgccttctatgattcagcacttgaaaatggaatcatgtgcagaggtcagcatattgtccatattgcttgacacattgttggaaggagcttttcatgagtgtaaccagtgggtactgttcaatgcttggcacatttctgacaatgagattgagaaaattcaagatcattttctacgtgctcttgtggctttgctatttagtatcaatagcatcaatgagtgtatttggagagaatccgaggcacttgtattttttgagaaactactgagcaatctttttattggttccacagtaaatagaaaatgtgtaaagactcttccctttgtcatgagtacaatcatcaaaccgttgtcaggcaaactgaaattaaatgaagcttcttgttacactgatttggtggggcaaaacatactgagttggcttgatgtagccatctcttgcctatcatccagcccgagggaagtacttcaacaagacattgttgattggatgcaagtggtgttgtcttgcttcccgttgaatataacatgtggaacccagaaactagaagttaagattgaacgagagatcagtgatacagaaagatcattattgctgactctttttcagaagtacaagattttctgtgccattgaagctccgtcgctgtccaccagtggaactaccctgtcaacaatggttgaactattgggggtgaaactgatagcagttatggttggctattgctggacagaacttcaggaaaatgatttgcattttgtgtttcatacagtacagaagtggattgaatcagctgttttgcttgtggaagaaatgacagatgccatcaatgatgctgtaataaaccagaaatcaaatgaagatactttggagaagcttaaattagtggttagctctatagatgagttaactttaagcttcggtgaattcgctttggttacactgtgtcacctcaaccatctcgtggatatccaagaaacggagaacttccagagtttgcaaattattaaatcaggggattttgctgatagaaataacaatatgatggaaagtatgcttcgtttgttcttggcttctggtgtttcagaggcaattgcaaagtcttcttgtgaagaggcttcatccatcatagcttccagtcgcgttgcttatatgcatttctgggaacttgtggcatcatttgtcatttatgcttcaccacagactagaagatgtgcactggagtcgatggaactgtgggggctcgcgaagggctcagtcagtgggctatattcaattttgttctcttcacagccaatctctcatctgcagtttgctgcttattctctacttctttctgaacccctctgtcaattttcactaataaaggagtgttctctgggatcaaatagaccactgactcaggaatcttgcatgggacaaagtattgagttgatgccagattcagagaagacactagatctgagagaagaactctcatcgttaattgagatgcctacttctgaacttctccagacagatctgttagcccatgatagggttgatgccttcattgcctggtcattgttgttgtcccacctgcaattactaccaccagcttccattactagggaaaggcatattcctttaaggactggtgcaccttgtggaaagaaaaaagatgctgaactcatgcctgaagcagaagttgctgcgcaagcttctaagaatgccataattacatgttcactgctcccatgcattgaatccctttggccagttgggacatggcaaatggcctcacttgcagggggactgtatgggatgatgattaggctgttgccttcctatgtgcgtacatggtttactagtttaagagatcgttcattgtcatcctcaatcgagtccttcactagagcatggtgcagtcctcctcttctacttgatgaattttctcaggtcaaggactctctgtatgctgatgataatttctcagttagtgttaaccgctcggcgtacgaaattgttgctacatacaagaaggaggagacaggaattgatcttgtcatacgcctcccgagctgttaccctctgcgccatgtggatgttgaatgtaccagaagtttgggcatcagtgaagtgaagtgcagaaaatggttgctttctctcacggcattcgtacgcaaccagaacggcgcaatagcagaggcgatccacacttggaaaagcaattttgacaaggagtttgagggggtggaggaatgcccaatctgttacagcattctgcacacgagcaaccacagccttccccggctggcttgcaagacgtgcaggcataagtttcatggtgcttgcctctacaagtggttctcaacatccaacaaatcaacgtgtcccttgtgccaaactcctttctagtccggctgtgctgcgctatgcctattttttttttgcaccgtagaaatttaaatttatactccgtagttattatgttttgtcttacaaatttaatgaaggttagataaaaatatgtagttcatgtgtctccgttgtcccgtaattcaaaatgcgataattatc

SEQ ID NO: 37077 - DNA, 465 bp, Oryza sativa
  Clone ID: PAT_MRT4530_4083C.1
atggcggctagtttgggagctttggattttgatcacctatcatactccatagatggaaaggagtggttcttgcttgaagagctgcagggacaaatcgccaagctagcggatttggacatggctgatgacaagcggagtcatgacagctttgggaagaggaggggaggaagggagcattgccgggggagcaagaggaggttgggtgcgccggtggctctggccgggttgcggcgccaagaggaggtcggcacggcgcttcggctagggaggcggatgggtgcagttcgggggctcaaatgggcagcgctctgctcatggctggcaagcatcgggcggctaaggccaagaagaggtggcgatagtaggcatggtggtacagcttgtattctaagggaggaagatggtgggaacaggcgcttttgtagcgagctcggccaagtgaggccagctgccctgttcggctga

SEQ ID NO: 37078 - DNA, 568 bp, Oryza sativa
  Clone ID: PAT_MRT4530_40840C.1
gttggctgccgtctcctccgctcctccgcatcctatggcagcctccccctccccatccctagcgcctccactcctgccacctcgtcgccagatccggccgcccccgtggtcaagggcgccagatgccgacgagctccgcagggaggaccggggggagggtaaggggttgtgttggcctcggttcggtgaggctgctcctcaccaaccatatcctcagcgctaccgggactgtgcgatccgattgtccgccccctcgccttcctaggatggttgcggtgcccccatgaggccctgacccaccgagtttcttcctctggtcatagactctccacggccgagttcatcatctacgttttcccttcctcttcctgttaaggtcactaggtcagtaaaattatcccaataccacagctgtagacaagactgaaccattgggtcgattctatatggggacatttcaaattgaatgtgtaataattcttgatagtaaatgttttatgtgttaaacgtatgtgcattatagttgcatgtcgcatactcacaaaacatgaagagatatatggattgt

SEQ ID NO: 37079 - DNA, 941 bp, Oryza sativa
  unsure (1)..(941): unsure at all n locations
  Clone ID: PAT_MRT4530_40841C.1
gcatttctgggaacttgtggcatcatttgtcatttatgcttcaccacagactagaagatgtgcactggagtcgatggaactgtgggggctcgcgaagggctcagtcagtgggctatattcaattttgttctcttcacagccaatctctcatctgcagtttgctgcttattctctacttctttctgaacccctctgtcaattttcactaataaaggagtgttctctgggatcaaatagaccactgactcaggaatcttgcatgggacaaagtattgagttgatgccagattcagagaagacactagatctgagagaagaactctcatcgttaattgagatgcctacttctgaacgcctccagacagatctgttagcccatgatagggttgatgccttcattgcctggtcattgttgttgtcccacctgcaattactaccaccagcttccattactagggaaagggtacttcaatatatacaagataagattagtccatgtatattggattgcattttccagcatattcctttaaggactggtgcaccttgtggaaagaaaaaagatgctgaactcatgcctgaagcagaagttgctgcgcaagcttctaagaatgccataattacatgttcactgctcccatgcattgaatccctttggccagttgggacatggcaaatggcctcacttgcagggggactgtatgggatgatgattaggctgttgccttcctatgtgcgtacatggtttactagtttaagagatcgttcattgtcatcctcaatcgagtccttcactagagcatggtgcagtcctcctcttctacttgatgaattttctcaggtcaaggactctctgtatgctgatgataatntctcagttagtgttaaccgctcggcgtaccaaattggtgctacatacaagaaggaggagacaggaattg

SEQ ID NO: 37080 - DNA, 132 bp, Oryza sativa
  Clone ID: PAT_MRT4530_40842C.1
atgatcttcaggttcaggagaattggcacgaacactggcagcacccacgacgtcatggtctacccgagaatcttcttgcactttgttgggaagacgacgagactgaagaagaatcaggaaatgggggaatag

SEQ ID NO: 37081 - DNA, 174 bp, Oryza sativa
  Clone ID: PAT_MRT4530_40843C.1
atggcctcctcatcaagctcccaatcagcggaacaacaacagtcggtggagaatgaggagggaggagggaaggagagtaaggcgcggccgcgacgactgggcatggaagaggagacgctgggggcagagatgaggaggcgacagcaggggctgggggtggatggcatggactag

SEQ ID NO: 37082 - DNA, 959 bp, Oryza sativa
  Clone ID: PAT_MRT4530_40844C.1
cccccctctcccccaacctccaccccctctccccgtcgccctccgccgccgccgccgccgccgccactcctacccccgcagccgccgccgcctcctcccgctcgtcgcgctccaagaagccgccgcactcctccgaccccaaccaatccaagaagccccggctgacgctgaccgtccccggccgccccctctccgccgacggcgaggtggccgcggccatccagcacctgcgcgccgccgacccggccctcgccaccgtcatcgacgcccacgaccccccggccttccagtgcccgcaccgccccttccactccctcgtccgatccatcctctaccagcagctcgccttcaaggccgccgcctccgtctactcccgcttcctctccctcctcggcggcgagcacaacgtcctccccgaggccgtcctcgccctcaccacccaggacctccgccagatcggggtctcccctcgcaaggcctcctacctccacgacctcgcccgcaagtatgcctccgggatcctctccgacgccgccgtcgtcaacatggacgaccgctccctcgccgccatgctcaccatggtcaagggcattggcgcatggagcgtccacatgttcatgatcttctccctcaatcgccccgacgtgctccccgccgccgaccttggggtgcgcaagggcgtgcagcatctctacggtctcgacgccgtgccccggccgtcgcagatggagaagctatgcgagcaatggcgcccttaccgctctgttggggcatggtacatgtggcggctcatcgaatccaaggcgccgccgccgccgccggccatccctgtcgggccgcctgcactgactgaacatggcgatgagctcatgctccagcagcagcagcatcagcaacagcagcaacagagtgtcatccaaatgattgatcctcttcagatgctcccagggatgggttga

SEQ ID NO: 37083 - DNA, 392 bp, Oryza sativa
  Clone ID: PAT_MRT4530_40845C.1
cctgcggaattgcggttccttattttaataaatgatcaacaaaaactaacaagttacaattgatacaaatgtcacatctgctgctaaagaatttttacttaggagcttccttaagctggggcttctctctacaacctgctgcttaaactaaaactcctcctactaattatggtgcaaggagaattccaggaaaagcaatggagggaccaaggatatctataacaataacagaaaaaatccctcctgctagtaattaattaaggagattttcagcatgtatacgcctctctttgacaggcacagggagcaccatagatgctgccactgctgactgcttctggtccttctccgttggaaacctcaagcttgacacacatctacgacgactgcga

SEQ ID NO: 37084 - DNA, 1134 bp, Oryza sativa
  Clone ID: PAT_MRT4530_40846C.1
cggcacgggagagccatagctctctctctctctctctctctctagatatctctctctttttctctctagatctctcttttttcttgtatctctataggttgttagagcggcgacggcgagaagaggaaggagcaacaaggagtagatcatcagtatagagagcagcagcaatttgggaaggttcattattacagctctgttgtttcatttctttgaggagacgaagttagcaagcagggattgctgtttctgaatttcaaggagaagataacaatagcaaatgatgatgtcatctgggttccagctcggtgtgatcgggtctcttgcgctgtcggttgcatcatcagttgccattgtcatctgcaacaaagctctcatcagtacccttggtttccctttcgctacaacattgacaagctggcatctcatgatgaccttctgcaccctccatgtggcacaacgcttgcatttctttgaaccaaaggcaattgatgggcaaacagtgatcctctttgggttgctgaatggcacctcaattggccttctcaaccttagtttaggattcaactccattggattctaccagggtttcatcatgctatcttgtttgattgcggtgtctgtgaacttcagcacatttcttgtgattggaacaacatctccagttacataccaggtgctaggccaccttaagacatgtctcgttctctcatttggatacattctgttacacgatcctttcaacgcaaggaacatattaggaattttgatcgccatatttgggatgggattgtactcctacttctcagtgaaggagggcaagaagaaggcaacaaatgatccactgccagtttcacagatgccagaaaaggagactgaaccacttttggcaaccaaagacaacagtgataccaaaaaagcaaatggtgtatctcatgactgctaagacttctcttgcttagtgtagatctagtatatgcacactgcatgcctgctcgttgaatttgaaggacctggaaagccatttctttccattcttgattgttttgtagaaaagataaatgagttttatacttgtagagagtgtatattttgacattaaaattatcatttgatcctactttcatattcatc

SEQ ID NO: 37085 - DNA, 702 bp, Oryza sativa
  Clone ID: PAT_MRT4530_40847C.1
atggcggacaagcaggcatgcgaagcgttggagaacggagcaagcggcgggcggcgacgggccgcagctgctgatgctgagcggcgtcgggccgtgtgggcaactggagaaacacggcatcctcccatgttggaccagcccatggttgggcagggcatgacggtgccgccgaaggagcggacgccagaggcgatgcgttggttggacagacgtgcgttccgtagcgggttccgcggcgcgttccagaggcatgtgaagcggcggcgtcggcggacaagcgcgcgacggagcatcggtggcctacccatcctcctgctcgccgtcgagccctctcccagcgctcccatcggcatacgcgtccaccccggccgctctcctctgcatcctccgccggtgtcgcgccgaggaggtgcgtggcgccgtggaggcggcgtggctggccacaacaaggtcgctgctcgccccctcacccgccatggctccggatggggagaggcggccgccggccgccgctcccgccgtcgcgggcggtcgggccggccgcctctgtccccttctttggggacggccgcctttccccttctctggcgccgaccgcctcttctccccctctcccgctttttccccgcgcgccgcagcgcccgctgcgccggcagccgcgctcactccgccgtcggccgttatctgcccgcctgcgcgtga

SEQ ID NO: 37086 - DNA, 424 bp, Oryza sativa
  Clone ID: PAT_MRT4530_40848C.1
ttatgaatatttacggtctctttcgaggaggtatacgattaaaaaccataacacagaaactttcagcagatggaccattcatacctggagcaacaccgaatggtcaatggtattcaacaccatcaactgatgtaatgatcatgggtaagttgtttaataatgtatcagtagattacttaaacattgcaaacaacataaccaaagcaactggtaacaattgtgttggacaagttggtattgaattttctgatccagttagtaattatacaaatttgctacctggtttcactaattcttcttcaactacttttgttgatcaacgcatagagggatgtgctgagtttgaaataccttattataattcaacacatattactcctgcaattacatctgttcaaagtgatcctttggtacctgttacgag

SEQ ID NO: 37087 - DNA, 122 bp, Oryza sativa
  Clone ID: PAT_MRT4530_40849C.1
aaatgtgcaaacacatatatatgcatggccccagaagaaacactgaactcagtgcttgtttacctgccatacttcctcatgtactccattgtaccctttcatatgtcactgtaatatgtttt

SEQ ID NO: 37088 - DNA, 360 bp, Oryza sativa
  Clone ID: PAT_MRT4530_4084C.1
atgacaagggggggccaaaacagacaaaatgaaagtttggtctttttaacaacgtttttggggttaaaaaaatatggtgtttggattttggggtttaaacaaaaggatggggggggggaaaaaaggaacgggggggactctaatgggaaggggggagccagtttttcttttttctgggtggggggaaaaattttgcactggggggggctaaacgctcaaaatgaggggggaggggttcgttattgtttttcaccttgaaataggataagggggaatgcccgggtggttttatgtgttatcattataagcgttgctggaaaaaaaaaaagacaacattggggcagggggataaagagtgtt

SEQ ID NO: 37089 - DNA, 489 bp, Oryza sativa
  Clone ID: PAT_MRT4530_40850C.1
atgcacctcgggttggggctcatgcggcttctttttgaagtaagtggagagcgtgacgatcatagcacgcttggtggctccatcccaatgacgacgaatccggagctttttctgacgcggggtgtaggcggcgggtgggtcggcgggagtggccgggacgccaaggtgccatgcccctccggagcccccgtcgccggcgactcccccgccgtctcctcctcaatccttctcttcttcttgttcgaagacactcccgccgactcctccacagtccgattccccacctgttcaatcgcctttgctctggagcgagtcaacctcccggacgacgatttgggactgtcgtcgtgctcggcgatatcagaatccggcttcgatttggaccgagtcgacctcgccggcgacgatttgggaccgctcaaggccgccaccgatttcctcggtttgggggacatggccgcctcccgccgcaccaatcgccgccgctag

SEQ ID NO: 37090 - DNA, 1606 bp, Oryza sativa
  Clone ID: PAT_MRT4530_40851C.1
gcgcgctgcactgcgcgtccccccaagcgtccgcccacacgcccgctcgagcggggtgaggatctaaagaaaaccctagcggcggcgattggtgcggcgggaggcggccatgtcccccaaaccgaggaaatcggtggcggccttgagcggtcccaaatcgtcgccggcgaggtcgactcggtccaaatcgaagccggattctgatatcgccgagcacgacgacagtcccaaatcgtcgtccgggaggttgactcgctccagagcaaaggcgattgaacaggtggggaatcggactgtggaggagtcggcgggagtgtcttcgaacaagaagaagagaaggattgaggaggagacggcgggggagtcgccggcgacgggggctccggaggggcatggcaccttggcgtcccggccactcccgccgacccacccgccgcctacaccccgcgtcagaaaaagctcctgcatcgtccggctcgaagttgctcgacttcagaagctaactctccggcgcgataagaaagatgatccctccaccgcggccgccttgcctaccccctccgacaagaacatggtgttgggcatgtctcgctcaattgtccgcgtttcatccccaccttctgagggaaaattgatctctccgcgcaccggattcgtcatcagttgggatggagccaccaagcgtgctatgatcgtcacgctcttcacttacttcaagaagaagccgcatgagccccaacccgaggttcatcttccagataagtctattgtgcagggacggttgatattcatgaatcgccactacaatctctccatcttggagatcacgtctgacctaccattgcaggtccctgcttttgggtccgccccaaagtatggccagaaaattcttgccttgtctcgggatgaaaatatgtccctggtggcgaggcgtggagcaatcacgtggtcggatggttctttcatgtggagaaaccattacatgtttgtggattgtgatgttcctgagggtggtgtaggagggcctgtggttgacagctgtggtagttccattgctatgatgtggaagcaattcagctgtgttgcccgccctgtgtttgacgtggatttaagaagtgtggaactagctggtgtgtcactccgggaggagctctctgtgaaacataacatcaatggtggctttattgttaaacgcatagctgatgattctgctcttgagcatctcggtgttagacggggtgacgtgatcttttttgagaacgagtgcgggactagtttgcctgagatcgaaggttatctcctttctcttggttggagatacctgcaggggatgaaaaagtcgatggttctcaagttggaagtacatgacattgaaggtccatgtgaggagacaattaccttacccttaaagttttctgtcgattcaggaaagttcggaagggagggcgtcgaccccagcagcaagaactcgattttgaggtttgagaagcttgattcgtgccgagagaagatcgacccagcggcaagggcgtcggttcgcgtgcatgaggtcgatcagcgcgagctcgaaatcagctggtggagctctcgaactctcctggggtga

SEQ ID NO: 37091 - DNA, 1128 bp, Oryza sativa
  Clone ID: PAT_MRT4530_40852C.1
atgtcgacccggtccaaatcaacgccggattccgatctccgctcgcacgacggcagcaatcccagtcccgaatcgtggtccgggaggttgactcgctccagagcaaagcagattggactggttcttccgattcaggcggtggaatcgccgggaatctcttccaacaacaagaagaagaggaagaggagagagattgaggaggagacggcgaagaagcaggcgcagatgtcggcggcggcggcggcagttgatcgacttcagaagttaactctccggcgcgataaagaagacgagccctccaccgcggccgccttgcctaccccatctcacaagaacatggtgttgggcatgtctcgctcaattgtccgcgtttcattcccatcttctgagggcaaattgatctctccgcacaccggaatcgtcatcagttgggatggagccaccaagtgtgctatgatcctcacactcttcacttacttcaagaagaagccgcatgagccccaacccgaggtccccgcttttgggtccgccccaaagtatggccaggaaattcttgccttgtctcgggacgaaaatatgtccctggtggcgaggcgtggagcaatcacgtggtcggatggttctttgatgtggagaaaccattacatgtttgtggattgtgatgttcctgagggtggtgaaggagggcctgtggttggcactggcggtagtaccattggcatggtatacatagacggccctggtgcagttatcatttcaatctcaattatttgcaccttctttgagatatggaagcaattcagctgtgttgcccgccctgtgtttgaggtggatttaaaaagtgtggaactagctggtgtgttattccgggaggagctctctctgaaacataacatcaatggtggcttcattgttgaacgcattgctgatgattctgctcttgagcatcttggtgttagacggggtgacgtgatcttttttgaggacgagtgtgggactactttgcctgagattgaagattatctcctttctcttggttggagatacctgcaggggatgaagtcgatggttcaaggtagcccgatggaggatggcttgaagatgtacagcaagactgaagttacctag

SEQ ID NO: 37092 - DNA, 1821 bp, Oryza sativa
  Clone ID: PAT_MRT4530_40853C.1
atgtcccccaaaccgaggaaatcggtggcggccttgagcggtcccaaatcgtcgccggcgaggtcgactcggtccaaatcgaagccggattctgatatcgccgagcacgacgacagtcccaaatcgtcgtccgggaggttgactcgctccagagcaaaggcgattgaacaggtggggaatcggactgtggaggagtcggcgggagtgtcttcgaacaagaagaagagaaggattgaggaggagacggcgggggagtcgccggcgacgggggctccggaggggcatggcaccttggcgtcccggccactcccgccgacccacccgccgcctacaccccgcgtcagaaaaagctcctgcatcgtccggctcgaagttgctcgacttcagaagctaactctccggcgcgataagaaagatgatccctccaccgcggccgctttgcctaccccctccgacaagaacatggtgttgggcatgtctcgctcaattgtccgcgtttcatccccaccttctggtaatttactccatccgtcccaaaaatatggacacatcttagtacaagtttggaggcatgttcagattttactgcctgaatctactgtatttactgctaacttagctactaaagggaaaattgatctctccgcgcaccggattcgtcatcagttgggatggagccaccaagcgtgctatgatcgtcacgctcttcacttacttcaagaagaagccgcatgagccccaacccgaggttcatcttccagataagtctattgtgcagggacggttgatattcatgaatcgccactacaatctctccatcttggagatcacgtctgacctaccattgcaggtccctgcttttgggtccgccccaaagtatggccagaaaattcttgccttgtctcgggatgaaaatatgtccctggtggcgaggcgtggagcaatcacgtggtcggatggttctttcatgtggagaaaccattacatgtttgtggattgtgatgttcctgagggtggtgtaggagggcctgtggttgacagctgtggtagttccattgctatggtatacagagccggccctggtgcagttatcatttcaatctcaattatttgcaccttctttgagatgtggaagcaattcagctgtgttgcccgccctgtgtttgatgtggatttaagaagtgtggaactagctggtgtgtcactccgggaggagctctctgttaaacataacatcaatggtggctttatggttaaacgcatagctgatgattctgctcttgagcatcttggtgttagacagggtgacgtgatcttttttgaggacgagtgcgggactaatttgcctgagatcgaagattatctcctatctcttggttggagatacctgcaggggatgaagtcgatggttctcaagttgctagtacatgacattgaaggtccatgtaaggagacaattaccttgcccttagagttttctgtcgattcaggaaagttcggctgctttgatgaacagactgattcgggtaaattgtagtccgctggaggatggcttgaagatgtacagcaagactagttagagcaaggtcaatagtatagcccaccgctgacggtaccaaatgccacgtcattttacagttagtgtaaagctaactaatacaatagattggctattgtgctaactacatagaagctattaaacaattaattttggatacacagtacgatcaagaatgtactccatctttgtagccatttgtgctgtcatgagcgtgagtagtctaccgatgaagaaaaagaaagagtttggtttttgctttc

SEQ ID NO: 37093 - DNA, 103 bp, Oryza sativa
  Clone ID: PAT_MRT4530_40854C.1
ggcaccccgcatcgcccgcacgtggccctcctggggtcccttccacctagtctcctcaagaaatcgcaacccaatccaagcagatttcgcgtccaggacgtga

SEQ ID NO: 37094 - DNA, 1215 bp, Oryza sativa
  unsure (1)..(1215): unsure at all n locations
  Clone ID: PAT_MRT4530_40855C.1
atggacgacgcgccatggcgcgaactcgacgccgacgtcctccgactcatccacagccacctcccgtgccacgtcgaccggcgccgcatgggccgagtctgccgcaactggcgcgtcgccgtcgcgccgcagcagccgccgccgccgccgctcccgtcgatcctcgtcccgcgcgccgacgtcgagccttccttcgcgtgcgccatcgccggctgcgccacccacgccttccgcctcccgcttccgggcgacacgcgcgccgcgcgctactacggcgcctacgacggccggtggctgttcgtcgcgttcggccagaccaaggactacgcgntcntcagcctccgcacccaccaccgactccgcatcccctacccctacgtgtcctgggcgacggtggccgcgaccctctcttcgccgccggaaaacgaggactgcctcgccgccgccatctgccactactgccaggagaccggcccgcgagttcatagattctggcgcatggggcagcatcaggctgcgttgaagaggacgaggatttctgttcctaccatcatgagcgcaacaaatctggaggatgtcatacaccacaggggagccttccatttcctcaccggagaagaaaacctccatgtctttccggtgccgggcttccacgaagacggcaacggcaacctggagataccgcccatggtgatccgtcgcttctcgcgtggtggtcgcgattacgacgggaagaaagtcgtcgtgcgctacctggtggagtccggggggtatctcctcatggtggtcaggctcgctccgtttcctcctcttcaagcgccgccgccgccgaggacgtcggcgttcaaggtgttcgagatggtggagccgccgccgccgacgcccatcaacagcagcgaggcccagtactcgtggaaggagctggattcgctgggtggtcgaatgctgttcgtcgcgcgaggctgctccagatcgtacgacgcgggcgactacccgcgggggctcgagttcaccgccggcgtctacttcctggacgacgggaggctctacggcgaggagagagtgatcggggccgccgccgagcggcgctacccctgcagagacagcgggaaatggctgccgctgccggcggcggcggcggctgggcgtgtggacaagctcttgccggagcaagccccgtcgaactactcgccgccggtttggattctcccgtga

SEQ ID NO: 37095 - DNA, 246 bp, Oryza sativa
  Clone ID: PAT_MRT4530_40856C.1
ggggagaggaggcggcggcggtgggggatggcggcggcggcggcggcggcgacggcgacgctccggtgggtgctgcagatgcaccgggacgtgccgcgggcggcgaggttctactccgaggggctcgacttcagcgtcaacgtctgcacgctgcgatgggcggagctccagtccgggccgctcaagctcgccctcatgcacaccaacgacaggtcccccgactgcttagcttcctctttctctctc

SEQ ID NO: 37096 - DNA, 661 bp, Oryza sativa
  Clone ID: PAT_MRT4530_40857C.1
ttttttttttttttttttttttttttttttttttttttttttttttttttttttttttttttttttttttttttttttttttttttaacagaattgcaaacttgccaaagggggggaaaccgtaacattcacccatgggtaaaacaggcaaaaggggacaaacaaaaaaattttttgagtcaggggatttgtttttgaacaaaaccccttgataaaaaaaaaacacagaacctggaaaactttaaaaaagttttttaaaaaaaaaacccatcctttggggcccaaagaatgggaagccttttttaaaccccggaaaaaaaactggggggggggggtaaacttttttttttcgccccctttcctttaaaagccggggggcctgggtttgtttttgcccaaattttcccatccccccccccaaggggggtttggccccctttggcctttttttaaggccaaagaacgaggggtctttttccttaaaaaaaaaaaaaaaagggcccaactttgccacccacggggggaaaacaggggggacccactggatgtcctttttgggcggaaggaaaagcttatggaaaacaacaaaggggggggggaaaccaaggcccaaaagggcactggtgggggggagggggaatggaaccccgttccggaagtt

SEQ ID NO: 37097 - DNA, 496 bp, Oryza sativa
  Clone ID: PAT_MRT4530_40858C.1
atcaggcgagcgaatatgggagtggctgcactaacggtggggaggagaccttcagcaccatgatggtaaggcaaaacatcgataatgctaaccgcgctgatgcatacaacccaagagctggaagggttcagatctcacagccagaatatacacatcttaatctatacagatgagcgccgatgaagtaaatctataccagagtgcactcctttcaccgttctggaacatgacacgctcacatgcatagagtatatgactcaaggccgagcccaggctcaagttgtcaacaacaatgcaaagacggtgttcaacggagagctctcccgtagacagctactgaatggacaacatcactatgtggttgtgcagatggcgcatagcgaaggatgtgcttacattgcatgcaagacataccctaactgtatggtacgccacattgcacgaaagagatccatcttgcgtgctatcgacactgctgttctagcaaatgcatatc

SEQ ID NO: 37098 - DNA, 397 bp, Oryza sativa
  unsure (1)..(397): unsure at all n locations
  Clone ID: PAT_MRT4530_40859C.1
aagaatactggggaaaaagattcatggatgaatcaccctcttgtatatacgacttcaatctgtagttgcaaaactacaaaaatgtaaaaaaaaagttgatctttgtacaatttttcctgatgtacatttcccagactctgattttctgctggttacatagaaagatggagaattaaggaattaattcaggctgtgtagaacagaagctacatggtgccagttagtgtcattttcctcgcgatcacagtcgaactttgtattatcctgacatcatttgcaataattgtgaaataagtgaaccccttgataatcgaaaaaaaaaaaaaaaaaaaaaaaaaaaaaaaaaaaaaaaaanaaaaaaaaaaaaaaaaaaaaaaaaaaaaaaaaaaaaaaaaaa

SEQ ID NO: 37099 - DNA, 459 bp, Oryza sativa
  Clone ID: PAT_MRT4530_4085C.1
atggggatgcctaccgtgcaagacgcattacgctacctcacaccactaatccggtcacactatgccaccgctaaccccgctgcattgcgttgcctcctggtgctaatctcaccgccgaggacgccacagccatgtgcgaaggtatacgtggagggcgctgatcacaaaagtgttacctacgtggtatgtcactttggcggtcaaacgtggtcaaaggacggttggaccgggagtggtacattaaaccaagttcacggatctaaacatgcaattttcaagttcacggatttaagtgacacctccccacaactcgcagccgcaggcatgctcctttcaattggttatttaatgatttttttcgcgaacgcggttatttaatgaatgagcagcaatcatgcagttcctatttagcacataagcgttggtaagggaagtagcctacatcttatccaatctcct

SEQ ID NO: 37100 - DNA, 319 bp, Oryza sativa
  Clone ID: PAT_MRT4530_40860C.1
cgccgttccacggcagcgatgtgccaccggcgacgaagaagatcaccaaggaagaagtgcacgagtgattcatgcaaaaatgcttggtgatcaactgaaggaaattaagtagtatcaaattaagcctcgtaagatttaatcatttagataacacaaaaaattagtacgaataaattttgaatttggacggcatttgtccaagatgattgatatttgaacttttccccatgagggcaaggtgatatgaataaagcaaccttaccgttgagtttgcttattgtcttaaaaggacattttctgctaagagtcttggaagaag

SEQ ID NO: 37101 - DNA, 2423 bp, Oryza sativa
  unsure (1)..(2423): unsure at all n locations
  Clone ID: PAT_MRT4530_40861C.1
cccccgacgctgccacaaagttgacccgtgtccattggattcattcccaaggttgttgcatcctagtggaccaaaaacaaccctgatgattctggaatttccgacaacgaaagcttcatggaaggagcaactagttcagttcccattctcgcctgctttcctcactcgcgatcgggactctcctccttgtcgttgccggaagatggagcctgatcagagtggtgctgagcagacttctccacgtgggaatgattgggaagttgtccaacttactgcatcaacatatgcatctgcacctggaccaagaatgtctgagccttctgatgaggctgaagtcaagggatatgacacaaaaggggatgattcagctgcagcactgttgatgtctggtcatttctcggtttcaccgagtgaggttgagagtctccttaggggcactgacggcaaagagcaccagaaggagctttctcgtccaagatgcagtttctagccgcaggggatgaagtctaattccagtactgaaaatcgtctgaggtgatttatgacgttgaagttatgtaattgattcaaacccccccttggatttgtatttatgtgtttagtgtgattcatcttcttcctcttttgagagtactgctcctggtttgtcaattgcagtgccctttcaggttgctgcagaaaacttgtatatatatatatactgatgagccttctgtttaaaataaaaaaagtgtcattgattcatccaaggttgttgcatctagtgaacaaaacaaacctgatgattctgaatttccacacgaagcttcatggaagaagcaactcttatcactgtacaagaataagggcaagttgcagcatcagccggtcaaattgtatcccagcagcaatgaggacaggggcaggcctagatatttgatcgggaacgagagcgggaggtcgtcgccggcgaggaggcgcggcggaggaatcctctccttcccgatcccgtccgccttcacaactgaaccttcaacagctcctttcactcccccaccagagtctgtgcatctgacaaccccttcctcaccagaggtgccatatgcaaagctacttacctcaatcaacaacagcaaaaatgctgaaacaggtgagcttcagtcataccagatttaccctgagagcccaataggacgtctgatatctccaagctcagcttgttcagggacttgctctccatttcctgaccctgaggtgcagacttcctcacgttccacattcccctcattcccagttcgtgagcctccaaagatactggatggcgagggaattgcaacacagaagttgatacctcgccatatgcgcaatggcggttctctcttggatggacatatttctgctgctgtaccagtcgtagacttctctgcccgacttcaaaataatgatcatgctatggatcatcgggtttcatttgagttaacagtagaagatgtagctcgctgtcttgagaagaaaaccaacattaatggggagtctgctgcagcttcttttcgccttgtgcccaccggtaacggagatcacattcatcccagagaatcgaatgatacaagagcagggctatgtgttgatgaaacataccatgatctgcctgagaaagcacggcgctccttgtcccttcgtaaggctaaagaattcaagttcaacaatgttgatgctcctagtgtggagccgagcgttggatcagactggtgggcaaacgagaaagttgctgggatcacatcagagccaaggaaaagctggtccttcttcccagtggcacagccaggggtcagctaacagttgcactgaccataaccttacaagatgaagaaataagcttctgtcatttttgctcctgctgtttctcagttccccagataccatcatcataactgcaggagatgcaaacttatgcaaaatattccagttttagcggtaagttggagttagttagtaactcagtgtccagctaatatcatcataagatactaaaggtgatgcagattctggaacctgttgttataaaaccataatacttccatggtgtagcgtctgttgtatcctccttaactgactggctgttctgatactgatgctgtttatgtacataataaactagcgaaaagagtagaactcttccttgcagcagtgtattgtcagagtggagcaagcaaatgactctgatcccctcttcaattagttgtgctttggctttagcagaagaaacttgaaaatattgttctgtcgtgcttaccagttcggcaagaatttcaattctgtcttggcatatgtgatgtcacatctcttatcacaattctgtaagcacactattttgttgtgctctgtatattaaattgggccacagncnctgactgtttatatttgaaaaaaaaaaaaaaaaaaaa

SEQ ID NO: 37102 - DNA, 1938 bp, Oryza sativa
  Clone ID: PAT_MRT4530_40862C.1
cctcaaaagccgagctatccttatcccaaaacccctctcgctcccatttccggtgtgactctggccacgatggccaccccctccacctccgcctccggccccgcccccgccccagcgccggcctcctccgcctttcccctcaccgccgccgcgcgtttcctccgcgtctctgccttctccagcacgcgcgctttcgccctcgctgagcggcgccgcactccgcggtgccggctatccgaggtgggaggcggcgaccgctcggtagccgctggccgctcacccggcccccgttccttccacggtctcgttctctccggcaatgcagaaggagccatgcaatctcttagaagagagctaagttctgggatgcaccctttacgcgaaaactttgtggctttagtccatgtttttgccaagaatgatcttactaccaagggcatggagattcttgcagctatggagaggcagagcatcaaaagtgaagcggatacttttcgtccagcaaaaatacaagaagcttttggcatgaggagatgcagcaaatcgctgctgcaacttggtacacttccatgttgcactatggcatggttaagttttgcacaaacagcacaggctagtgaaggaacaaatataaacatggtttatgaggttggggagctatttgagcttggaattcagttgtcttatcttctcatactacttggtcttcttggagctggtacattttttgtcattcgtcaagttcttgtccgtagagagcttgatctttctgccaaagagttgcaggaacaagtgagaagtggtgatgcaagtgctactgagtattttgagcttggagcagtcatgctacggagaaaattttaccctgctgctatcaaatatctacagcaagcaatccaaaaatgggatagagatgagcaagatcttgcacagatgcaatctcttagaagggagttaagttctggggcaccctttacacggaaactttgtggctttagtgcatgtttttgccaagaatgatcttgctaccaggtgcatggagattcttgctactatggagaggcaaagcatcaagagagaactagagagctctaggcggaggatgttgctagctgcaggggctgctgtgtttctttcttggcctaatctggcagcaaacgcagcagaggctaagaaagggttcttacctgtaaccgacaagaaggatggatactccttcctctacccatttggatggcaggaagtggttgttcaagggcaagataaggtttacaaagatgtcatagagcctttggaaagtgtgagcgtcaacacaattccaaccagcaagcaagacatccgtgaacttggtcctccagatcaggttgctgaagctcttatacgaaaggttcttgccgcacctacgcaaaagacaaagttaattgaagcaaaagagaatgacgttgacggaagaacttactacacttttgagttcacagctcaagctccaaatttcaccaggcatgcgcttggtgcaattgccattgcaaatggcaaattttacacgttgacaactggagcaaatgaaaggagatgggagaaaatcaaggataggctacatacagtcgtcgattccttcaaaatcgaggcaagagtatgagggaggtggcgaggtgcgacatatatcgtgctgatttttcctgttggttttcttcgtttcaggtgctccaactggtgtggttcaatggtaaatgtcggaaacatggattttacttatctgttttgttttgagatgtgtgacacgacttcaatttgtacgtatatacatcttcccaatgtcgatcctgatccttctatttgtatgtactggtgaggttaagaaaatatgtaaatgatcctttgaatcgcaatgttgattataagggccatctgtgagagtaaaaaaaaaaaaaaaaaaaa

SEQ ID NO: 37103 - DNA, 564 bp, Oryza sativa
  Clone ID: PAT_MRT4530_40863C.1
aaaaagcaacctggggagtttattttttttttttatgcaaagcctttttcagttaatccctttcacaataaaattgaaagaaaagatttaatttggtccacatttattgatacaaaaaattaatcccctttaacacatttattaacataacacattcagtcttttttttttttgggggccccatctttttgaaacgaccgggggcggctgcccccggagggggcaggggtagcagcggctacccccaaagccggggggggctgcccccggaggagggggggacgggggcaggcccaacacccggaggcgggggcaacgggggggggggctgcaccaatccctccctccctccccatttttttttggtcttcggttcatccccgagcggggactacttccagagatccaatctttttttccaaggggggtcagtacacttatcatgggagacaatatttattttggtctagggagggactatttatcggggattcatggcattttttttaaaaccgctaaatagcttaactgcagctatagcgggctataggggaggaaaaccat

SEQ ID NO: 37104 - DNA, 367 bp, Oryza sativa
  Clone ID: PAT_MRT4530_40864C.1
tggtagggcacacctcgcacgtcgcacactctacgtgggaaatatatatagacatcctcagagttctagcggagctacacaaacgcgcacagggactgcgacgccaagaccgaatacccgcccggcggcggcgaccgcccgccgaccaaggaggaggcgcaggccaagaaggagggggaggagaagctaggctctgctgccaacatggcaagagctgggctcacactgactgttcttgccctcttgcgcctcgtggccctcggcctgtccggcagagccaatgccaatgcaacggcggggaggaagaaggctggggctgtatgagccgaagaaggggggattctccatcggcgcaccactggggagc

SEQ ID NO: 37105 - DNA, 407 bp, Oryza sativa
  Clone ID: PAT_MRT4530_40865C.1
attgagcgtatcaagatgcgcctgaccggggcgatataggacacatactaccttgccactactagtggttgccacatccacgacatggacgctggacctcaggcgaaggtgggctgaaggagagaacttcaggaaaatataggatagagcacatgaggagcacgactcatttatgcattgcagatcaggaacgaggctagcactgcataagagatggacccagcatggaggcagtattgccgcgatgggcctggaggagcagcgtgaggtcatccaatgccattgagtgccctatacgcatgattacgatgcctgcgagattacaggggctagaggtgccagcgctggaagggcgggaggtcacatgacgctggaaccggacgcatagtgggaggctcgtgtagttg

SEQ ID NO: 37106 - DNA, 342 bp, Oryza sativa
  Clone ID: PAT_MRT4530_40866C.1
atggccggcgcatgtgagagagagagggggagggtattccccaaaaaaagagagagggggggggaggaagagaacacgcagtggagaaagaaagggggagaggagcacgtctcctcggtgggggcacgtgcggcgcacgtggagagggagggaggatgtgtcagaggaagcagggctattcaaaccaccatagcagttagggaggaaaacgttttggtgtgtgacaaagatcggcattctaacagtaagatgctcagcgaggacatggaaagttgcattcatatgtacaaagagcaaaaatatttgatgatggtgattatgttgaccaccaacaagaagtaa

SEQ ID NO: 37107 - DNA, 196 bp, Oryza sativa
  Clone ID: PAT_MRT4530_40867C.1
actaggcaaccccacaatacacaatggttaaattcaatgggaattggcaggggtccttaaaataaaacaatttattccgtggttccacccttagccgccgaaccacccagttgttaatttaatcgttacccaacggtttaatttaaccattattaggacacaccccaaccaaacttattttggtgggttttattgg

SEQ ID NO: 37108 - DNA, 159 bp, Oryza sativa
  unsure (1)..(159): unsure at all n locations
  Clone ID: PAT_MRT4530_40868C.1
agagtacgaatnacaacactaaagagtatagagacacagtcagagatgcactagtagatacacacatcgatatcgagatagtatatacgagtctatgagcaatgccatatgcagcttatgtgtagcagtagtactccagacactagactaccagctggc

SEQ ID NO: 37109 - DNA, 342 bp, Oryza sativa
  Clone ID: PAT_MRT4530_40869C.1
atgtttgctctcctttatctcctccttatccggttccagctccttgggcagcctcaccgcgtccaccccggccaccttgccgcctaccccggacaccttgccgaacacgtgaacgaaaacagatccgtcaactccgccggccatgccacgtccaattcccactcctctgtgagcttctccatcacctcgtgcgcaccgacgcaggccaccgtgacgcgcctgttgcgcaggaatgtgaggagccgcgccatccttccgccgtcctcatggaaaggaagcacgctgacggtatactcggactggttgcagtcgggctggtacacaaggcatgggagccgctga

SEQ ID NO: 37110 - DNA, 753 bp, Oryza sativa
  Clone ID: PAT_MRT4530_4086C.1
atggagaatgggctgtccgatgaagttcttaaagcagttttccctctactggatggtcaagacctagtcttttgcatgcttgtatgtcgtcaatggcgagaaattgcaaaggatgactacttctggaaatgcatatgtgcgaggaagtggccttccatttgcaagcaacctccttcagatgcaaactaccagaagctctatttaaccttctccaaaccacggacgccacagcaccttcctgtaccaaagctcacattcgaggatcttgtgttttacattgacatgtggcttgacggatcactcatcttctctcaagctgtttcaggctgcatccttcgaggaggtctgcagaatacaccttgtggcattccggatgtacttgtagcacatttgactgctcctgactgcattctgatgatggaggttgaacccaagctggaaataactatggggccatccatcactgtgtctgttcttgcccaccgaaaggatacaaagaagatggcttgcgtcattaataagtcaacttttgattacatcgacagcaacgcagcacgggcattggcatatgaatatctccagttttcaccaagatacccttttatatcagacatccgagcatggatgtctttgcttttcctgtacaaaggaacaaacgtcatcgaagtatttggtatagagctagacttttgtgatgcagcaaggtcggagactgaaattctttggctcttagacatgcttgattggaaatag

SEQ ID NO: 37111 - DNA, 422 bp, Oryza sativa
  Clone ID: PAT_MRT4530_40870C.1
acacaatccaagtgcatttgtggagtcaaggttcttgcagatgacctgattcccaaccaaacacttcggagcacaatcagcaatatgctggcaacaagggctagcagcatcactagtggtacagggaagcacaggagctcttcaggcagcaacgtggatcctaattcagcaagccaaactccttcagctgccttggaaaagcaatctaaggatcaccacatatcatcagctgctcctgatgctggcctccaagttgctacagaacatgttagccatcttgagcataaattgacaacaggtgttgatctcgaagtgaaagatgaaggcaattctgcagggatattggtagagaagattgtaccaactgctgatgccagattaaaagatgtaactgactccacttcaaagcccgccactatttc

SEQ ID NO: 37112 - DNA, 258 bp, Oryza sativa
  Clone ID: PAT_MRT4530_40871C.1
atggcgggcgagctccaccgctctctctccctctctctgttgtcgttgtccttcccggcctcctccgcctcacgccgtcgccagccgagggcagcagatctagcgccaaagctagcggatttggtcctcccgcggccagattgggatggagacgatggcggtgccagcaatggtgggcgcggcgccgacccctcaaccccgcagctcctcgtcaagctcattgggcgcatcggttggtggcggtgcggatggatctag

SEQ ID NO: 37113 - DNA, 445 bp, Oryza sativa
  Clone ID: PAT_MRT4530_40872C.1
atattattgggttttctcacatttttttttttgttttctcacaagggaaaaataaaagaacccccccagaaaagtaggaaaacgacaagcactaagtttgcaattccttatagccgaaacaacattggcccggaaaccaagttcacaaagtcgagaagccagatcgactatatggcagggggaaatgaaggcccactgagaacaatgcacactagggcccaaaggaaactagagacacggatatgcggagacctggacaacagatccagggggaaatggcagcttgacaccaaactggcctgagaagggcacccggcccctgaaagccaggctagagccaaaccaaacatcaccggaaaccctcaaggcgtcaagcttgaacaaaggaggggactgactagcaaccaccagagaatcaccggacctgtttgcactctggacccag

SEQ ID NO: 37114 - DNA, 414 bp, Oryza sativa
  Clone ID: PAT_MRT4530_40873C.1
atggcttccaaggtggtcgctcccttcattgcccttagcctcctcctccttgctgtcatagctaacggttgcacacccaactgccccggcgagcaggttgtcccgacgcccacgcatcatggcaagaacggtgggcatggccgttgcccgatggacgctttgaagctgagagtgtgcgccaacgtgctcaaggggctggtcgatgtggagatcgggcacggccccgacgactgctgctcgctgctatcagggatcgccgatatcgacgctgccgtctgcctctgcaccgccgtgaaggccaactttttagctggcagggctaatccagttactggtactgggagaaaagacgatgttgaaattctacgaggtgaccgatcgaatttcatcaaactggcccacatacgggcctaa

SEQ ID NO: 37115 - DNA, 462 bp, Oryza sativa
  Clone ID: PAT_MRT4530_40874C.1
atggagttggccgagggcgcggaggcggcggcggtgcctcccagatccgcgcctctcggccggatctggagggtggaggcagttggccgacggcagttggcgacgacgacgacgacggccggcggcagtaggcgatggtctcggccggatctggatgccggcggcagtgggcgacgacggcggcagtgtggtgacggcagcggcggcggccgtgggccggcggcaacgtggtggctgccgtgtcatctggcgacggcggtggaagcaatggcgtcgggctgctacctactcggtggtggagggcgatggcgcaacggcggttttgcggaggcggtggttggtgtcggtggcagcggcgacggtggctgtgactctagaggcggtgatgacgttggtggcggggaaggagtcgggtgcgaggtggggatgatgacggcgaggtggttaggtgttcggcagtag

SEQ ID NO: 37116 - DNA, 335 bp, Oryza sativa
  Clone ID: PAT_MRT4530_40875C.1
ccttcagaattcatacagaattctgaaaaatgggtagtagtaccagtacaaaatcacacaggatatgtacagcaagtgagcttctgaattctgaaacatgctggtctgtttacttgaatcaattaatactacagttgcctgggagcttggcacggtagctttagccagggcaacaacagatactccttcctgaataactctgtcagataagcgagaaggcttataccttcttgaagaatgacataatgttgccttgcttggttccagccttggcaggtttcttgttgccggctgttttactcgaagcattgcttttttcggtctttgctactggc

SEQ ID NO: 37117 - DNA, 705 bp, Oryza sativa
  Clone ID: PAT_MRT4530_40876C.1
cctccgtccgcttccgccgccgcgcgcagccgcagcgccgccaccaaccaccgccgccgggagaggggggggggtggtacgggatagggtaggccgcgtcgaggatggcgtcggggagctcctccggcgacatgggcagctcaggggccaaagatgtgattttggatgaaccactgctaacttcaggaagcgctgaaagttcacaacagaggtctactgatgctgacacaaaatcacgtgttgaggatatctggaagaaaatgaacagtggaatgccagctaaaatgcccaaacctgtaatgaataagctcagcacacctgctaaagaaaagaaaagtaccacgggaaataactggatgagtgttctgggactttcaccaagtaaggcttccacaaatgatcaaggctccaaaaatggccaaaagcaggcacaacaagaaacaagcgaggacgccaaaaaacttgcagcgagtgctcttgccgctgtcagagatgctgcttcagctgcagctggaagagggaaagtgggagatcacggaggttagggactttgctgggaaggatatccgagatcaagaaactggtggacgccgattcaacagaagcgatagagaaggccaaggccggctggtgctgccccgtctgctctcgaccacatcctcgagcagataaagaagaagcagaagctgagcgtcctggacaaga

SEQ ID NO: 37118 - DNA, 1119 bp, Oryza sativa
  Clone ID: PAT_MRT4530_40877C.1
atggcaggggccaaagatgtgattttggatgaaccactgctaacttcaggaagcgctgaaagttcacaacagaggtctactgatgctggtatgtatacaggtctttcagccccatgttttactggtccttcaggccttcaggtgagagtaactcagaagtcagaagctagtgttttgaatatgtcatatgttgatgagctttgtgataaagattacacaaaatcacgtgttgaggatatctggaagaaaatgaacagtggaatgccagctaaaatgcccaaacctgtaatgaataagctcagcacacctgctaaagaaaagaaaagtaccacgggaaataactggatgagtgttctgggactttcaccaagtaaggcttccacaaatgatcaaggctccaaaaatggccaaaagcaggcacaacaagaaacaagcgaggacgccaaaaaacttgcagcgagtgctcttgccgctgtcagagatgctgcttcagctgcagctggaagagggaaagtggagatcacggaggttagggactttgctgggaaggatatcgagatcaagaaactggtggacgccgattcaacagaagcgatagagaaggccaaggccgctggtgctgccccgtctgctctcgaccacatcctcgagcagataaagaagaagcagaagctgagcgtcctggacaagacgaagaaagactggggagagttcaaggaggagaacaaagggatggaggaggagctggaccagtacaagaagagctcgaacaaatacctggataaggtgtcattcttgcagagagctgattacagagagtttgagcgcgagagggatgcgcggctgtccatgatgtcgaagcggaagtcggatacgcgagaggattgatgtgtagaaggcctgaaaaaggaaaaaaaaagttccatcatcttgcagctccttgtagacattctttttagatgatcatgggaacatcattttgtctatgcattctcttctgtttctatctgttgattcaatgtgaatgaagaagaagaagatgctgtgcacattgatactggctgtatccatttcttgtatgtattgtttatgtatgccagtctgggcagtaatttttgg

SEQ ID NO: 37119 - DNA, 180 bp, Oryza sativa
  Clone ID: PAT_MRT4530_40878C.1
tttctttcgcagaggcggcagccaccacggggggctcttgctactcctcatgcggcggtgtgcaaccaagcgatggagttctccggcggcgcgaccgtgtcggagccgatcggatgctgccgtgcggcatgtggcgcggggggggcggttgcgggggccgagggaaggagccggggggtt

SEQ ID NO: 37120 - DNA, 249 bp, Oryza sativa
  Clone ID: PAT_MRT4530_40879C.1
atggaggaggacgacgacaccgtggcggttgatggcggtcgccataaggaggtgttcacctgggccaatagcaacaaccagcagctactccacgtcgacgacattgatgcagcaaacaagtcctacatttacacatcgtgctccatgtcgttggctgcagaggatagggtggagtccgccgatgatggatggctactattgcgcaatgtcgagctcatctctataccacaccgctacatccttccatga

SEQ ID NO: 37121 - DNA, 348 bp, Oryza sativa
  Clone ID: PAT_MRT4530_4087C.1
ttaagcgacggtggcttctcccaaggaggatccaatggcgaaggcgtcaatgacgggcggggcggcgtcgtcagcgggcagggtgtcatcggcggggtctcccgcatgtatcgggcgtcgggacgaatgggcggcgtcgacgggtgttcccgtggcagatctggcttcggcgggctcttccgcagcggatccggcgtcaacgggtgttcccacatcgggtctgacgtcggtggggtctcccatggtggatccagcgtcggcgggggttctcgcggcggatccgtcggcggcggtagggggaacaacggccgcctacttggtgccaagttggaaactggcatctattag

SEQ ID NO: 37122 - DNA, 340 bp, Oryza sativa
  Clone ID: PAT_MRT4530_40880C.1
tcggtacccgagccgagccgtgccctgccctgcccttctttcgcccagggttcgcagccaggccgttcgacgtcgtcggagggggaagagagccgcggcggcgttaggaggaggaggaggggcgagatggaggcggagaagaagccgacggcggtgtccgacgaccgggcgtgggcgatgaacgtcgccagcctccgtcggcatcatcatggcaaacaagcagctcatgtactccttcggctacagccttctccttcgccacgaccctgaccggatttcattttacggtcacggcgctcggcggatggatcttcaacgccaccggtttcttcgtatccaa

SEQ ID NO: 37123 - DNA, 556 bp, Oryza sativa
  Clone ID: PAT_MRT4530_40881C.1
gctagatctcacttgcaccactcgcaattagtgttttcgcatcaggacgacatggaggcgtcagctgctgatcatcacggtggccaccaccaccagacgacgaagaagatcatcagccagggctccgacggcatcggcggcggcggcggcggtaagtcgagggtggacctgtacgccggcgcggtggcgcagcgggcgctgtacgggccgacgacgacgagccggtgccgcggcgcggcgaggcagaggcagcaggcggtggccggcggcaaggactccaagcagcccagcaggctgagcaagatgtccggggcggagggcacctgatgatgaagtatctgtcgcgtgtggtgttgcagcgctttgcagattgcagatttgcagtatgtactatgtatattggttgtagtagctagaagtgacgatcgcgaccgtccttggttacattttcgtgtggcgctgggacgagcttaactggtgctagctgtgtgatccttgtgcatatacagtacatgtgatgctgttggaacaaataaattgagctagttggatactg

SEQ ID NO: 37124 - DNA, 275 bp, Oryza sativa
  unsure (1)..(275): unsure at all n locations
  Clone ID: PAT_MRT4530_40882C.1
aaccaatntccggggttggacntnaggantttccatngggcngtggttcaacttcggtggtccttccctcctttctttccgnttnccaaatttttttcttccaattctttttccttgtccttacttgttttttttctcctccctccntttgtngtaatgtcgntgtgaacggaangacgncgngataaaaatctctcaaaattttgggattgctttttggccacttgtacttttgggttgggcctnangtatcaacccttcccaaccngaattga

SEQ ID NO: 37125 - DNA, 282 bp, Oryza sativa
  Clone ID: PAT_MRT4530_40883C.1
atgtcgctgagctcgtgtgcgccctccgcgccgtcgagctccaagcaccttggcaacaagggcaacgggacacggggagaagaaagcacgtgcgccgccggcgctcgagaaaagggagagggcgtgacccttccccgacgtatctctcgtttggtcaccggcggcggtggcgggctcgctggcggcgaagagagcgtatttaggtcgcccgaggctcgggcgagcgagtcgcgtgactcgcgtcacccctcaccacggcgacgcgagcgaggcggcggatag

SEQ ID NO: 37126 - DNA, 2102 bp, Oryza sativa
  Clone ID: PAT_MRT4530_40884C.1
atggccaccatgaacaactggctggccttctccctctccccgcaggatcagctcccgccgtctcagaccaactccactctcatctccgccgccgccaccaccaccaccgccggcgactcctccaccggcgacgtctgcttcaacatcccccaagattggagcatgaggggatcggagctctcggcgctcgtcgccgagccgaagctggaggacttcctcggcggcatctccttctcggagcagcagcatcatcacggcggcaagggcggcgtgatcccgagcagcgccgccgcttgctacgcgagctccggcagcagcgtcggctacctgtaccctcctccaagctcatcctcgctccagttcgccgactccgtcatggtggccacctcctcgcccgtcgtcgcccacgacggcgtcagcggcggcggcatggtgagcgccgccgccgccgcggcggccagtggcaacggcggcattggcctgtccatgatcaagaactggctccggagccagccggcgccgcagccggcgcaggcgctgtctctgtccatgaacatggcggggacgacgacggcgcagggcggcggcgccatggcgctcctcgccggcgcaggggagcgaggccggacgacgcccgcgtcagagagcctgtccacgtcggcgcacggagcgacgacggcgacgatggctggtggtcgcaaggagattaacgaggaaggcagcggcagcgccggcgccgtggttgccgtcggctcggagtcaggcggcagcggcgccgtggtggaggccggcgcggcggcggcggcggcgaggaagtccgtcgacacgttcggccagagaacatcgatctaccgcggcgtgacaagatttgtaggatttatcattatgtcattattatgtgggacatgattgttgtgattaacaaagttgtaatatcttttggtttggttataggcatagatggacagggaggtggttatgacaaagaggaaaaagctgctagagcttatgatttggctgctctcaaatactggggcccgacgacgacgacaaattttccggtaaataactatgaaaaggagctggaggagatgaagcacatgacaaggcaggagttcgtagcctctttgagaaggaagagcagtggtttctccagaggtgcatccatttaccgtggagtaactaggcatcaccagcatgggagatggcaagcaaggataggaagagttgcagggaacaaggacctctacttgggcaccttcagcacgcaggaggaggcggcggaggcgtacgacatcgcggcgatcaagttccgggggctcaacgccgtcaccaacttcgacatgagccgctacgacgtcaagagcatcctcgacagcgctgccctccccgtcggcaccgccgccaagcgcctcaaggacgccgaggccgccgccgcctacgacgtcggccgcatcgcctcgcacctcggcggcgacggcgcctacgccgcgcattacggccaccaccaccactcggccgccgccgcctggccgaccatcgcgttccaggcggcggcggcgccgccgccgcacgccgccgggctttaccacccgtacgcgcagccgctgcgtgggtggtgcaagcaggagcaggaccacgccgtgatcgcggcggcgcacagcctgcaggatctccaccacctcaacctcggcgccgccgccgccgcgcatgacttcttctcgcaggcgatgcagcagcagcacggcctcggcagcatcgacaacgcgtcgctcgagcacagcaccggctccaactccgtcgtctacaacggcgacaatggcggcggaggcggcggctacatcatggcgccgatgagcgccgtgtcggccacggccaccgcggtggcgagcagccacgatcacggcggcgacggcgggaagcaggtgcagatggggtacgacagctacctcgtcggcgcagacgcctacggcggcggcggcgccgggaggatgccatcctgggcgatgacgccggcgtcggcgccggccgccacgagcagcagcgacatgaccggagtctgccatggcgcacagctcttcagcgtctggaacgacacataa

SEQ ID NO: 37127 - DNA, 782 bp, Oryza sativa
  Clone ID: PAT_MRT4530_40885C.1
ctagctctctcatccgatcttgctgtagttgtaatcttggtatcagtagaatgcaacagcgcctccgcgacggtacgaacaattccgatggggaggatagaggaagcagatccgccagctacggatcaacaagcggagctacagctaaattaagcgatggttgctggggcgccggcggggatggaggtggtgatggcggcggtggcggcggcggcggcgatgacggtggcgatggtggcggcgcagacggttgcgggggcggcgcagacggcggtggaggcgcagacggaggaggaggtggagacggcggcggtgacgacggtccagacgggggcgatggtggtggtgacggcggcgggcaccacgagcacggcggagatcatggtggaggctggcaccaccatggtggagaccatggcggcggtgggcaccacttctccggtgaccatgggggcggtggcggttgtggcggcggcggtggctgcggcggcggaggtggcggcgggcatcaccaccatggccacggacatggcggagacaatggcggcggacaccaccaccatggccacgggcatggcggggaccacggcggcggcgggcaccaccatcaccacgggcatggcggagaccatggtggaggaggctggcaccaccatggcggagaccatggcggcggcggcgggcaccactactccggtgaccatggggcaagcagcggattcagcggtggcggctgcggcggcggcggcggcggcgggggtggtggtggtgggttctgacgt

SEQ ID NO: 37128 - DNA, 721 bp, Oryza sativa
  Clone ID: PAT_MRT4530_40886C.1
tcaccatcggggatgacggggcggggacgggtgcaccatttccccgtccccgccccccgtggtgacccgacggtcaaccaacaatcccacatccaaaattccaaatcctccggtccagatcgagcacagctgtacggagcgcctcttctccgggccgccggcgccaactcctccggcagtccggcactccggctctacgctgcagccacaccgccaccgccagccgttccagacgcgcgcgccgccgctgtcccgtcccctccatcgggcgtcgacgcgccgccggaagccgccggtgtcgcgttgcccggcgcctgcagccgtcaacgcgggcgtggcgccagcagccgtcgtctcgcggccgggagaagccgtcgccgggagcacgccatccgtcgggagccgccatcgccgggagcacgccatccgtcgggagccgccgtcgcctggtttgatatctagtgtgctgatttgttgatccatgactaatagttgttaagtggattattttcgaaaaatactgatgtgctgtattgctcaagtgttgatttgtgtttctttgcatttatatatgtatggtatggagtttggactttagagattaactaggaaagaggcgggcacttatattattgaaaggtaagattattgtatgttcagaaattttgtcttatagattaagggcaaattaaagtttggaaaaaaaaaaaaaaaaaaaaaa

SEQ ID NO: 37129 - DNA, 678 bp, Oryza sativa
  Clone ID: PAT_MRT4530_40887C.1
ggcgccggcggggatggaggtggtgatggcggcggtggcggcggcggcggcgatgacggtggcgatggtggcggcgcagacggttgcgggggcggcgcagacggcggtggaggcgcagacggaggaggaggtggagacggcggcggtgacgacggtccagacgggggcgatggtggtggtgacggcggcgggcaccacgagcacggcggagatcatggtggaggctggcaccaccatggtggagaccatggcggcggtgggcaccacttctccggtgaccatgggggcggtggcggttgtggcggcggcggtggctgcggcggcggagacggggatggtggcggcggcgacggaggcgatggtggtggcgacgggccggacggcggcggcgatggcggtgatggcggcggcggcgaccagggccacggacatggcggagacaatggcggcggacaccaccaccatggccacgggcatggcggggaccacggcggcggcgggcaccaccatcaccacgggcatggcggagaccatggtggaggaggctggcaccaccatggcggagaccatggcggcggcggcgggcaccactactccggtgaccatggggcaagcagcggattcagcggtggcggctgcggcggcggcggcggcggcgggggtggtggtggtgggttc

SEQ ID NO: 37130 - DNA, 265 bp, Oryza sativa
  Clone ID: PAT_MRT4530_40888C.1
agagggaacttggagcagcacgcaggcgaccactcccggcgttctgcaacagtgaacatcacccaacgcggagttgtcgtcatgctactggctggcagagatctggctactagctaggctactgtagctagctgtgcatgtatgtggtgtggttactaaaataattagtgttttccttttgtttggaagcatatgtgtggtgaataaatgatgaactccgatgttcctctctataaatcttgatgattcgctaaaaaaaaaaaaa

SEQ ID NO: 37131 - DNA, 2242 bp, Oryza sativa
  Clone ID: PAT_MRT4530_40889C.1
tgagatcgagctgaaaaaaaaagagaggccacgaagagagctcagctgctgcctgtagcttacttggagataaagaggaggaggaggaggagggcaccgacatggccgcagccacggcgtacaccggggggctactgggggccacctgcgcgcgccggccaaggacgccgcaagtttggatgcagcagcagcagattcgtccgcgtcgctctgtctgacagtgtgggccctccccgagatgcaggcgtggttctccggcacggggccctccgcctcgtcggcgtcgtcgtcgtcgtcgccgccgcagccgtcgctgctcgcggaatggaactcctacgccgccgcgcgctccgcggaggaggaggaggacggcggcgggggaggcttcgggatcgacatcgaggccgccgtccgctccgccaacgaccgcgtctccggcaccttcggcgtggtatctaaaggtgttctagggttgccaggcagcttcaagtccacaacaagcagtgttccatcgagcaaatcacttgtgtattttggcctttttcttgctagtggaatattcctagttttcattgcgttcacgatatttctgccagtcatgaggttacctttcaccatgggatttgtgggcagcatggctgctaccatctacgtgtcaatggtgctccatagctacatactttcagttttcttctcttgtcttcagaatttgacaggaattttgggtggcatggcgcggctcccctatccgggaacgggtgatggggttttcgccgcccatggatatctcagattcggcctgggaatttggtatatcctctctctttctctctctgcgtatgagctgatcaagacggccaagtacatcgcgacgccggggaagggcatcctcgccgccgacgagtcgacgggcaccatcggcaagcgcctggccagcatcaacgtggagaacgtggagcccaaccgccaggcgctccgggagctcctcttcacgacgcccggcgcgttccagtacctctccggcgtcatcctcttcgaggagacgctctaccagagcacggccgccggcacgccgttcgtcgacgtgctcaaggccggcggcgtcgtgccggggatcaaggtggacaagggcaccgtggacatcgccggcaccaacggcgagaccaccacccagggcctcgactccctgggcgcgcgctgcgccaagtactacgaggccggcgcccgcttcgccaagtggcgggccgtgctcaagatcggcgccgccggcgagccgtccgagctcgccgtcaagcagaacgccgagggcctcgcccggtacgcgctcatctgccaggagaacggcctcgtccccatcgtcgagcccgagatcctcaccgacggcgcccacgacatcaagacctgcgccgccgtcaccgagcgcgtcctcgccgccgtctacaagtctctcaacgaccacaaggtcctcctcgagggcaccctcctcaagcccaacatggtcacccctggctccgacagcccaaaggttggcgcggaggtgataggggagtacacggtggcggcgctgcggcgcacggtgccaccggcggtgcccgggatagtgttcctctccggcgggcagagcgaggaggaggcgtcgcagaacctgaacgccatgaacaagctggaggtgctcaagccatggacgctcaccttctccttcggccgtgccctgcagcagagcaccatcaagaagtggggcggcaagaaggagaacgtcgccgccgctcaggctgccttcctcgcccggtgcaaggccaactccgaggccacgctcggcaagtacggcggcgccgccggcgacgccgccacgtccgagagcttgtacgtcaagggctacacctactagaattcgtcccaatcactgggtggcgcctatgcggccgtgcctatgacagtagtagggtctcggtccaatccgcgtggcccacgtggcggtgcggattgcatcaagattcgtgcggatatacatgtgttcctttctgctgtatactctcgattctctgcttccttcccctctagctcttatattttaacaaaagctgcgtctaaatgttcatctctttgcagtttatttgcaatgcaaactaatatgaatacttctgataaaaaaaaaaaaaaagagtagtatgtgttttttttttccaagctagtttcatggaaaatgagagcagaaaaagttaaatatttatgagatcagccc

SEQ ID NO: 37132 - DNA, 357 bp, Oryza sativa
  Clone ID: PAT_MRT4530_4088C.1
atgtcctcctccccgtggcctcccaccacgggcgccgcctccgccgccgccgccgccgcttcccccgcgcctccggaaggagcggctggcggtgccgcgactcccgccgctgcgcccgccacgacgtcggagcagcgcccggtaacaaagcgaatacataagatctttgaaaaagaccaagttggtacatacttcctccgtttcacaatagaaacagaaatccaagtgcacgaacagaagataaacaaatatcaagctatacttgcagcccgtttgaaggccaaatacttctctaataaggattttgatggaggcatgccattttttcagtctcatgctatagagatctgctattga

SEQ ID NO: 37133 - DNA, 1374 bp, Oryza sativa
  unsure (1)..(1374): unsure at all n locations
  Clone ID: PAT_MRT4530_40890C.1
gtcgctctgtctgacagtgtgggccctccccgagatgcaggcgtggttctccggcacggggccctccgcctcgtcggcgtcgtcgtcgtcgtcgccgccgcagccgtcgctgctcgcggaatggaactcctacgccgccgcgcgctccgcggaggaggaggaggacggcggcgggggaggcttcgggatcgacatcgaggccgccgtccgctccgccaacgaccgcgtctccggcaccttcggcgtggtatctaaaggtgttctagggttgccaggcagcttcaagtccacaacaagcagtgttccatcgagcaaatcacttgtgtattttggcctttttcttgctagtggaatattcctagttttcattgcgttcacgatatttctgccagtcatggtaatcatgcctcaaaagtttgccatctgtttcacggcgggatgcgccttcataattggatcattctttgcgctaaaagggccgaagaatcagctctatcatatgatttccaaagagaggttacctttcaccatgggatttgtgggcagcatggctgctaccatctacgtgtcaatggtgctccatagctacatactttcagttttcttctcttgtcttcaggtacttgcgctagcatattatgctatttcatacttccccgggggatctgctggaatgaagtttctatcatctgcacttgtgtcctctgtgctgagatgctttgggcgatgagctcacccgttagttgctctcacccatccatttggcgcgcattcatcgtaaccttgtgtagttccattacagttttgtctttttgcttttgctatagaggtagtgcctgtcaagatgaccctggtgctggtgtccattgaaatatgtgtgtataccactgtcctgtattgggagctctgttccttggattgaattatgaaaatcaggaaaatggaaatctatcgagattcgagagtcaatagtttgtgaaatttggaacacttgcactgtaacttaccttcaatcttgcattgggggatttcccttttttgactttaatctgcccatctgccttactactcttcactcctttgtttttctcggcaagtacggcggctcttccggcgacgccgccacgtccgagagcttgtacgtcaagggcaacacccactagaattcgtcccaatcactgggtggcgcctatgcggccgtgcctatgacagtagtagggtctcggtccaatccgcgtggcccacgtgtcggtgcggattgcatcaagattcgtgcgtgataaacatgtgttcctntccataatgttatacaatgttactattttttatctggattgttgccaggaaccagggaccaaatgcgcctggaacctt

SEQ ID NO: 37134 - DNA, 895 bp, Oryza sativa
  unsure (1)..(895): unsure at all n locations
  Clone ID: PAT_MRT4530_40891C.1
caaatcttttgcatattcacgataatgaagcttttgattttactacaatatgtgttctgtaaacaaatattaatttgccttgagtttgattattactggagtcatatgtactgtgtactgtgtaaatatgggggtgctgcagctgctcccctgatccggttcagataggctcttcttgacaggatcaccatgtctgcctttgtgggaaaatacgcagatgagctgatcaagacggccaagtacatcgcgacgccggggaagggcatcctcgccgccgacgagtcgacgggcaccatcggcaagcgcctggccagcatcaacgtggagaacgtggagcccaaccgccaggcgctccgggagctcctcttcacgacgcccggcgcgttccagtacctctccggcgtcatcctcttcgaggagacgctctaccagagcacggccgccggcacgccgttcgtcgacgtgctcaaggccggcggcgtcgtgccggggatcaaggtggacaagggcaccgtggacatcgccggcaccaacggcgagaccaccacccagggcctcgactccctgggcgcgcgctgcgccaagtactacgaggccggcgcccgcttcgccaagtggcgggccgtgctcaagatcggcgccgccggcgagccgtccgagctcgccgtcaagcagaacgccgagggcctcgcccggtacgcgctcatctgccaggagaacggcctcgtccccatcgtcgagcccgagatcctcaccgacggcgcccacgacatcaagacctgcgccgccgtcaccgagcgncgtctcgccgtcgtctacaagtctctcaacgaccacaaagtcctcctcgagggcacccttcttaagccaacatggtcacccctggctccgacag

SEQ ID NO: 37135 - DNA, 283 bp, Oryza sativa
  Clone ID: PAT_MRT4530_40892C.1
atctcctctccctctccgcccatttctcctctccacctgcgatccatccgcgcccgcgaggaggagggagccggacgccgccgcggggagagcaggggagagaaggagaggaggacactctcttcgctattagggattatcagctaacctctccatcaaaaacatcaacttaatatattatcatcacgcggtttcaagcattggcctctcaatcaaagcattgcctcaacaaggaacaacctgtatcaaacattacccgagctcggtggcaggcggggcacca

SEQ ID NO: 37136 - DNA, 289 bp, Oryza sativa
  Clone ID: PAT_MRT4530_40893C.1
tttactcagagaagttctcaagagtgaagcctagggaggtggtgacctgggtggtgctgtacacatagcttacttcataatggatgaaatgactccaggacaaagaggatggcgggaactcgaagctcttggagataagattaatcagtttagcggcataatagaaggctatatttgggctcctaaaggcagtgattcaaatgatagacatgatgattgggcttttgaggagggaccacactctgattttactgggccaaattgtgggagtacagcctgtgtagctttg

SEQ ID NO: 37137 - DNA, 563 bp, Oryza sativa
  unsure (1)..(563): unsure at all n locations
  Clone ID: PAT_MRT4530_40894C.1
ancttaaatggcgggacaaaaatctcaatgtgaggggtccttccaagttcccaaaactgaaggttttatactcggggtgacagcaaatatttttagttgtcctcctttcctttggaaaatgcaaaaccaggtgtttcaatggtggagccttccctttcacatatccgggaacagggtattcccaccctacattccacaaatgcaaaattttatagggtaaaacttctaccagtctacccaagctacaaggggagggttggcccgagtaactctacagggggtggggctgccctttctttttcaatttaatctggtttatgcggccgaacacgcatctttcttaaaagcaatttctgaggagctttaccggagagtaggggacaaatcaacttaaagagtcccctggcgaggagaatataaggaatatagtctacaagatcatgaatgatgattttgaactcttcttcgatcccatagaagatttgaaggactggctacaattcattaaggcgaatccccttagttttcaggatcttatacaattttggatggcattagccaaa

SEQ ID NO: 37138 - DNA, 458 bp, Oryza sativa
  Clone ID: PAT_MRT4530_40895C.1
atgacgacaacgaggctggcgtcctccgcttggctccgccaccccgtcggcttcgggtgccgtcactccgcccgcgcgtctgctcaccgccgccccactccgtcccgccaggcgccagcttcgcgtggcgctggtgactcagcgacgaagaccaaggttaaagcaccacggtggacaaaaccagtgccacgtaggataaaacccgtgtcccctacgcggcccaatctgcaaaacgcgcacgcgggcatcacgacgactctcctggaagccggaaggtgcggtcaaaccggcgtcgtccggaagcggacatcggccccgggagcgagtaaacgaaggttgacggctcgacgcgtgtgcgaccctgaactgtcccgtgctgggctggcgctcgtgctcagtggccgggagacacgcggtggcgagcgtcacacacgtgtgaagcgcagcgtcgccgccgg

SEQ ID NO: 37139 - DNA, 282 bp, Oryza sativa
  Clone ID: PAT_MRT4530_40896C.1
atggcagcttttcactacgagctactacacgacaaagaacatggacttggcggggttcttcacttttgcgggtcgcgaggcgcgcgcaaggaggtggacacactccgtgacgagctccctaacgtgctcaagcgttgcatcaatcaggcgagatttgtcatggacgtgatctctgaggtgctccccttggacaaacgggcactaagatcccccaccgacctggcgtgcgcatgcgtgctcgtcctagaggcaatggtgccagcgctagccgatcagacctag

SEQ ID NO: 37140 - DNA, 1241 bp, Oryza sativa
  Clone ID: PAT_MRT4530_40897C.1
ctagtggatccccgggctgcaggtcaggttgaatcaaaacgcttgagcggtggagccacagccgtacagccgtcggcggcggcggcggcggcgcgaccatctcctcgcggccagatgcgcgtgttccggcgccggagagcccaacgaatccgccgatgctaaagctccaagcttccctccctctcttccgcctccgtccccgccccagctcccctcctccctgcggcccccgtctccccttcgtcccaatttgcaagcggcggatgagcacccaggcgcagcccagtttcgcccctctccccacggcgcaatccgaatccgatgcaggggcagctgggtaccagttccggctggtttcctacaacatcttggcccaggtttatgtgaagagtgcgtttttcccgcattctccatctgcctgtctcaagtggaaaactcggtctaaagctgttctatcagaactcaagagcttcgaagctgacctcatgtgcatacaggagttggatgagtatgataccttctacaagaaaaacatggagaattctggatattcaagtatttacattcaacgatctggggacaaacgggatggatgtggcatattctataaaccaaaaagggatcctgaatggattgatgtaaaattggctcaagcaaagtatattctttcaagagttactcagtttgagaaacttatctcgaataaatttaactgtaaaccttcagtcatgattgctggtgacttcaactcaactcctggtgacaaggtatacaactacctcgtatcagccaactccgattctacggacgaagctccgatcaaattacgcagcctttatgctgcgaatggaggggagccagagttcaccaactgcactcctggttttacaggaacactggactacatattcttgtcggacggcagttcagtaaaacctaccagtctacttcgtataccacgaggggattctgccgaagtccaaggagggctacccaactttcaccatcctagcgatcatttgccaatcggtgccgattttcaggtactcggcagcgaaggctgattgcattttgcacggcagcaacaaatgtcccctgggatcgttccccgtgatttgtttggatttattgtagaaacagtagcaaatttattaatatcaaccagaatttttgttacatggtctatacattggagggtatttgttattattatctttaaagtttcaaaaaaaaaaaaaaaa

SEQ ID NO: 37141 - DNA, 2571 bp, Oryza sativa
  Clone ID: PAT_MRT4530_40898C.1
atgtcgacacgtgcgccgcgctctctcctcccgctgctcttcgtcgccgccgccgttgccttcttctcacgcgccgctaccgccgccgacgtcatcggccaggccgggttcatcaccggcaaccagacgctcgtctcgtccggtggcgtctttgagctcggtttcttcgtcccgaatggcgccaccgacggcaggacgtatctcggcatttggtacgccagcatccccggccagaccgtcgtgtgggtcgccaaccggcaggaccctgtcgtcaacgtccccgccgtcgccaggctgtccgccgacggccgccttgtcatcgccgacgcgaagaacaccaccgtgtggtcgtccccggctccggcgaggaacgtaaccgccgccggcgccaccgctcggctccaggacgacggcaacctcgtcgtgagctccgggtctcccggaagcgtggcgtggcagagcttcgactacccgacggacaccctgctcccggggatgaagctcggggtggacgtcaagaacggcatcaccaggaacatgacgtcgtggacgagctcgtccgacccctcgccggggtcgtacacgttcaagctcgttcccggcggcctgccggagttcttcctcttccgcggcccggcgatgatctacgggagcgggccgtggaacggcgcggagctcacgggcgtgccggacctcaagtcccaggacttcgccttcacggtggtctcgagccccgacgagacgtactacagctactccatcctcaacccgtcgctgctctcccggttcgtggccgacgcgacggcggggcaggtgcagcgcttcgtgtggatcaacggcgcgtggagcagcttctggtactacccgaccgacccgtgcgacggctacgccaagtgcggggcgttcggctactgcgacaccagcacgcccacgctgtgcagctgcctgccggggttccagccgcggtcgccgcagcagtggggcctccgggacgcgtcgggcgggtgcgtcttgacggccaacctcacctgcgacggcgccggcgacgggttctggacggtgaacaggatgaagctgccggcggcgacgaacgcgacggtgtacgccggcatgacgctggaccagtgcaggcaggtgtgcctgggcaactgcagctgcagggcgtacgccgcggcgaacgcaagcggcggggtcagccgcgggtgcgtcatctgggccgtcgatctgctggacatgaggcagtactccggggtcgtgcaggatgtctacatccggctcgcgcagtccgaggtagacgccttgaacgccgcagctaacagcgagcatccgagcaacagcgcggtgatcgccgtcgtcgtcgcgaccatttccggtgttctcctgcttggagcagttggcggctggtggttttggaggaacagggtgaggacgaggaggaacgagacggcggcggcggcggccggcggtggagatgacgtgctcccgttcagggtcaggaaccagcagcaccctgcctcgagcgtgaaacgggatcaacggctggatgtgaagagggagtgtgacgaaaaagatctcgaccttccgttgcttgatctgaaggcgatcgttgccgccacggacgacttcgccgcgagcaacaagatcggggaaggcggattcggaccggtttacatggggaagctggaggatgggcaagaagtagctgtgaagaggttatctagaagatcagtacaaggggttgtggagttcaagaatgaggtcaaactgatagccaagcttcagcacaggaaccttgtcaggctattgggctgctgcatcgatgacgatgagaggatgcttgtttacgagtacatgcacaaccagagcctagacactttcatatttgatgaaggaaaacgtaagctgctaagatggagcaaacggtttgagatcattgtcggggttgcacggggtctgctctacctccacgaagattcaaggtttagaatcatccacagggatttgaaggcaagcaacgtgttgctagacagaaacatggtgcccaagatctcagactttgggattgcaaggatgtttggaggtgatcagaccactgcatacactagaaaggtcatcggaacatatggctacatgtccccggagtatgcaatggacggcgtgttctccatgaaatccgatgtctatagctttggtgtcctagtgctagagatcgtcactggcagacggaaccgaggattctacgaagccgagctcgatctcaacctcctcagatactcatggttgctgtggaaagaaggcaggagcgttgatttactggaccagctgttgggcggcagcttcgactacagcgaggtgttgagatgcatccaggttgctctcctgtgtgttgaagtgcaacctagaaacagaccgttgatgtcttcggtcgttatgatgctagccagtgagaatgctacattgccggaaccaaatgagcctggagtaaacattgggaggcacgcgtcagacacggagtcatccgaaacccttaccgtcaatggtgtgactataactgcaatagagtgtagatag

SEQ ID NO: 37142 - DNA, 302 bp, Oryza sativa
  Clone ID: PAT_MRT4530_40899C.1
ctttgtgccgttaagttctataggatgaacaaaagcgtggatgttggattcgttagttcggttcataagacgacaataaagggttctcttcatgtctgctaggaaggaatccaatttcgcttggcaagacgattgtggtgatatgagagtagatggagcactgttgcaggtggagtcaggaggaagaaattacagggatagagggatagcgggagtctcttgtttacggtgagcctggtggaggcttgtcggggtagctcggtgtgagcggcgaaaaaggatcaactcaagtcctggtacac

SEQ ID NO: 37143 - DNA, 500 bp, Oryza sativa
  Clone ID: PAT_MRT4530_4089C.1
ctcctgcctcctccgcccctctcagtgcctcccccgacccccttccccccgcgcctcctctagggcttgcgtaacagggaggggcgtgagaggccggcaacagggatactggcgacggcggccaacggtggattggctgcggcgcctcccgccggaccccgtcctcccctctcagcgcctcccgccatcccccttcccctcttctagggttttggggcagcggcaggggcaagggcagccggcagggctgcagctgaaggcgcggtagcggctggtggttcggagcacggcgtgggcgtcttccctgctagctggacagtgggttcagttgttaaagacggcaaggcctagaaagttgcaaaggttgtatacagagatggtgatcataactttggaggtatcttttgacccaactcaaacccaacctagtgtaccggcaacgggaggggtagaagagggtgagccagtagcagcagcgatgggagggggagggggagggg

SEQ ID NO: 37144 - DNA, 182 bp, Oryza sativa
  Clone ID: PAT_MRT4530_408C.1
cttgattttgataaagagattgttcattgtacaatatcttcccccataggggatcaggaaaatctgcaaggtaacattgatggcacgatggacgatgccctggcggcttgccagaccgagtcagattctgtacagtggaaatgcccctccaagggcgactgaacctgcattcaatgagcccc

SEQ ID NO: 37145 - DNA, 567 bp, Oryza sativa
  Clone ID: PAT_MRT4530_40900C.1
aaaagggatatgcaataggaaccaggtccatccaattgagataatcgaagaaatctggccaggtgctattgaagaaatttatgagcttagtttaaaatctgagtggctcatgacttgacttgtgaatggtgagagtgaaaatatcagtgctgaaggatctggagtactctgaaaatcatgaatgggttagtgttgaaggcgattatgcaacaattgggatttcagatcatgcccagatgcaaacacgttcggcaagctagcgagttaaatggtgggttggaagagctctacaggaaagatgaggcagaactagctctacagcaaaagatgaggcataacttggttgaacgtttttttgtttctcttttttttgggtgaggggatcgccttttgtttctattgcatgctatgtaacggtggagagaatcattatcttcactatttgaaaaatgattctacagaagatgattgttttttatggcagtgcttgaagggctctgcttcgtggtaaaaaagaacacttgcgaaaaaaaaaaaaaaaaacctgcagcccggggatccactagt

SEQ ID NO: 37146 - DNA, 1497 bp, Oryza sativa
  Clone ID: PAT_MRT4530_40901C.1
ctagctgctggtacactcaacgatctcatctgcggcagccggcgagtctcttgtcagtttcaggaagtgtgtgcggttcgcggccaagtccttcctgagcagttcagagtacttctccagtgacttcttgaaatctgcaaacgatctgttgttgtcgcggggatgcttggtgcccttcgcagaggatgatccaacgactgcgccagatatgtatgcgtcgcacgcatccaggatgacgcgctcacgctcatggaagtggcgtgcaacaagggactcaaaatgctttggaggcttccgaagtgaatacatcattgtcctgcaggatagtaggaaggcagtctgattataagccaacgagtacttttctccaggagctgtattagccgaatttttgttgcctggctcattaaagtatggtttatcattcaacacaagaccctggatggaaaccagcaccggtggagattgtgggtattcagaaggaaagcgaacatcaaagaagaacagaccatcatgatatggagttccagctggcccaacaatagcagccctcagcagatcaatcctatcctcataagctctaacatagatagattcaggtagatctttctgtagaagcttccattcattttggattgtcttcacccaatctttggaggtcttccctggtgaattctttgcatagtaatgatcagaaaaatcttgcacaacatcaaattggttaaacaaattgtagccatcactttcagatccatattctttcttcttggaatccttcttcttcacacaaaacagctcgagcaccttgtttagaaccatccttaaaacccgcttcacgcgaaacgcaccagggaggagggccgccagacgggggaggaggtgagggccgaagaaaggaggaaaaagcctcgctgttcgatgtccactcgccgccgaggccactccaccatgtcgccggccatcgacctcagggtcgatttccccttgtagcatccggccaccggccagatccgcgccatcggagaggagctcgaggtcgtctaccaccagatccatgtcattgatgatataacacttgaacattcaggctcatgtttttgcacagatagcacagtaccattcccagttgaaaagggatccaaaaggctgttgtttgtactgacatttgcagtggggtgtggagcggcaactttacaaagaggattaatggctttgcctttcttcttggaatccttcttcttcacacaaaatagctcgagcaccttgtttagaaccatccttaaaacccacttcacgcaaaacgcaccttgagcggagccagcccaagagcccgcctggggggaccggaagcgcgagcgcccgagaagatcgccggatggagatcgcagcccctcaccaggatcctctcctctcccctgctctgctcgccggatggagatcgccgccccctcccatgctcagccgcgactcgtcttggcggcggcgcaagcagcgggg

SEQ ID NO: 37147 - DNA, 1236 bp, Oryza sativa
  Clone ID: PAT_MRT4530_40902C.1
tcaaatatttgctttcacctgcttgacgttagggtgcttctccttgcagtccttccttaacaccagcagcagcagcacgcatttctccatggctagataatttacataattgtacttctctggtactgagtccttgctgaaatggttcatgcttgaagttgaacagaggagggaatggacgaccatttgccatggcaggtgtgcattgggctctcgtagctcatcaaagaagggatgtgcacatgcgtcaagcctcctccagccatcttcaccgcgcctccgccgctctctccgagagaggccgtcgcataagtcaccggtggatctggcgacagggaagcgagggacacgagtcgccgccaccatcttctcctcttccatctccaccccaccatcgcctccctcgcccttgccctcgccctcttctaatcgctctccacggtgggattgtgggtattcagaaggaaagtgaacatcaaagaagaacagaccatcatgatatggagtttcagctggcccaacaatggcagccctcagcagatcaatcctatcctcataaactctaacatagatagattcaggtagatctttctgtagaagcctccattcattctggattgtcttcacccaatctttggaggtcttccctggtgaattctttgcatagtaatgatcagaaaaatcttgaacatcaaaatggctaaacgaattgcaaccatcactttcaaatccatattctgtccttgtcattgatgatataacacttgaacattcaggctcatgtttttgcacagatagcacagtaccattcccagttgaaaagggatccaaaaggctgttgtttgtactgacatttgcagtggggtgtggagcggcaactttacaaagaggattaatggctttgcctttcttcttggaatccttcttcttcacacaaaatagctcgagcaccttgtttagaaccatccttaaaacccacttcacgcaaaacgcacagtgttgaacactatgtgaaccagtataggaagcatatggagaaattttcattggcataatggcgtttctcaatgcaatgcagtcttgagcggagccagccccagagcccgccaccgcggcggcctcggggaagacgaagcgcgggtggaggaggccgttcgtccatcggcagaatgccactcccctcgggccagaactccggcgtgctctgctcgccaccccaaccgccgcggccgccat

SEQ ID NO: 37148 - DNA, 1496 bp, Oryza sativa
  Clone ID: PAT_MRT4530_40903C.1
ggcagaattggaccacgtttcgatcatccaattggtgtatcaccagaaacagctactaaacaaaatggctagcactgaactcaacccgaattcttgcataattaatccgaacgatcttgcctccaaacaaaaaacctacacagtatgtgtaacgagtgctatgatctatacaccattttcacttttgagttaggcaggtgaactgcaatggtcaaatgctctgacgattctagctgctggtacactcaacgatctcatctgcggcagccggcgagtctcttgtcagtttcaggaagtgtgtgcggttcgcggccaagtccttcctgagcagttcagagtacttctccagtgacttcttgaaatctgcaaacgatctgttgttgtcgcggggatgcttggtgcccttcgcagaggatgatccaacgactgcgccagatatgtatgcgtcgcacgcatccaggatgacgcgctcacgctcatggaagtggcgtgcaacaagggactcaaaatgctttggaggcttccgaagtgaatacatcattgtcagtatggttgattttgacttgccccacttctcgcatccagtaccccaccaggtgttcagcaggctaaggcaaactttcccactctcatacaagttttggatttagccgaagcccacccgaatggtaatgaactttcggtggagattgtgggtattcagaaggaaagcgaacatcaaagaagaacagaccatcatgatatggagttccagctggcccaacaatagcagccctcagcagatcaatcctatcctcataagctctaacatagatagattcaggtagatctttctgtagaagcttccattcattttggattgtcttcacccaatctttggaggtcttccctggtgaattctttgcatagtaatgatcagaaaaatcttgcacaacatcaaattggttaaacaaattgtagccatcactttcagatccatattctgtccttgtcattgatgatacaacacttgaacattcaggctcatgtttttgcactaatagcacagtaccattcccacttgaaaagggatccaaaaggctgttgtttgcacaacatcaaattggttaaacaaattgtagccatcactttcagatccatattctgtcaagaggattaatggctttgcctttcttcttggaatccttcttcttcacacaaaacagctcgagcaccttgtttagaaccatccttaaaacccgcttcacgcgaaacgcacctcgggtttgtctgaggtggtggtcgcgctctgcagttgagaggggccggaggaggagggttttagttgcagtcggtggagacgagactgcaggaggcaggaggagaagcggagacggacacagggacacttgctgctgctgctgctgctgcgttgcctctaccacttcggcgagagagagaggcgcaatggccgcgaggagggggtggaccgcacacttgcgtgcccggacgcgtgg

SEQ ID NO: 37149 - DNA, 355 bp, Oryza sativa
  Clone ID: PAT_MRT4530_40904C.1
cacaacaccatattttattgcacaggttaagaacctgcacagaaatacacactaccggaacaaatctaaccttgtttcaaatgcttgcacatccatgcacggggtccacacaaatacgtacatttatacggtacacgtccgtccatttactgaaccgggtacacacacgcacactttcctgaagagacgcgcatggtcagaaacctagttggcttagctgaaggcgatgcgtctccatggcatcacggtggcggcggccctcacttgccggggacgaatttggtggcataggcccaggccttgttgttgacggggccggtgaggtggcccgcgaggttttagagggggcccttgc

SEQ ID NO: 37150 - DNA, 405 bp, Oryza sativa
  Clone ID: PAT_MRT4530_40905C.1
atgctcggaccaaaatttatcgggctggcacggcccgaccagcacaccgggccgtgccatgctggcccacgacgtgcccagctgtcaggtcgggccgggccaggcactatcccaatcggaccacggccgggcggcgagccacaaacccgctcccctccctcccatggccatgacgctctacaccagaccatgatgctctgtcggcgttccctcatcgcaacactccggcggctggcttgctgcggcgtggcggccgtcgtcgacgacaagttccatggcaagaaagagttcgggctaccactggctgggaaacttcaaggagttcttgtcaccggcctagaggatgacgacagccgaattgtggcagtgacggtcttgttttccggcgacggcgaggatcgatag

SEQ ID NO: 37151 - DNA, 1271 bp, Oryza sativa
  Clone ID: PAT_MRT4530_40906C.1
gttcgacgcggctgcgccaaccgaaagcgtctcgccgcgccgccacgtctcgccggagcgcgcgcgcgcacacccacccgaacgccgccgccatgtcctgctgcccctgcaccaccaccacctcgtctcctctctccctgccacgccccgcttgcagaggcaggtggtccggcggcggcggcagcagcgccaacgccgccgcttggagggcgcgtggaggaggagcgaagcggagtttggtagtcgcggcgagcggcagcaaggatgagacggcggaggggaaaaagcaggaggaggagtcggagttcaacccgttcgggttcgtgacggacaacccgtcgagccgcggcgccatccagctgccggagtcgcccgcccaggacggcaatgtcggccagatgctctacaggatcgaggacaaggggagggagttcggctcaagagtgaaatcaggaaagctgcggtggtttgtgagggaaacaggttccgctggtgcacgacgtgggactgtcgtgtttattcacggtgctccatctcagtcatttagctatcgtatggttatgtctcagatggcagatgctggctaccactgctttgctcctgattggataggatttgggttcagtgatatgccacagcccggatatggattcgactacacagaagaggagttccacaagtcactcgatgagcttcttagtactttaaatatcactgagccattcttcttagttgtccagggatttcttgtaggttcatatgggctaacatgggcactaaagaactcaagcaaagttctgaaggtagcaattcttaacagtccactcactgtttcttctccagtgcctggattgtttaaccagctaaggttgccactttttggtgaatttacctgccaaaatgctgttttggctgagagattcattgaagcaggtagcccctatgtgctaaagtcggagaaggctgatgtatacagattaccatatctatcaagtggtgcacctggatttgcattgcttgaagctgccaggaaagctaacttccgagatgtattaagtagaatttcagccgggtttgcatccaacagctgggaaaaaccaatattgcttgcatgggggatttctgataagtacttgccactccccatagctgaggagttccagaaaggtaatcctgcagccataaaattggagccaatagaaggagctggtcatatgcctcaagaggactggccagagaaggttgtgacggccctaagatccttcttgtag

SEQ ID NO: 37152 - DNA, 510 bp, Oryza sativa
  unsure (1)..(510): unsure at all n locations
  Clone ID: PAT_MRT4530_40907C.1
cgcgtatgaaccagggcgcccctaacccgtggcacagtgtcgttcntcgtacgcgtagggcgctcgctagatacacgtgccctccaagacgtggggccggcccacccgggagtaacgtngatagccggccnccaaggnacgcgctgttcctccgcccanaggcccaaattcgctgggccccaagntcggccaagtacnacccaggacggcgaaggcccccccggaggccccaagggaggncattgttctcaagaaacttacgtcttactaatcccgatcccatcccagtcaagacagtgaacctgctgctgctgctgctaccgtactacagcttaccggcttatactgcttagtactcgagggcactgtacccagtgtgtcgtcacattacataaatcatgacaaattaaactatcncattaattatttccgaaaaatacgggtttcatcatgtatttcatcacaggaatcttttntagaccttgataaaaaccccccaaaaaaaaaaaa

SEQ ID NO: 37153 - DNA, 219 bp, Oryza sativa
  Clone ID: PAT_MRT4530_40908C.1
atgcctctagtctacgcaatctctgggaagaggaaaaagaccatgctccaaggaaaggagaactatgcctgggtaggagatctatcgttggaagcaaacccagtaatcacagtggcccttgtggagcaactggaggccctatggactacagtttgtgatgtgcagttagatgaagaagagcttgaccaaatctcatggaagttcactcctcatgggtag

SEQ ID NO: 37154 - DNA, 228 bp, Oryza sativa
  Clone ID: PAT_MRT4530_40909C.1
gcgcgacgatagctatgctgccatcaacaagaattctggcggggggtaagccgtgcaaatcactacagaggatggaatccttagagggcagggaaggacatctcggcacacctctggaagcccatcaacgactatcatccatgctcgctcccggcgctgcgaggctacagacacaccacagcctatgccaaaggggacaacagagagcatatcccacatgatgaatcc

SEQ ID NO: 37155 - DNA, 1398 bp, Oryza sativa
  Clone ID: PAT_MRT4530_4090C.1
atggccggatctggagaggctggcgccttcaacggtaggagagcaattccaaggggtagagttgaagccgccagagcacctagaaagggtggagttggagttggagccgtcgacggatttgtctggattggcgttgtggctcttcttaagaagtcggggcgcttctcgtctcttgatgagtttgacaacgatgacttgagtcgtgacatcaaaaccaataccttgacggcctcctcgtttcatgcaaggccatcagttggcgccaacgcacgccggtgtggtttcctctccaaaattaaggcgtcccctctcccaaccgcacgtcgcgcgttccctctcctcgccaccgccgtcgccgccgccgccgccgcgccgttccccgccccgaccagacgaccgccgccgccgccgccgccgccgccgcgctgccccggcggcagcgccgccgaccgccacatgacacagcctccccggcgacccgacgccaccgagacgacgaccgccttcctcggcgccgcgtccacaccgagcccgcggcccgcgccggccaccccgctcccggacgccccgtcgttcctgctcggcccgtccacgccgctccccccgccgctcccgccgccgacgtcgacggcggcggcggcggcggcggcgaaggcgaagcaccagaagcagcagcagcagcagacctccaagcactggtcgcggccggcacggttcgtgcggtcggtgcgcgccgcgttccggtcgttcccgatcctcccggcgccgtcgtgccgggggctgccgtcgctgccccacctcccgggcctccaccacggcggcgcgggcggcgccgtcaggaaccacttccacggctccacccgcaccacggggacgctctacggccaccgccgcgcgcgcatcaccatcgccttccacgacagcccgggcagcccgccggcgctgctgctcgacatcgccgtccccaccgccaagttcatccaggacgtcagcgccgccggcatggtgcgcgtcacgctcgagtgcgacaagcagcagcatcagccgccgccgcacgcgcacccgccgggggatcccctcccgccgcggcggctgctggacgagccggtgtggtcggcggaggtgaacggcgagagcgtcgggtacgcggcgcggcgggaggcgacggaggcggacgagcgggtgatgcggctgctgcacgccatgtccatgggcgccggcgtgctccccgccgtcgccgccgacgcgccgacgtcggcggcggacggcgaggtgacgtacatgcgcgcgcacttcgaccgcgtggtggggtccaaggacgccgagacgtactacatgcacaacccggagggatgcgccaccggcccggagctcaccatcttcttcattaggacatga

SEQ ID NO: 37156 - DNA, 529 bp, Oryza sativa
  Clone ID: PAT_MRT4530_40910C.1
tttttttataaacggaacatatacgttttcatttgatactttcatttctgtttgtagagctctatgttgggacttacagttggttttctgaaatagtttttcctttaattgaaagaaagaaaacccattttgttcgagaccctgttgatttggttgtctaatttgttctttcacctagataacacacttctcatttcttgattgtcacttacatttggattctaaatctttacttagcaccttacttttggatttcatcctttgtcaccaaagcatttatttgatttagcatttgacacctttatttggattctaaaacttgcttggtacccatctattttccaccaagatggtgtttccttttatcacaagctttattttatttggctttgggtaatttggtggctgtttaccgaataaatatctctgttgagttcttcgtgctttacatttactataaatttaactattatgtttggtacttacggattccaaatttggtgttcccttttatcaaaaaaaaaaaaaa

SEQ ID NO: 37157 - DNA, 427 bp, Oryza sativa
  Clone ID: PAT_MRT4530_40911C.1
gtcgactctagaggatcccccatcaccacccactcaaaccccatcgccatcgccagccgccaaccccgctagatccagccaaagcggcagcccgatctgggtgtgtgctccgccgccaccaacgggcgccgtcgccaccgcaaccgaccgccagttgccacctccatcactcagccccgccgccagccgccaccccgtcagatccggccggaacgacgcagatctagatggttgccaccgccgctgcccaggcagctcccccggccgtccgggtgcatgctgggcaaagccccgccaccgccgtccttgcggccgcgcggctttgccggcgcctgctcaggcggcggcgagccagggaaaggagggggaggagggagtcggcagcggtgttgcctctcgtgttcgtgttgtgaatccagaatattga

SEQ ID NO: 37158 - DNA, 402 bp, Oryza sativa
  Clone ID: PAT_MRT4530_40912C.1
atggcgtactctccccctcctcacctagccgccaccgccacgccactgcgccggcgcgcccctctatctcgccctctcccctccggccatcctctttccctccgcctccagtcgcacgcgggccgcagccacacgcccttctccctcctgtttccaggcaacggcgcgcgggttggcggcacaagggcggcgcatgggcggcaaacgaggagcgaacaagcgacgcgcgggctggcggtgggcggagcgagggcgacacgcgggcaacgcacagccacggcaagcccgacgactgacaagcaggcgacgcacgcgagcctcttcctccgccagtcctcccctggtgactgcgggtccccagtcgggttgcggggccccgtaggggccggggccgagggttga

SEQ ID NO: 37159 - DNA, 210 bp, Oryza sativa
  Clone ID: PAT_MRT4530_40913C.1
atgggtgcctcggttttccacgaaaccctgcgctccgtccgcaacgccccaggctttgcagttgctgccagcctgcaggcctcactggttgcgatcaggtacggtatggcacgctttgcaccggcgctggcgcacgcagcgccacagcgtagcgagacgtcgatcccgtggtggtcggtttaccaccaggggcgagaagaagagctctaa

SEQ ID NO: 37160 - DNA, 190 bp, Oryza sativa
  Clone ID: PAT_MRT4530_40914C.1
cggacctagggcgtctagggttcgtcgggcaccgcgtgccggagatcgcctctcgccgccgacaccggatcttcgccgacgacgtcgatccaggtaatccgctccgcagacaccatccgtattcgccggtcgatccgccggcctgacgcccggaatattgacggctcccgcgacgcgtgacgcccgcgaa

SEQ ID NO: 37161 - DNA, 521 bp, Oryza sativa
  Clone ID: PAT_MRT4530_40915C.1
gaacagaaaatctaccagagcatagattattgcaaatgttgtttgttacaattgacacttacaaaataacatgacaacaattgccaaaatgaaaaaaaaaggaaatgaaatcaaagctttctcaaaaaagacgcgcgaccaaaactaaactgattatgctattctccctcaaactcaatactctagttttcactccctccagttaaaattaggccggccaaatcatatcactaaaaatgcaacaaatgattactgcctataccatgacttatatacattatgagtttggggaaaaaaatgagatgccctagcctgatcaaagtatatgcatgcatatgccctggtaaattgtcctgatggcttttttcaggcttgtatttacctgttaattagggtgaaatgtaaaccagaccagcacatgaccgggtttacaaaaaaaatgcgtctgatcaaaaaaaggggggttccattccatgggcaaggtggttctaacttttttttatagcccattattgggcaaa

SEQ ID NO: 37162 - DNA, 985 bp, Oryza sativa
  Clone ID: PAT_MRT4530_40916C.1
gacaacgatggtttatttctcctcttgagggcgtttcgcaaggtacatctccagccggtgcatgataagatcaaaggccgcctatcaggttggaagccatcgatgttgtacataggagggcgccgggttatgcaatttcttcaagaaatcgacaaagcaagaagacgcttcctttgggtcggtaatgaggaaatacgtggggcgcaaatgcaaagtaatgaggttctgctatggcggtcttggagttcccaacctggaaaaatttgctagagccttgcgactaagatggcttaggtatgaatggaaggcgccaaataaaccctggataagaaccgaaacaccatgtgatgatcttgataaggaattgtttgcggtatcgactagagtcgttattggggatgggcgaaaggcgaacttctgggaatccaactagattggcggacataggttcaaaagtctagcgccgaaccacttcaggcactccaataggaaaagccacacagcacatgatgccttgcaacatggaaggtggataaatgacatctatcataacctcactatcaccattctttcagaatacataaagatctgggaggtcttagcacttcaatgcccacaactgatagaaggagtagaggatttgattacttggagatggacggtaaatggggaatacagcgcaaaatctgcctatctttaccaatttgagataatgacaaccccgccgtcagcaacgttatcttgggaggcatgggccccagcaaaatgcaagatcttcagttggcttgcgattcaaaatcaggtatggatagcaaatagtttgcaaatcagggggtggccaaacaattacttatgccagttatgcttttgaaaccttgaaaccatcaaccacctgctattcgaatgcctagtctcgaagcaagtctggtttgacgtgctccattggctacgataagggcacatcatcccgaggtggagcactagc

SEQ ID NO: 37163 - DNA, 3128 bp, Oryza sativa
  Clone ID: PAT_MRT4530_40917C.1
gtcttttgacctccagaaatcatcatctgactagctctgcgcttcgatggattagctgacgaaagaagacccttgttctgatttacagggttttcatcacattatttcgccatctgctgcaataatacttataactacaagctcaagtcaagcccccacgagcacaaatggcagaggctgtaatgcttgtggtctcaaagattggctccgttttattagaggaaatcaccttcacagtgataagcaagctatctgaaaagattactaatctgaaggaattgccggtcaaggttaaggaaatagggaaagaactgaacatgatgaacacttttataaaaaggataagtacaaccgatcttacagatgatgtcaaggcctggattgctgaggtgcgagagctggcccactgtgttgaggatgtacttgataaatattcatatcatgctcttaaattggatgaagaaaatgctgtgaaacaaatcttcaccaaagctaattatatcaaagttttcagcgaaattgctgatgagattacccagatcgaggggaaaattgagaatgctgtaaagcggaaagatcggtggctgcaactgtctgagcttacaccctacccactggctgatgttcaaagaaaacaatctcgagattgtctactggaacttgttcaagatgatcttgttggtattgaagataacaggaaacaattgaccaaatggttgtactccgatgagcaaggcagcacagtgataacagtatctggtatgggtggacttggaaaaaccaccctggttgcaaatgtatacgagcaagaaaagatgaacttcaacgtttatcattggattgtcgtgtcacaaaaatatgacatagctgaattgctgagaaaaatgttgagaaaatgttggtctctagaacatacacagctagcagatttggacgctcatgacttgaaaagtgccataaaggaaagattaaaagatagtaaatgtttggttgtattggatgatgtctggaaccgagaagtatacactcagataggggatgcattccagaaccaaaaagcaagtcgcataatcatcacaacacgacaggaccaggtagcatctttagcaaacataacacggcaactcaaactcctgccattgaagcacaatgatgcatttgatctcttatgtagaaaggctttcaatgccagcatgggctgcaagtgcccgcaggagcttgagaaactggctgatgatatagtagataggtgccaaggactgccactagcaatcgtatctataggtggcctgttgtcttcaatgccgccaacgaaatatgtctggaatgaaacatacaagcaactacgaagtgatctagcaaacaacaatcatgttcaagcaattctaaatctgagctaccaggacttactaggagaacttagaaactgcttcttgtattgtagtttgttccctgaagatcatgagttgtcacgggagacccttgtacggttgtgggttgcagaaggctttgcagtgcaaaaagaacataacacaccagaggaggtggccgaaagatatcttcgggaactgatacaacggaatatgctagaagttctggaatatgatgagctaggcagggttagtaagtgtaagatgcatgatctcgtacgggaccttgctctttctattgctaaagaggagaagttcggttacgcaaatgattttggcaccatggtaaagacaaacagggaagttcgccgcctgtcatcatgtggatggaaagacaaaactatgttgaaagttaagttcctgcgtcttaggaccctagtggcacttggaattacaacatcctcccctcagatgttatcctcaattttgtctgaatccagctaccttactgttctcgagctacaagactctgaaataactgaagtgccggcatccataggaaatttgtttaatctacgttatattggcctgcaacgcactagagtcaagtcacttccagagtctattgggaacctgtccagcctccacactctcaacatcaaacaaaccaaaatacaaaagctaccacgaggcatcgttaaggtcaagaagttgcggcaccttctagctgacagatatgaggatgaaaataagtcagagttccggtattttattggagtgcaagcacctaaagagctatccaatctggaagaactccagacccttgagacagtggaagccagcaaggacctggctgagcagctgaagaaacttatgcaactacggagcgtgtggattgacaacataagtgctgctgactgtgcaaatctttttgctacactatcaaagatgccgcttctttctagcttgcttctatccgcaagtcacgagaaggagacactttgcttggaaaatctcaagccaagttcggaaaatctccataggttgattatcagagggtgctgggcagctgggacactacagtccccaatatttcgtgaccatgggaaatttctcaagtatctggccataagctggtgccatcttcaggaagattctctactcctcctagcaccacatgtgccaaacctcacctatcttaaacttaacagggtgagtagtgcaagcagcttggttctttctgcaggttgcttcccacagctgaagacgctcgccttgaagcgtatgcctgatgtaaaccacttggagatcataggcggtgccctccagcatattgaaggtttatatgtagtgtcactcccaaagctggacactatccctgaaggcattgagtcccttaggtacctgaagaagctgtggcttttgggtctgcataagaatttcagatctcagtgggaaaaaaatggaatgcaacaaaagatgcaacatgttccagagttgcgcgtcaaggactagaaacttacttgatttgccgtaatatctgtctggtgagtctgtgttcagccacactccaacaaatgatcagtttatgacagatgagctagcggcaccactacattgcaacctcattattggaaataagtcctgaaatattggctatcctagccatcagggaattcctgtgtcatattttctattgtatttttatttcttcacaactttgcggaatttatggaactggtcctttcattgttgaac

SEQ ID NO: 37164 - DNA, 801 bp, Oryza sativa
  unsure (1)..(801): unsure at all n locations
  Clone ID: PAT_MRT4530_40918C.1
cgcaaggtacatctccagccggtgcatgataagatcaaaggccgcctatcaggttggaagccatcgatgttgtacataggagggcgccgggttatggtcaactcggtgctaagttccatcccaacgtatgtcctcacggtgttgaagccgccaaaacaatttcttcaagaaatcgacaaagcaagaagacgcttcctttgggtcggtaatgaggaaatacgtggggcgcaaatgcaaagtaatgaggttctgctatggcggtcttggagttcccaacctggaaaaatttgctagagccttgcgactaagatggcttaggtatgaatggaaggcgccaaataaaccctggataagaaccgaaacaccatgtgatgatcttgataaggaattgtttgcggtatcgactagagtcgttattggggatgggcgaaaggcgaacttctgggaatccaactagattggcggacataggttcaaaagtctagcgccgaaccacttcaggcactccaataggaaaagccacacagcacatgatgccttgcaacatggaaggtggataaatgacatctatcataacctcactatcaccattctttcagaatacataaagatctgggagccgggccaaggcggcggcggcggccggcggcgaggaggagtcggcgaggaggcgggagcggcagagcgggcaggtggcgtggtcgtagtcaagccatgtctcgaggcaggcgcggtgaagatgtgaccgcagggaggcgttcannnnnnnnnnnnnnnnnnnnnnnnnnnnnnnnnnnnnnn

SEQ ID NO: 37165 - DNA, 252 bp, Oryza sativa
  Clone ID: PAT_MRT4530_40919C.1
atgacgggggcggtagtgaaaaaggggtcctgccaaaaccatgcaaccagcaaggattcaagctcagggcatcaagttcatctgggcgaagcccccatggcgaagactgtgaagcaaaagcggcgaagggcgaaggatcgcgctggtatcccacaaggccaaaggcatcttgggcgaaaactaaatggcgaagggtgcatgccgaaggagggtgacttctccataacgagtccagcttcaaggaggccctag

SEQ ID NO: 37166 - DNA, 273 bp, Oryza sativa
  Clone ID: PAT_MRT4530_4091C.1
gactgcttgatctcggactgtgaagtgcattcatcttctggtgaatgttgcttctttgtgaaacatctcagggaagcctccccatccactcttaccgaagaaacgagcgatatccgtgctgctctccgccttctctattcgcttgagacgcgtggtcttgtttcatctgattcggtcagcagctccaataggatcggcgggctttctgcaagtggtattagggaggttctggaggagggtggggagattgccgagggggtgctggaggtgagt

SEQ ID NO: 37167 - DNA, 563 bp, Oryza sativa
  unsure (1)..(563): unsure at all n locations
  Clone ID: PAT_MRT4530_40920C.1
agggaaacccccggcattttttacacatggaaaatttttacacacaaacccccttctttgggttgtccctaccccttgataggaaccagcaggctacctaacactttccggtctctggtattactaacaaaaacagcaagctactaggaacctcgtgccaaattcctgcagcccgggggatccactatttctaaaacggccgccaccgcggtggaaccccaccttttgttccctttagtgagggttaatttccaacttggcgtaatcatggtcaaaactgttcccgtgtnaaattgttntccnctcccnatccccccnantttaaacccgaaaccttaattttttancccgggggccccataattnaccacccccnttaattgntttgccccnctnccccttcccatttgggaaatttttttccncnttnntaataatccnccacccccggnaaagggggtggtttttgggccnccctccccccnaanccccccngttnggngggnaaggtttnncnnnaagggttttggttcccaatcgggaaccngaaaantttttcagnt

SEQ ID NO: 37168 - DNA, 232 bp, Oryza sativa
  Clone ID: PAT_MRT4530_40921C.1
ctgtacaccagcacgtacgcggacccgaattaacaggtctgatccaggcgtccaacgacacgttcgaaaaaattgatggcaggtcccaaagacagggtctcgacgatggtgagctagttgcgctatcaggggctcaaactatcggaaattgccggggtgtcaggtggcgacagaagctgtacggccaggtgaacaaggtcgggaaagaggatgtaacgctagaatcaacagt

SEQ ID NO: 37169 - DNA, 225 bp, Oryza sativa
  Clone ID: PAT_MRT4530_40922C.1
atgtcaaagtatcatgagagcgagtctgatgcagaagaagacaatgatgtgtacttcaattatttggtaaacaagttcatcaatgttgctacaaatgtagtccaaccaaatcaatcggatgatgatagtgatggtgacttcgaggaggctcttcagcgtatttctaatgaatatgcagagagctctctgaaaaattataacaatgatgagaagaacaaaatatag

SEQ ID NO: 37170 - DNA, 736 bp, Oryza sativa
  Clone ID: PAT_MRT4530_40923C.1
ggcaatgatgattaaaagtaaacttaaattgagataaatgggagggttcgtacccaacttgcttttgtgtttctcataacccctaggaaggatgttgggataatgtgaaaagaaataaatccacattgtaaaaaccagtaaagccaatcatagcgtcttcagtgtctctgaaaatatcaacaaaagcattaaagcatgcagatccccagctgacaggttaaaacaatgtggatctagatggaacagtcgacgtggttgaagaagacctcaggcggcgcatcggtgggtggaaaccagaaggtagctgtcggcgaggaagcaggtggagaggtcgtcgaggggcgcgacgatggcttcgatggggtgcggcgcaggattgggaatttgggagacgagcaagctagtcatcggctgcggcgacgcagaacgcggcgggtgcgaggtccgctcaccggttgatggcgatgctggtgtcatgccccgccgcgtgagctacccgacatgctgctttgttctctcccggtcgggccaccccggcgtgcacggtggagaaccccgcgccgccgagcgagtcgtgcagtaccatccgtggcggccgcggggaagggttcccctctggctcccatgtagccggggattgaggcggcgatggggaggcgccgcggcacagcagcggctgggggcgggggtgccggggatgggcgcgcgcgatggggaggcgatgaggtgcccctga

SEQ ID NO: 37171 - DNA, 181 bp, Oryza sativa
  Clone ID: PAT_MRT4530_40924C.1
atagggaaagatggtgcgcctgcaggaaccgcccgggaattttcggcgggaccgaggcgtccgccggctcctgaacctgctgatgagaaccatcaccatcgggccgagcagcatcgactacatcatcagtcggctacaggagcgccggcccgcccatcatcatacacttcacgatactgcc

SEQ ID NO: 37172 - DNA, 102 bp, Oryza sativa
  Clone ID: PAT_MRT4530_40925C.1
atggtggcttctcacgccggctacgacggcggcggcgtatctggcggctacccgcatgccgggaatgctgatgggcgatcgatcgctatggggatgaggtag

SEQ ID NO: 37173 - DNA, 1838 bp, Oryza sativa
  Clone ID: PAT_MRT4530_40926C.1
agtggatccccgggctgcaggcttgaagcctgcttatatgtggagttggaggaagaaggaaggaagcctaggaaagcctcccctcaccttctcaactcaccaaacgcttcttggtaggagaattggcagaaaagtttcccccttctccttggatcctttaattacctcctggcaattgccccggccgggataaggccggacagggagagggttggagaggagaggagacacaggtgctgggaagaggcctgtggggatcaagaagatgaggaggtgggtcttggccattgccattcttgctgctgctgtatgcttcttccttggagctcaggcccaggaggtgcggcagggccaccagacagagaggatctcaggaagtgctggtgatgtgttggaagatgaccctgttgggaggcttaaggtctatgtctatgatctcccaagcaagtacaacaagaagctgctgaagaaggatcctaggtgcctgaaccacatgtttgccgctgagattttcatgcaccggttcctgttgtcaagcgctgtccgaacttttaatcccgaggaagctgattggttctacacaccggtgtacactacatgcgacctgactccctccggtcttcccttgcccttcaaatccccaagaatgatgcgcagcgcaattgagctgattgcaacaaattggccttactggaatagatcagagggggctgatcatttctttgttacaccacatgactttggcgcttgcttccactatcaggaagaaaaggcaattggacgtggaatcctcccattgcttcagcgtgccaccctggttcagacctttggacaaaagaaccatgtctgcttgaaggacggctcgatcaccattccgccatatgcacccccacagaaaatgcaggctcatcttattcccccagacacccctcggtctatctttgtatatttccgtggtctgttctacgataccagcaatgatcctgagggtggatactatgcaagaggtgcccgcgcgtcggtttgggagaatttcaagaacaacccgctgtttgacatctcaaccgatcacccacccacgtactacgaagatatgcagagatctgtgttctgcttgtgcccattgggctgggctccatggagccccagactggtggaagctgtggttttcggttgtattccggtgatcattgcagatgacattgtcctcccctttgctgatgctatcccctgggaggagattggcgtgtttgtcgccgaggaggatgttccgaagctggacagtatcctgacatccataccaacagatgttatcctgaggaagcagaggcttctcgcgaacccgtcgatgaagcaggccatgctgttcccccagcctgctcaggcaggagatgcattccatcagatactgaatggtctcgctcgcaagcttccacatggcgaaaacgtcttcttgaagcccggggagagggccctgaactggactgctggaccggtgggcgacctgaagccttggtagcatgcatctcactgcctatagagatgtaaaaacttttttgaaaaagatatatttacagacatgatatatacttgcgccttgagatcaccatggttgcatagtgctgaccataaatcaacaaatgtacatttttttgtatctttttccctgatagctatataccatatatcttcattccttttcttcccattagcggatgaaatgccggcatttgtccgctttgtccatatatgtggataactggatatcataatgaaattatgagatttaattcatgctgaatgcgtgacataattaaaaaaaaaaaaaaaaagcggcc

SEQ ID NO: 37174 - DNA, 3537 bp, Oryza sativa
  Clone ID: PAT_MRT4530_40927C.1
atggtcaccgccggcgaccaccggcacggcagagcggcgcccgagagagcggagaggagagggaagcgaaaggggcggtcttcggctcaccccgggtcgacggcgacgacgggaacggcggccgaagcggaggaaggcggcggcgcggttcgggacgacgaggacgacggcgctccgacggtcggcgggcgaaacggaggcgcggacgaggtcgacgaggacgcggcgaagccgatggaggtgacgccgagacgggaggaggaagtcgaagccgattctattgaaattataggagattccttgttggtgatcagtcaattagcaggagaatatgaatgtaagaatgatgcgctcatgatctacaatgagaagtgcccagaattaatggacagttttcggctgctaactttgaaacatgtctctcgagagcaaaatattcaagcaaatgacctggtgcagggggcgtctggatacaagccgatggggaatttacatggttgcccttatgaaagggacatttacatgggcacccttcgcccagaatgtacagtcttcgccataggggtccatctcttgccgtcctcgctccattgtcttcgccatgtggcttcggtgtctttgccgtggggcttcgccccgttgaaacttaacactttgagcctggatcctgactggtcgcacggtttcggcaggtctggtcgaagggtctcacgacataccgccaacaagcccctcacgggcaagggtcagatgggagcttcggccaagaccatgcaaaccatgtgcgcccttagagtcgctaggtcgttcgcctgtccactcttttcgccacaacacacgcttttcgccatggctccccgcaaaccgaatccagcctccgcgacgggcctcgatcccggccaaattgacgacgacaccaccgcctttttaggggtttcgcttgtggacagggaggagctggcgaagttggtcagctctggcgcggtggtggaggggcaggctttcgccccggggaaggccgttgtgccgaagcctggcgacaaccggacggttgtgttcaccgtcttctgcgaggcagggcttcttcgatttccgtgcaacatactgttgccggagatccttctcatcttctgggtggagcttccccagctgagcccgtcggcgctcgtccacatcgccatctttgactgggcgtgtcggaccgccaggttcaaaccgagcgccgagctcttcggcgcggtattcttcaccactatgaactcaaagacggtggtcaccccagccgggacgaagaagactgtattcggcagcgtgaacttcaatgttcgtcccgagcgctccgatctctggccagtgaacgccgccatgtcgaagctagatcgccattggatggcgaagtggttctaccactccattcccttcgaggatggatctgatgctgtaaatgccctcaggtggcggcgtgggacaatctcgccgaacaggaagcccaaggttgccattgatggcgccatggaggcctggttcactctgctacgcaatatatgctctcgcctcagttaccgcgacctggtggaggagttctgcatgcttggcatcttccccctttccaagtcgtggcaagtcgaaatcgaccaaggcagggaggtcgacggcctgccaaagctcgtcatgcctgcggaggcgagcggtaagtatatgtttagccatactttttgtggttcgacgcctgatatggctacacctttcgtcctcgcagttttgactcttgcacaggccgagaccaaagctcgaaagatgatcggcgacgtgtcggtcactgagttcagccagctgctcacacggcaggcggccggccgggcgaaccgggttcatgatggcgaactgcctccccgtgcgacctccctcaagggcgatgacgatgcggggccttcgcgcaggcggatgcgcgggcaggtgaaaaaggccccttgtaagcgaagggaacccgactccgacgccgatgacgaggagactgcggaagaaaacaacgacgaagatgagggggaggatgtgaaggaaacggaggctgtgggcgaaaaggccacgggcgatgccgccaacaatcgcgccgagacgcccggctacaccccaacctcgagccccgaacccgtcgagaccggggtggagtcgaactgctcccccctccgcccaaaggatgtggagggggcgatggcgctggtcgtgatcacggcggccaaagtggggtcgattaaaaagacttccaggaaggggctcgtcgatgtcggtcgcgtctttagtgacgacaagtcctcgaacgagacccctactttgcctgccggccggagcttggatctttcgacgggcgtgcatggctggcgggagtgttgccggtacttcggcttcaaccgatcagagtgcgaagaccgcagccagggtcttcggcagcccgagcagaacgagttcgacgagggctgctctgccgtcaagagcttggcggtccggaactgtcttcgagccaaagatgacgaactgggccgcaagaggctggaaatggaaggcctcacccacgccctcaaagagacgaaggccgagaacaagcggctccaggctgaattggagaaggggagcgaggcgaaggcggagattgagcgcctcaaggccgagctcaaaaaagagcagggtcattccgccgttctgaccgactactacaaccttaccgagccaaagatggaggctcttcgccaagaggtcgtcaaagcggagacgaacgccaggaaggaggcacagcggttcgcgtgggagatggcgaaagcgactgagtccgcgaagaccgcttgccaaacgcttcgccttgcccattctgatatgggggcgagagtgcatggagtccctggcgaaggtgcttccgcattcgacttctccgagtggactcaacaagccggcggtgtagtctcagactgtgccactgcgtatggcgacagctgtgcgcgcgtgtcagcgtctttcgccctgggtcttctgcaacagttcggctgcgagcacgtcgccgagttccccaactttgcgaaaggggactgggagattagtgtgcaggacatttcgcctgctctgcgagcttggcgtaagcagttctggcagaaggatggccgctccgttgctaaggcgcgcctgcttgagcagctggcgaaggcggaggcggcggatcggggcgaggagccggcggccggcgggggcggaggcgatgccgaggatcacccagagggcgttcaccggaagttgtgtgttcggcctccctttgggaatcggcgaagcaggaacgagaagttcgtggcagtgaaggttttgccgaaggtgcgatgcccgtttcggcctatttaccgcgagatgataataaacggcaacagctacaaggttttgaaagttgtcggctggatgcgggcgcaccctgggcgaaccctggagaactacgatcgtgtccatacagagcgccaggaggatatgggagtggagattgctttgggggcaaagatgtga

SEQ ID NO: 37175 - DNA, 337 bp, Oryza sativa
  Clone ID: PAT_MRT4530_40928C.1
cccacggacccaaaaggttcaaatggatgggaggggaaataaaaaaacccccgccccgaataaaatttaaaacccaccccaaaaagggaaccaaaaacaaactccacaaaataaaaccaaaaacttcgcttaatcaaaccaaaccagggggaaattgatttcccaaacaagccaggaacttaaaaaaggataaacaccacccccaccttttgctaatttaaggcttcatcaattcaaaaagattgttcttggaaaaagggaaagggaaccaaaacactattaggaggggtccattaatggaggaaaaacaaccggattgggggggccccccccaggg

SEQ ID NO: 37176 - DNA, 222 bp, Oryza sativa
  Clone ID: PAT_MRT4530_40929C.1
gtttgggcccaccatagtctggacgggtggggaaaccgctgcgagtgcgacccccgccgccgtcgccggagaagaatgggtgggcggggcggaggaatacaggcgattccctccataatctccggcaatagctacatggatttttctagcagttatggaggcttggcttctgatcaggtgcaatgccggcgatctgagctggtggagtataccaacgtaagg

SEQ ID NO: 37177 - DNA, 239 bp, Oryza sativa
  Clone ID: PAT_MRT4530_4092C.1
gagatggggagccgccagctgttcatcacgctggtgcggagcctacaggggacgcgccgtctccaccgccgaaagattgaggacatgcgcgtccgaaggtgccacagaatggtggagcaccagtaccacgcttcccctattctagaggacgagctcaggatggaccggcaggagctgcagactctgtagggaatcatcgaagaggtcccgtggtccgatatctgcctagcgaacgagat

SEQ ID NO: 37178 - DNA, 267 bp, Oryza sativa
  Clone ID: PAT_MRT4530_40930C.1
atgggcggatctgctgatcccgaggcgccgacgccgacgccgtcgccgtccccttccccggcgaaggcgactccttcgcctgcttccgcggacgggaatcggttgcggcggtgcgttcagtcgaagctctcgtggggacctcccaaggcgggcggaggcggaggagaagcaggaggtgccggtctccctcccctggccgcgggcgatgggacgccggagaaggtgaaaaagagaggaaggccgcggaaatcagaggccggcaagaag

SEQ ID NO: 37179 - DNA, 747 bp, Oryza sativa
  unsure (1)..(747): unsure at all n locations
  Clone ID: PAT_MRT4530_40931C.1
ctcaaccccttcccctaccaggcgcggctgccggcgattgcttgatccctccgcctccctgcctcgccgccgcgcgccacctcgccgtcgaatcgaaggctataagctgctccggttttagataaattaggcatctttcaatgcatcgtgttggaagtgctggtaacacggcaggttcaagtcgaccgagaaaggagaagcgctttacatatgtgctgaatgacgctgataacaaaaagcattgtgctgggatcaactgcttgtcatacctaaatgcctctacttctggtacgagtgattatctttttaccgggagtcgggatggtaccttgaagaggtgggaaccaaaaaatggagtcgcaagcttctcagcaacttttgagtcacatgttgattgggttaatgatgccattattgttggccaaaatcttgtttcctgttcctcagataccactctaaaggtgtggaattgtttatcagatggtgcttgtaccaggactctccgccagcattccgattatgtgatttgtcttgctgcatctgaaaaaaatagcaatattgttgcctctggtggccttggcggnngaggtctttatatgggaccttgattcttctcttgctcctgtggccaaatctgtagatgcaaaagaggatgaagctcctaatggaaactctgggcctgctttgacaaccttgtgcaatgtaaattctagcagcaaccttgcttccaccaatgggcaatcacat

SEQ ID NO: 37180 - DNA, 147 bp, Oryza sativa
  Clone ID: PAT_MRT4530_40932C.1
atgcaggccacaagtgaacatgccgtgggacacgctctcacgctgtcaaagcgcgagactgcttggggccccgccggtctgggttcgcgtcagacggccgcgaaatcgctctacgagcgtttttggaatgcgagaccgatgcattag

SEQ ID NO: 37181 - DNA, 2921 bp, Oryza sativa
  Clone ID: PAT_MRT4530_40933C.1
ggtgactggtgagctgagctgagcttgcagttttggttcttggggtcttgaggagttgagctgtggtgcttaacacaggcatagctgcttgcttctttctttacaagttgttggcattggctccatgtgatcgatgagctgagagagctcagctcagctcagctcactttcgccactgcagcatcggcgagctagagctgtagatcttgggaagatccagcaatggagaagccggcgtcgtgctgctgctacttcccgctgcggtgggagagcaccggcgaccagtggtggtacgcgtcgccgatcgactgggcggcggcggacggccactacgacatcgtccggcagctgctgcacctcgacccgaacctcctcatcaagctcacctcgctccgccggatccgcaggctcgaggcgctctgggacgacgacgcgcgcttcgccggcgcggcggggcaccgcgcgggcgtcgcccggagcctcctgctggagtgcgagtgcagtaagaacgggggcgccgccgccgccgccgagaacacgctgctccgggcggggtacggcgggtggctgctctactcggcggcgtcggcgggggacatggcgttcgtgcaggagctcatggagagggaccccttgctggtgttcggcgagggcgagtacggcgtcacggacatgttctacgccgccgcgaggggcgggaacgccgaggtgttcaggctgctgctggaccacgccatgtcgccgaggtgctcgacgaattgccccaacggcggggaaggcgcgcgcggcggtggcggtggccgctcctcggtgttccggctggagatgatgagcagggcggtccacgccgccgcgaggggcggcagcgtggagatgctgagggagctcatcgagcgccgctccgacgtgtcggagtatctcgacttccgtggatccaccgtgctgcatgctgctgcagggagagggcagctagaggtgaggcatctacttcttggccattgcttacttcactacttctgcaaaatgcaccatagtgaacttctgtttgtgccaatatgcatggatgacaaggttgtcaagtaccttatggccactttcgacattgtcgattcgactgataatcaagggaacacggcattacatgtagcggcctaccgagggcatctgcctgttgtagaggcattggttgctgcatctccatcaaccatttcagctgtcaacagagctggtgatactttccttcattcagcaattgcaggtttcagaaccccaggcttccgacggcttgaccgccaaatggagcttatgagacacctgatacgtggaagaacatcaaatatccaaaagattatcaacctgaagaatgatgcaggcctcacagtccttcacatggctgtggttggttgtgttcatccagacctcgtcgaactcctgatgacaaccccatcgatcgacctcaatgctgaagatgccaatggcatgactccactggcattgctgaaacagcagctgcgctcttcaacatctgacaagctcatcaggcagatagtttccgcaggaggggtgctgaattcgactgttctgcgaactcggtcagcgatcgtttcgcagataaagatgcagggagggattgcaagcagccccggtacaactttcaagatatcagatgcagagatcttcctctactccgggatcggaaccgcggagtcccgacgccctagctcatgctctagcaatggcaagtgtgaccatgcccatcatggagatgcaaaatgcggaaatgctgaaaaccatggatcttcagagaagaggctgagctctgccagccgtgccaaggaccgtctcaagctgatgctgaaatggcctgatgcagagatcttcctctactccgggatcggaaccgcggagtcccgacgccctagctcatgctctagcaatggcaagtgtgaccatgcccatcatggagatgcaaaatgcggaaatgctgaaaaccatggatcttcagagaagaggctgagctctgccagccgtgccaaggaccgtctcaagctgatgctgaaatggcctcgtcagaagatgtccagaggacacaagaaatccgacgatggcgacgccatggattccatcaagaagctgagcgagcaggccccgccgccgccgcagtccggcaagatgaagggcaccaagacgacggcgctgaacaacaagaggaccctcgcggtgaagacctcgactcccagctcggccaccaagaagaagctcaacagcaagctcatcctgggcgagccgtcgagctcggggtcgtccgtgaacgacgacgcgtcggcggagatgccggcgcggcggcacgggtgcggcaacgggaggctgatcaacatctgcttcggcgcgcagggcctcaccgtggaggactcggccagcgggcagcagaccagcaagatgttcaagcagcagtacaacgacgacgacgatgacgccatgggcgagccgtcgagctcggggtcgtccgtgaacgacgacgcgtcggcggagattccggcgcggcgggcacgggttcggcaacgggaggctgatcaacatctgcttcggcgcgcagggcctcaccgtggaggactcggccagcgggcagcagaccagcaagatgttcaagcagcagtgcctcagggtgtcctgactcccgagtgactcacacgcgcacacggtataattagcctgcttttctttggttttctgactcgaattgagcttgcagttcaacggaacatatatggtttctgcatgttgaactcgtcgggcttgtgtggattttgttggctgctgcgtgtaaccgtatccttgcgtggcgtgcttggtttctggttgggcttgtgttaacgccttaacggcttacttcgatgcaaatatatttggtgaatgtatca

SEQ ID NO: 37182 - DNA, 1117 bp, Oryza sativa
  Clone ID: PAT_MRT4530_40934C.1
cagggagggattcttcgcttatacctcctcaccagcgactcaatcctcctctcctcatcccgaaaatccgaattccagccgacgccagcacgcccccgcctccccaccgccgcttcctcttcaccctcctctacgtcatcatcctccagtagccacgactccctcgccgcgcaggccatgcgcgcctccgccgcgcaccgcgacgcctcctccctctcctcggcctactcctcctcctccgcctccgcggccgccgccgccgccgcggggttcttcgggttatgaatacacatccatgaagaacttgaatgaggctaagtacggattttggggggcccttgctcggaaagccaagtcttttctggacgaggatggttcaccagggcagtatgattccccggcgaggcagcagccgtcaagagatgcgccgccgtatacacgctcacaacaaccaccgtctgaaacatggaaatccgagacacctccatctcataagaggtccgaggccatagcttcctccctcaactatattggtggcacaataaaaagtgcacttgaagaaggccggacgattgtagaaaataaaacagccgacattattcatgaaacacgcaaattgaacagagaagctccacaaagatttactcaaaggaatcttccacaaaatccacttgactacgaaactcaattgaaggcatctcgcgacgttgcaaatgccatggcagcaaaagcaaagctgctattacgtgagctgaagactgtgaaggccgatttagcttttgcaaaggaacgttgcgctcagcttgaagatgaaaataagattttgcgggaaagtcacgataagggtgataaccctgaagatgatgatctgatccgcctccaactagagacactattagctgagaaggcacggctcgcacatgagaattcggtgtacgctcgagagaatagattcctacgagaaattgttgagtaccaccaacttactatgcaggatgttatatatgtggatgaaggcattgaagaggtcactgaggtctaccctacacaagtattaccacctgcaccttctcgggctggttcaggccttgaatcaccatcttatactcttttgaaa

SEQ ID NO: 37183 - DNA, 377 bp, Oryza sativa
  Clone ID: PAT_MRT4530_40935C.1
aatagccgttagtgccacgtgtcgccttcccgttggaccgccgcccgccctgtcagtctgtcacgcgccgccggcgcttttcggcctgacgggccgtgccgggccgtgccgtgccgcgggccgtgccgtgccggcctgctacaggagccatgccgtgccgtgccggcccgcgggctcggccagcggcccaagcacggcacggctacacgggccgtgccggcacggcccgttactgtagcaggccgtgccgggccgtgcctgctacaggaacggccgtgccgcgggccgcccgtttggcccggcccatttggccacctctaagatgaacaggcgcgggtgaagcaaactagacctttttttctgggccaaaaagggcc

SEQ ID NO: 37184 - DNA, 195 bp, Oryza sativa
  Clone ID: PAT_MRT4530_40936C.1
tgcaagcgcgccgcggacggaattggccgggccgcacccacgccgctctgttagtctaggacggcatcatcgccggtgctgctgttgctgcgggagatggtgcacccgccgcctcgccttctcctgcgatggacgtggccgccgcccaatgagggagcgcggaaagccactctgcgtcaacgacaaccgtggcaa

SEQ ID NO: 37185 - DNA, 200 bp, Oryza sativa
  Clone ID: PAT_MRT4530_40937C.1
acacgccgccggtcgccagtctccccaatgatgacctggcgccgccatcggtaccgtccgcccaagtaacgatgccagcagcgtggctgcaaccggtgaccgactacaccttcgccaccggcgtcctggcgcttctatccccttcgccgcaaccacctgtcccagtgtcaccgcgaccagccgccgacctcacctccacc

SEQ ID NO: 37186 - DNA, 259 bp, Oryza sativa
  Clone ID: PAT_MRT4530_40938C.1
atggcggcggcggagggctttggattgacgagggagctagcaaaaggagaaggagatcgatcgagagggttttatttgtgtcgcctctccggctctcacgtgaggcagaggtcggccggggcgacggcttctagggcacgcgacatccgctccgctccgctccgttccgtccgggacaggtggcggggcgaccactcgctcccgttatgtccagacagcaaaaacgttctccaccctgactatgacagtgcaggacccg

SEQ ID NO: 37187 - DNA, 963 bp, Oryza sativa
  Clone ID: PAT_MRT4530_40939C.1
atgccattttggacaaaaatgaccctggttcttctcccttcctccaatgccggaggagctcgtcggcagccaccggaggaggccgtagccgatgccatcaacgttgatggggccgaactcatcggcgacgaaagcggagcggatgaactcaccggcgatgagggtaacgcgttgagttgggagtggtattctagcgaagccaatttaagtgatggtatttctacgaagccaatcttatgcgatggtagatatgcaattttctcccaggcgacggagagacagcggcacgcggcggccggcggaagaggagggagcggcgcgcagcggtggaggcacggctccggcggttgtgggcggaagaggaatcggtggcgggagaagatggcatccggcggccgccgcagtgacatcgtcgccgtcccgaccgctgtggaccaccgcagatcaaatcctcgcgccaacaacctctcctcatcagtgcaatcaatagccctcaagaaccgagaagaatggagcgccgaagagggagatcgaccccatcttcttcaactccggccgccggcatcaattttcgattcccgctgcttcgaggatggaagaagtggcacatttatgattggaaatgaaagctttccagcatctctcttagatctcccaactgttatggagtcatacaagacatacaatgattcagtgctaattaaaacagctgatattggtcagatgattatggtaagagaagaagatgatcctgctccagaaggaattgaatacacacatggtcttactcctccaatgagggatgcacgaaggcggcgtttccggagagagcctgacttaaatgtattcaatgccttccctttagctcctcatggaagcactttgtcaatcataactgttattgttccattcactcatgtttacaggcagaactggttcaccgagttgaaaagcatctcatga

SEQ ID NO: 37188 - DNA, 177 bp, Oryza sativa
  Clone ID: PAT_MRT4530_4093C.1
cggggtgcctatgctatgatgtgatgatgtctgtgtgcggtgtgcaatgatgcatgactgccactgacatgcaagtgctagatcgaggtgcatgatgcttgctggttgctgagcggagcgggcaacaagcggtgcagccaggactgtgttggatgatgctgaatgttgcacaccatg

SEQ ID NO: 37189 - DNA, 1327 bp, Oryza sativa
  unsure (1)..(1327): unsure at all n locations
  Clone ID: PAT_MRT4530_40940C.1
aaaagcttctcgaacaccacacggttgggaagagagaggtgagcccacgggaccgggcggactcgccggagccggaggttgccggaggcggcggcggcggcggcatcgcgctcttctccttcgctgcttctccggggaaagaggcaaggttcatcaatggcaactccaaatacctattcagtccatatctcctcagaaacccacaggattgaggcctggttggcatctgatgaagctttagctaggcagttgcaagaggaggagaatgcacatgatgctattgctacaagagaatttgctggtaacgcatccttggaaccatcgtcaccagctgttgagtacagacctcccaataatgcagctcaggttgcaacggaagacaatgttgaccctgataatatgtcttacgagcaactacaagcattaggggaagcagtaggaaatcaatccagaggattatctgatgacctgatatgctatttggtgccttttaagaacaaatgcagcttcttctccaggaagaagaatgatgaggaatgtgtgatctgtaaatcgacttataaaagccgacagaaattgataagattgccctgcagccactgttaccatgcagattgcataactcgctggcttaagatcaataaggcatgcccagtctgcaatgaggaggtatttgggtgaatcacagcgcttgtggcaacgctggtgatgtttgcgttgtgttcagacacgttatgctcctacaccctatgctatacaccggtgctcaaggaaaatgcgttttggtatactcgtactactaactgaaccatgccatggcccatggctgtgatgtgtccatccaactgagttttatcacaaatagataaatctgtgtgtgtactagtactatggttgccatttttctggtaatgcaacctagcagaagcagctaaatagatactctatgtattgcgccatcttttacatgatctctgctgtggaaagaagcacaattgtgaatgttctacacccctactctgccatcttcagttaattcagcaatactgcatttgctctacagcttgtgtgtgtacagtgaacatggttctttcagccaaaacttttgttagcatatagtgatgttcttttcttttcctttcttattttgtaaggtagatgaagcagacatatcataaaccacagtcagaaactttccagcaaaaaggaaaaggcttatgttagtagacttgcttgctttttcctaatgtgtgttatttctttttctttagggtaatgtgtgttactacctccatttcngnttncaaaaaaaaaaaaaaaaaaaaaa

SEQ ID NO: 37190 - DNA, 561 bp, Oryza sativa
  Clone ID: PAT_MRT4530_40941C.1
atggcccgcatgtcagtgccaggttgggaatgggctgaatgtttgggcctccacacagggcggaaggaaaaagggcaagaagccgccgccgtggagcttggagtgaagcgaggggtaccaaccctggtggtgctagcggcggagacgaagggtggtctctactacctctccaacctcgaccagaacatcgccatcgttgtgcagaccgtctactacttcacggcagccgacgacgatgccgccaccggtgatgcactgagggagccgctcctgcataggtcgttccggttcacgtccgagcccatcgtccatgtcaaggcgctcgtcgcggtcgacggcggtggcagtgggcgcgcgcccacgatgttcgaggcgctcgccgggttcgtgtggagtgttgacggcgtggcggtgggattcataccggtgggcactggtgccgccgccctctccttctcccacgtcgccaccgccgcatcgccggtcgtcggacctcctctcccgcctcaccccagcgacctccccacccgtcggctcgcctgcctagaggagaaaaagtga

SEQ ID NO: 37191 - DNA, 229 bp, Oryza sativa
  Clone ID: PAT_MRT4530_40942C.1
acggcatacagcacgcagcacagtgcgcggatacccctgagagggcgccccctttttttttttgtttttggaagcatacgcacctttctcacctgtctacacaataattatacatatgcccggccctctccctcgtctcacttgacgctcgcgacattagtcagatttgcaaaacactcatggcggtgttaggttacatttttacttcccagcctacaaaaatttgaaa

SEQ ID NO: 37192 - DNA, 375 bp, Oryza sativa
  unsure (1)..(375): unsure at all n locations
  Clone ID: PAT_MRT4530_40943C.1
ccgccttctcttctcttctcttctctccncnngcgaggccgcgacgcactcggtcgccgccggatctcganccccctccgctcgccgacttcgcctcctcccccccggatctccactcgcacccaacggatctctccctcctccgccttctccgccgccactgggacgcatataggtccataggggagaagatccatatgagtttgttgtgctatgaaaaggggcaaaaactgcgcacaagaaattatgggcaaaattaacaatagaagaaacagtatattctttcagtcctgacttcctgagttgatttaggaacatcacatatagtgagaaggtggcacatttccatggataaggctggangcaatcaggang

SEQ ID NO: 37193 - DNA, 2970 bp, Oryza sativa
  Clone ID: PAT_MRT4530_40944C.1
atggagcaccacgccgccctccgggccgccgccggcgacatgctgtacggcgtggaggccgcgctcccccggatcaggatcctcgtcgaggcgaccgagcgcagggccatctccagggccagcttcgccgcgtggctgcagcagttcaaggacgccgtcgccgaggccgaggacctgctcgacgacctcgagacgcggaggatccgggcggcgctcagggccaggggcagcaagctcggctccgccacgtccctcgcgctcaggttcctcaggaacctcgtcctctccgatggggatctccagaggctcaaggacgtcctggccaagctgaacaggatcaccagcgacgcgaccggcttccacgacatactgaaactggccgacgacgacgtgggggcgatgcgatcggtccttccggtgccagccaccccgccggcggtcatcggccgggacgaggagcagcagcagcttgtgaagatgattttacgccccggcgcaccgccgtgtcctcaggatggagctgaatcctgctctggtgtttctgtcatatcagttgtgggagcagctggtgtgggcaaaaccactcttgctcagctgatttacagtgatccaaacgtcaaggaggctttcctgttgaggggatgggtgtttacctctcgtagctgcagtcgaacgggtctcgaacaagatatcatcgagtcttttgcgtctgagcaagaggaaaatctgcaaagaaagtcggtttcatcagaaagcagtttgattgatgtcgtacgaaacaagaagttcttcctagtcctagatgatgtgcagcataatctgcacagccaatgggattccctaaggtcgacactggcaagaggagcaaatggcagtgttgtattgctagtatgtcaatcgaaagaagtcgcaaatagtttgggagcgacagctcaggttccaatgggttacctgccatctccagtgctctggagagtatttgagcaccatgcatttgggaatcagaaaagagcttccctcgagtcaattggtaaaaaggtgctccaaaacttgcatggattgcctttgctggcagaagcaattggaaggcttctgagacaaagattagataaggcgcattggcaaaaaatttcctcgagtccctggtggctcttttctgaagatgaagacgatgttgcgctaccttcagtggcaattatgtgtgagcatctatgtgatcatcttagaaagtgtttgtgctattgttcaatattcccatctggttatttgtttgaaaagaatatgttgattcacatgtggatagctagtttcatgcaacaacatgacgggattgggatgaaagaaatggaaaaggaatggtttgatgagcttttccgccgatcattctttcagcccacaatctggaaaaataggtacatcatgcctgatatgattagaaagccattatgttccattgctggaaaagaatgccatgctgctagtgagttgggagaacagaaaagacggctccaagattaccgccacctagccatcagttttcctgattttaatgtgcacctagacttgagaaaggacaacaagttgcggaccattttgctttttgatggtcgcaaaacaatcaaaccacacgaagcatttgctaatattctgtcacacctaagtggcctgcgagtattagatttctcttacagtgaagctaaattggagaaggctcctgatttcattaacaaattcacacacctaaggtttctggatctctcctttactgggatgacagtacttccagactccctctgtaagctgcacctactacaagttcttggattacgaggatgtcagttcaaggagttacctagagctataaatgagttagtgaacctccggttcttatatgcagaagctcacacggtttccttgatatacaagatagggaagcttactaatctccaagggttagatgaatttcttgttggtagaatggatgggcacaaaataacagaactaaagaacctgaatgaaatcagtggacaactatgtattggaaatctggacaaagtagcaagcacagatgtagtgagtgatgctgaattattcaaaaaaaggcacttaaagaagttggtattcagatgggggttgacagcatgcaaaccattagccgaagctgatggtttcatgagaactcttgctggcttaaaaccaaatacaaatcttgaagaactgaaaattcagtgctacatgggagttggatttccatcatggatggcggaagagcagtacttcatcaatctgcggcgcatccatcttattgaatgcaaacaattattaacacttccacctcttggacagctcccatcccttgtagttttaattcttcaaggcctaacagcaattgagaaaattggatatgaattttgtggaaaaggatacagggtatttccatctcttaaggaggtgacatttcttgatatgccaaattggaggaagtggtcaggcatagaagaactacaagatttgcaaattcctccatttccacagcttagaaaggtccaaatcaagaattgtgaggtcttaattgacatgccagtatgttgtttaaaagcgtcacttgaggagcttgagatctctggttgtaatgaaatatttgcctgtaatccaagctgtttagatagattgacttcccttgtgcgcttgaagatccaccattgtttgggcaaaatttatcttccatgtcgattgttggagtcaattgaagttttgaatctccaaagatgtgaagtttatttccagggaggtaaagaacatttaatgaaattgaggaggactgtaacaaatgatgttcatgaattgaatttggatgaatcgaaagcaatcagtacagagctgttagttcttaaactttctgaagggtatcactacttgtcttcatgctttcttaacaaatggaattttgaagcatcttcagtttcctga

SEQ ID NO: 37194 - DNA, 484 bp, Oryza sativa
  Clone ID: PAT_MRT4530_40945C.1
cttcggccaccccttccgggatccttttccatcattgacttttaacaaattaaaaagggtggttggctttttcttcaacggtggaacttccgggttcaattccacccactttctggggaaaaaacctgaaaaaccaggggaccttcggggggaacctccctgggcagaacctccacttcaccaggttcaagggatggcccaagagctggacgagggcaagcagaccgaccaggacaggggggaggggcttggcttccaacttttcgatggaccagcaaggacatcaccagggggaagggtttcgtcgaactcccttttccaagcttccacgggtgatggcacccaccaaggccgcctcaacttctaccaatacctcaaccagggtctcagaacgtacgacttcgacaacaccatgggaggcttttacatcgcccctgctttcatggacaagctcgtcgtccacatctccaagaacttcatgacc

SEQ ID NO: 37195 - DNA, 483 bp, Oryza sativa
  Clone ID: PAT_MRT4530_40946C.1
ttggtttcgcgcaaaattttggtatgcgcatgcatgcgtggctcaaatgattccaggtacagaccacagaacccagctacatcaacaaacaacacattgcaaacaaccacattgtgattcattaaatgaacctagcattgaaggtgagaacccacctgcgatccattatattcacggagtgcttacttccataccttctttacctctgaggaacgaaaccagcatgaattagtgctgcggagcaagcagtaaacaaccaacagtgttgtccatgctgctgcacgaatctggcactggctgctacttactggactagtgatgatccattagaggcttgttaataaagtgctcatgacgatgagaaggccgatggcagtgaccacgatcgatgacgggacgcttcattggaggtggctccagatggagaggttgatcccgaggtactgagcgcgcctggcctgatgatggaccatgaggcctatg

SEQ ID NO: 37196 - DNA, 213 bp, Oryza sativa
  Clone ID: PAT_MRT4530_40947C.1
atgccgtggtttccttttggttttggacgcgactccgactccctccgctccgccgtgctcctgcgccgcgccgcctccgtgcgggagttcggttcggttgcccccgcggattctggtcgccgatttgccccgtttctcgagccacatggcccgtgtggaccgtcggattgtgatccggtggccgaggaaggggttgcccacaccggtttatga

SEQ ID NO: 37197 - DNA, 2475 bp, Oryza sativa
  unsure (1)..(2475): unsure at all n locations
  Clone ID: PAT_MRT4530_40948C.1
aggtggtggggacttgctaaggcaactacatgaattagctaaagctgaggctgatcttgccaatcatgagaaaagactttctgttattgaacaaaagattgtggtgcttttgcctctgcagaagaagttcacagagttgaaatcacagtttgaactcaaatcatatgacctgtcattatttcagaaccgtgttgagcaaaatgaacatcacaagctaggtgaacttgtaaagaaacttgaacaagagcttcaggaatcaaagcaagagctaaaagcaaagcaagcgcagtacgaaaaatctgtctctactgtttctgagctagaaaagaccatcaagacttatggcagtgagcgtgaaggtagactcaaagctctggaaagaaaaatcaaatcattaaaatcggagttgcagtccatgtcgaagcaactaaaggcccatgaaagtgagagggagaggcttattatggagaaagatgctgttgccaatgagcttgccatgcttgaagagcaactgacaacttcaaaagctcaaattgccgctatgactgaaactttgaataggcatcagaccaaggttgcttccataaagcaagactatgatcaagctgaatctgagctcaacattgggcgttctaaactgaaggaatgtgactcacagataaatagcatggccaaggagcagcaaaaactgcagcagcaactaagtgattcaaatgttgaaaggaagaaaatggaaaacgaggttaagaggatggagattgagcagaaggattgctcttcaaaggttgataagttagtagagaagtacagttggattgcaactgaaaaacagttgtttggaaaaagtggcactgattatgactttgtatcatgtgaacctcataaagcacgagaagaacttgaaaatctccaagctcaacaatccagtcttgagaagagggtcaataagaaagttatggcaatgtttgagaaggcagaggatgagtataatgatttgatgtcaaagaaaaacatcattgagaatgacaagtcaaaaatcaagacagtgatagaagagttggatgagaagaagaaagagaccttgaaagtcacatggcttaaagtaaacaaggattttggatctatattcagtacacttttacctggcacaatggccaaacttgatcctcctgaaggtggtacttttttggatggtcttgaagttcgggtggcatttggaacagtttggaaacaatctttatctgaacttagtggagggcaacggtccctcctcgctcttagtcttatcctggcgctacttcttttcaaacctgcaccactttatatattagatgaggttgatgctgccctagatctgagccatacacaaaacattggtagaatgatcaaggcgcattttccgcactcccaggaggatgaagtcgtttgttatgctctttgctaaaacaacgcaaatgtgatattccgaacgaaatttgttgatggggtgtccactgtgacacgaacggtcccttcaaagcaaagatgattggattcattcatcacttcgtctgaagctgcacggatcacatggctctacggagcaacaattggacaacgancattgagtcatggagtcaaaaacattccagccaattgaaacgtcgtatgtttctttttttccgtcagatacacgcgtagatttcacgcactacacgcagctctttttggatgggctgaaacatcagcctccaaaacagcagccctcatttttaaacctcaaagaatgaaccctagtgttttttctgtattcagtcgccattcctaaaactgttactatattcagcagttgattatctggtttcatacattctgtatttctcgttctagtgctctccagcattggcagcagcagtcattactgttactgagacttggtacggaaagcgtacataagttttcctcggtgtcacaatctgaatctgagtgaaggttgtgttcatcatttccttctctgaggatcccggctaagaccatgctttctcaaagttctgatataatttcgcgtcagactgaactttttagaacccagatgatgcaagtaatcccatgtgaagatccccgtcttgtgcaaatcatcaaatagtatccgaattccatagtttcctactgattcagctgacattattccaacataccgtcgcccaaatataaccttctcaccagatactgatattattttgctgtcagctgctggactatgtactcttagaaattcagctgacagatggaatgagctaccatcagtgaattcaacctccaccgatctgggcgggtgcagcgcaagcttcgtcaggcgcgggggctgcgccgccgccgccgccgccgctgcggcgtgcatccgccggaccgccgcgcccatcgccatggcggcggcggcggaggaagagtccgggagtccggacggagagcgagaggccacctgtcgccgtgccc

SEQ ID NO: 37198 - DNA, 576 bp, Oryza sativa
  Clone ID: PAT_MRT4530_40949C.1
ccggccgggaatcgttctgtcttctacttgaactaccttgagctgccacggtctaccaggaagaaaattatcgtcgtgagtcagagaatgtatacatcacaactttccatgaataatcgactgatccaacatgactattgcagattcactcagcatctggacctcaaatttaataaagtttcagttacctaggagatgggcttgcccatgcccatccaggagggatgcaccagctgatcaaccagctgcgacatatttcacctgttggccctgtagctgctccctttctcccttgatcggctgatcgcaatgcaacaagacacctttctatgtctattctctggtcagttctgacgtactccctccgtcccttaatataagggattttgacattttactcgcactgtttgaccattcatcttatccacaaaattttggaattattattttgtttgtgacttactttattatccaaaatactttaagcacaactttcccgttttttatattggcgcacatttttttgaataagaccagtggtcaaacagcgcaagacaaatatcaaaatgctttata

SEQ ID NO: 37199 - DNA, 291 bp, Oryza sativa
  Clone ID: PAT_MRT4530_4094C.1
atggagcaacgtgggagctccacgtgtcgccccggaggcccgagctggtacgcctgccccgcagactctgtcactgacatgtggggtaggggtaaaggtggccaacgttgtcagtgggtggagtgggtaagaaggttggtggcgctgtgggggttggggggatgggggccacaggggagtggaagggataaggcaaaagagtaccgggcgggcgctcggcatcccccggattgtgctgccggttttgtgggcccgcgactgttggtccgttctgcggcctacacgctttag

SEQ ID NO: 37200 - DNA, 2088 bp, Oryza sativa
  Clone ID: PAT_MRT4530_40950C.1
atggagatagtagataagattgctgagcccaaagaacctttgatggtcactggtaggaaggtgcagagcttggaggcaccaataccgataaaggcgtcatggaaagggaagagctcccagcagcagcagcagcagcagcaggatgagaaggattttccagctgatggtgaggagagttttctgagcctggattcctcagacgaaggtggccggagttctttctcaggggccagtcaccccctggaaccaattgatatggatcttatgaagacggtctatgtcgcaattgatgaggagaaatccgagcaaccggtgtgtttagtgcgaggagtatcggcgaaagggccattcatagatgacctttcgatctgtgttacaggcatgaaggccaatgcagtggtaggtgcaggcagtgctgatggtttggctgaagagatgaaggtgccgggtgctgcggtgccatcattggcaacggcgcggtcatcgcaagctacagaagctgtgtccttgcctccagattcagaggagaaggactgtgtctgggatgcctcgcttcctcccagcggcaatgtgagccctcacagtagcattgacagcatgggtgtagtcacggcgatgaacactatgagcagctgtaccagcacatataaaagtgaagccgtatccagtgaaccagtgcctacgatggagaggaactgtgggagtgtgaagggcagcgttagaggtgactctctagaaagtgcaaaaaccagcatgagtcgagcaagtgatagcagtggtgttagtgatgacagcagctggagcaatatcactggaggtgctagtaagcctcacaagggtaatgatcctagatggaaggcaatacatgctgtacggactcgagatggtgtgcttggaatgagccatttcagactgctcaagcgtctaggctgtggtgacattggcagtgtttatctctcagagttgagtgggacaaggtgctactttgcaatgaaagtaatggacaaggcttccttggcaagtaggaagaaattgaacagggcacagactgagagggagattctgcagcttctggatcatccattccttccaactctgtacacacattttgagaccgacagattctcgtgtttggtcatggaattctgtccaggtggtgatttgcacacgctgcgacagagacaggcaggaaaacatttctccgagtatgctgcaaggttttatgctgcagaagtacttctagctctggagtatctacacatgttgggagttgtttacagggatctgaagccagagaacgttcttgttcgtgatgatggtcacataatgctttcagatttcgacctctccttgagatgtgcagtctcgcctacactgatcagagcatcagcttttgattctgatccaagaagagctggtggttcattctgtgtacaacctgtttgcatggaacccacttcagtctgcattcaacccgcatgcttcatgcccaaattgtttggtcagaagagcaagaagaaaactaaaaagacaaggtccgagctgggaccgagtgccacgaccatgcccgaactagttgctgagccaacatcagcccgatcaatgtcgttcgttggcacccacgagtatttggctccagaaatcatcaaaggcgaaggccatggaagcgccgttgattggtggaccttcggtatattcttgcacgagcttctatacggcaagacgccgttcaaggggtcaggcaaccgtgctaccctcttcaacgtggtcggtcagcagctaaggttcccagagtcgccgtcgacaagctacgcgagcagagacctcatcaaggggctcctggtgaaggaaccgcagcaccgcctgggcgtgaagaggggcgccacggagatcaagcagcacccgttcttcgagggcgtgaactgggctctcatccggtgcagcacgcctcccgacgttcccaggcccgtcgaggccgagctgcccgtgaagtacggcgtggcggaggcgattgggagcaacagcaagaggatggtaggcgcggacatgaagtccggtgggaaataccttgactttgagttcttctag

SEQ ID NO: 37201 - DNA, 2400 bp, Oryza sativa
  Clone ID: PAT_MRT4530_40951C.1
atggatccaggagttgagaagaagaagcagcagatggagctcgtcgacgtcgagagcggcggccttcccgtcgagcgtcaggactcgctgttccgggaggcggtgagagctgagcacgccggcgccgctcactgggacgaacaggatagctgggggaggacgatgagtctggcgttccagtgcgtggggatcctgtacggcgacattgggacgtcgtcgttgtacgtctactccagcacttttgagcacggcattgggcaccccgatgacgtcgtcggggtgctctccctcatcgtctacagcttcatgctcttcaccgtcatcaagatcgtcttcgtcgccctgcatgccaacgaccatggtgacggtgggacatttgcactctactcgttaatttcacggcacgcgaaggtgagcctgatccctaaccatcaggcggaagatgagctgatctccgggtatagcagtagcgggaagccatcggcgactctgaggagagctcactggttgaaacagctgctcgaggcgagcaaggcggccaagatttctctcttcctgctcaccatccttgcgatcgccatggtcatcagcgacgctgtgctaacgcctcccatttctgtactgtcagccgtaggtgggttgagagagaaggtacctcatcttacaacagatcaaatagtgtggataacagtggcaattttggtagtcttgtttgcaatccagcgctacgggactgataaagttggctactcttttgcaccaatcattctcttgtggctgctcttgattggagcaactggtctctataacctgatcaagcatgacatcagtgtcttgagggccttcaacccaaaatacatcatcgactatttccgtaggaacaagaaggaaggatgggtctcgcttggaagtattctcctttgcttcacaggatcagaagcactttttgctaatctaggatacttcagcatcagatcaatccagctgagctttagttttgccttacttccatcggtattactcacgtacatcggacaagcagctttcctgagtaagaacccgaagaatgttgccaataccttctttgccgctactccaatttctttgttctggcctacgttcatcatggcgatagctgcatccataataggaagccaagcaatgatatcttgtgcctttgcaactgtttctcatttacaatcacttagttgcttcccaagggtcaagatattgcacacatcaaagcgatttccgggccaattgtacatccctggagtaaacttcttgttatgtgtggctgcttgcgttgtgactgttagcttcaaaacaactgttattataggaaaggcgcacgaaatttgtgtcatccttgtgatgatcatcacaacattactaatgacaatagttatgctcttggtatggaagatcaacatcttgtgggttgctctgttttttatcacattcacatcaacggaggctgtctacctatcgtcagtgctatacaagttcacacatggaccatatgtgcctgtggctatgtcggtagttctaatggtggtgatgatcgtgtggcactacgtgcatgtgaaaagatacaagtatgaattggaacacacagtatccaccgacaaggtgaaagaaatgctggagagccatgatctgaagagggtccgtggcgtagccctgttctacactgaactagtccaaggcatcccgcccatattcccgcacctcatcgagaagatcccaacgattcattctgttcttgtcttcatctctatcaagcatttgccagtaccccatgttgacacctcggagcgattcctcttccgtcaagtagagctaaaggactacaaagtgtttcgatgtgtggcacgatatggatatcgtgattccctcgaggaggccaaggactttgttgttacccttcttgagaaccttcaggattatataagggatgttaatctctacaccgatgagccacacaccattagtgcccatagttcttgcaaccatagcttttctcgggagaagccttctggacggtacgcggtacatgccgaggatatgcttacaccaattgaatccttctctgagatcacagctctatctaactatggaagcgaccgtctaccacacttcaaggcaagtaagatgaatatggaggagttggcgaagattgagcaagagcagatgttcattgagaaggagatggaaaaaggtgttgtatacatacttggagaaaccgaggtggttgtaaggcctcactcatcgcttcttaagaagatagtagtgaactacgtctactctttcttaagaaagaacttcgtgcaagggcagaagatgctatttattccccataggcaattgcttaaagtagggatctcatatgagatttag

SEQ ID NO: 37202 - DNA, 210 bp, Oryza sativa
  Clone ID: PAT_MRT4530_40952C.1
atggagatgaagaaaatagtcggcgacgacaaatgcaactgacatgatgaagatgacgatgtcggtgatccagtcaatagcagtgtcgcaaccaatgataatgacgaagacgctcatcagcatttgcatactgttgtagatgcttcacttggaggagagttgatgttgttgtctaactcgtccaaaccgaaatatttgaagttgttgaag

SEQ ID NO: 37203 - DNA, 525 bp, Oryza sativa
  Clone ID: PAT_MRT4530_40953C.1
atggactcggattcaagggaaggaaagaagacaactgatcgatacaagcagtcaccagatatcatcatccattcatcatctctgcaattcagttcagcggcatcgatcaccatgagcagcagcatcaaggatgagatcgacgctgcgttcgcggcgggagcaatgccgccggagtggcggccgaggctgctggcgtcgccgcggctgggcgagcgcgacgtcgacaggatcgcggcgtccatcgccgagatccattggaacctgcagctcgacgggtcgacccagctgtccgtcgcttgtgtggcgttctggttcgtcgtcggcgtgctggtcttatgcgtggctggccttttcttcctcgaaaacgactacatgagtggaccgttcgccgtggttggggccgtgccctgcgtagtgatcactcctatagtaaccgtggcttatgagcgccgtcgacggagggccaagatgctcatggtgcgaacgcgaactgtcctcgagcactttctgcttccacctatttaa

SEQ ID NO: 37204 - DNA, 458 bp, Oryza sativa
  unsure (1)..(458): unsure at all n locations
  Clone ID: PAT_MRT4530_40954C.1
atggttctcagcaattacatagaggaaattattgtctcggcagtctcgtatcatatgattcacaacaaggatcctgaatacaaaaatgggaagcttgttctatcatctaaaagtttgtcccatgggctaagcattttccaagaaagtggctttggtgggaaagagactctgaaattagaggatgatctgaaaggtgccactggacccaaaaagagcgagacagagaaatcagccacagtgccacttaaagatggtgatggtccattaccaccaccaaaaccggaaattccagataacgagtttgagaagcgcatcaggccagaggttataccagccagtgagaagngagtgacttttgatgacattggagccctggctgacatcaaagagtcgcttcaggagctggtcatgctacctcttcgacggcccgatctttttaaaggaggacttcttaagcc

SEQ ID NO: 37205 - DNA, 298 bp, Oryza sativa
  Clone ID: PAT_MRT4530_40955C.1
tgtgctcaggagcttgagacgacgaatcacatcctcctcgattgcgtgttcacgcagcaggtctagctccgtgtgctgtcgcctcttggttgggttgccctctctcctccccgtggcaactggctccaggactggtggccatcttctagggcatgcttacctgagcatctccgtgccggcttcgactctctggtcctactggtctcttgggtggaaggaacggaactccaagattttcgactctacactctcttcggtttcagtgattctagagtccatcctctcagagggccatcta

SEQ ID NO: 37206 - DNA, 1839 bp, Oryza sativa
  Clone ID: PAT_MRT4530_40956C.1
atgggcaacgtctgcatcggcccgcgccgcaacttcgccaagaacggcctcctcggcatcctgcggccgcgccacgccgcgccgtcctccccgtcgcagcccaccaccacctcccgctccatccccgtcgtgctcccctccgccccctcctccaagccgccgccgcccacccagaccgccccgcccgtacccgtcgtcatctccgagccgccgccaccgcagccgcagcccgaaccgcagcccgcggcgccgtcgcagccgccgccaccgcaggagcagccctcgccgccaccgcccgcgtcgtcgaacaccacccagcagcctccgccgccgcagcagcggcagcagtcgcgcgccaagaagccggcgcacatcaagcgcatctccagcgccggcctgcaggtggagtcggtgctccggcgaaagacggagaatctcaaggacaaatacagcctggggcgcaaactcggtcagggccagttcgggacgacgtacctgtgcgtcgacaaggcgaacggcggcgagtacgcgtgcaagtcgatcgccaagcggaagctactcaccgacgaggacgtggaggacgtccgccgcgagatccagatcatgcaccacctcgccggccaccccaacatcatctccatccgcggcgcctacgaggacgccgtggcggtgcacgtcgtcatggagctctgcgccggcggcgagctgttcgaccggatcgtgcgcaaggggcactacacggagcggcaggcggccgggctcgcccgcgtcatcgtcgccgtcgtcgagtcgtgccactcgctcggcgtcatgcaccgcgacctcaagcccgagaacttcctgttcgtcggcaacgaggaggacgcgccgctcaagaccatcgacttcggcctctccatgtttttccgcccaggcgaggtgttcaccgacgtggtggggagcccgtactacgtggcgccggaggtgctgaagaagagctacgggcaggaggccgacgtgtggagcgccggcgtcatcatctacatcctcctctgcggcgtgccgccgttctgggcagagacggagcaggggatattcgagcaggtgctgcacgggacgctggacttcgagtcggacccatggccgaacgtgtcggatggcgccaaggacctcctccgcaaggtgctcgtccgggaccccaagaagcggctcaccgcgcacgaagtcctatgccatccatggctgcagatgagcgggtcggcgccggacaagccgctggactcggcggtgctgtcgcggctgaggcagttctcggccatgaacaagctcaagaagatggcattgagagtgatcgcggagaacttgtcggaggaggagatcgccgggttgaaggagatgttcaagatgatggacacggacaacagcgggcagatcaactacgaggagctcaaggccgggttggagagagtgggtgccaacatgaaggagtctgaaatttatcagctcatgcaggctgctgatatcgacaatagtggcaccatagattatggagaattcatagctgccactctacacctcaacaaagttgaaagggaagatcatctatatgccgccttccaatacttcgacaaagatggcagtggatacatcacatctgatgagctccagcaagcctgcgatgagtttggtatcgaggatgttcgactcgaagacatgataggcgaagtagatcaggacaatgatgggcgtatagattacaacgagtttgtcgcgatgatgcagaaaacaacaacagggttcgggaagaaaggcggtcataattttagcggttttagggatgccttgaagtcacatagctga

SEQ ID NO: 37207 - DNA, 308 bp, Oryza sativa
  Clone ID: PAT_MRT4530_40957C.1
gatgccgaaccaaacgtttctggagctggtgtattccataatccggaggtttttataatgggtttaataactaccttcttaacatgcaaaccgtagctgtttgcgccaccaccattaaaccataacgcgctaacttacagccataccctaacccacagaatccgagaactggctaaaagcaccatcactgataaacctaaagaacccttgagctcttggcctccttgaccccatgacagccatggcggctaggttggcctgctggatctggctttggccggcgcaaacatcaagccgcggtaagtatg

SEQ ID NO: 37208 - DNA, 381 bp, Oryza sativa
  Clone ID: PAT_MRT4530_40958C.1
atgtccgacgcggtgccgggggctactgtcggtgatatgggcccggggggggcctcggggtgccacgtcacgcccctcgggccctcgcgctgccacgccccgaggccctcgcccagctgccatgtggcgaggggagcgcgcggggaggagactcaggctgaacccccatcaatgcgcggcgccccaaccactgtgaccagcccgtcgccggtcacgtccggtcggacgggcagccgtgtccccacgttcgcccctgtacccggcggagtggaggcagggctgtcccccgtgtcaggcgggaggtggcgctgggtcccactcgaggacggacggccgcttagcttctgggcgaaggcacagatcgtggtccggtctgagtag

SEQ ID NO: 37209 - DNA, 780 bp, Oryza sativa
  Clone ID: PAT_MRT4530_40959C.1
ggcagaactaatcttttagacactctgatcttgtactccagctttccagatacaccctgaattgattacgatgacgacgacgatgcctaaggtgacttcggtgttatggcagccgtggtaggcctggcgatggtgtctctggtcgctggcatctctggcactgcgactttctacacgcctccttacacgccatcggcgtgcttcgggttccaggagcaggggacgatgatcgcggcggcgagcgacgtgttctggaacggcggggcggcgtgcgggaagcggtacgtggtgacgtgcacgggcgccaccaaccagggggtgccgcggccgtgcaccggccggagcgtcaccgtgaagatcgtcgaccactgcccctccggctgccagggcaccatcgacctctcccaggaggccttcgccatcatcgccaaccccgacgccggcaagatcaagatcgactaccgccaggtgtaaggtgaagacaatacatgcatatctacggagtatatagtcaataaagtgcagtgcttttccaaacgagacagggaagcgaacgtgtgtgttcagtgttccagctgattttcggttgttgccaataaaacaatttgtatgagagagcgaaaagaagaaacttattaatttggtttttttgaacgaatttgtactgtgggtttagcaaatattttcaatctttctttacgttttttctctctattttaatttgtttcgttctttatggtaatttttttttttttattttaataaggggggcctttttta

SEQ ID NO: 37210 - DNA, 404 bp, Oryza sativa
  Clone ID: PAT_MRT4530_4095C.1
tctttctattaaattgatgcacctgttccctagcactatgttgggatgagtgacaatcttaacttgcaaggaatgcacctgatcctttgctgtgaatacactactctcaggctgctgcaagaatcaatataccagccgtatacctcatatagtgaatataaatcatgtgacagatatatgtacaaaaagacacactaattaagaagtgccaacagacttaatccatcatgctgcaaacgatatctattactgaatggttagaggctatacaaaatagtaatagggctcgaagaactctccctaacagtgattgaccacgtgatgatgccttcatgaccttgtctataggaccaaagatgcacctagaactaatgtgatcagaaagagttccaggccagaggact

SEQ ID NO: 37211 - DNA, 387 bp, Oryza sativa
  Clone ID: PAT_MRT4530_40960C.1
atggcatcttcctccggcgaatcgccgggttttcaggaggcctcgccgcgccgcgcatcctcctcgtcggacgcgatgccttctccgacaaccactagttcttccaggctatctgtgggcttcatcaggactactgtaaaatggtccagcgaaatttcgctttatgtcaggttgtcaatgatgataactggagtatcactgaaggatgatggtaaagatcgttggagtgtcatgtacaggcccttgcagacatttcgaaacaagatgggcgaaatggtttacgagatgactaaaccttcctgcaacgattacctctcttctgcagacagtgagcaggattttgacatgaaacaaatcaagtttcgaggggaatatggaaatgtctaa

SEQ ID NO: 37212 - DNA, 2268 bp, Oryza sativa
  Clone ID: PAT_MRT4530_40961C.1
atgaacatgaatcccaccagtaagccattgctcctcctcggcagccttctcctcctagctgccagcactttacccctgcaggcaacgaccgcctgcgtgccacgggaatgggatgccctgttggccttcaagcgaggcatcaccagcgaccccttaggcctcctcacctcatggaaggaagacgatcatgactgctgccggtggagaggcgtcacctgtagcaacctcaccggccacgtcctcaggcttcacctcaatggcggatatgaccttgaccgtttcgagttggttggtttggttggagagataagccctcagctgctccacttggaccatattgaacaccttgatctcagcatcaattccctggaagggccaagtggtcaaatccccaagttcttgggctctatgaacagcttgagatatctgaatctctcgagcataccattcaccggtacggtgcctcctcaactcggtaatctttcaaatttgcgatatcttgacctttccgatatggagggaggtgtgcacttaacagatatatcatggttgccgcgtctaggatcgttaaaattcctcaatttaacttacatagatcttagcgctgcatctgattggccttacgtcatgaacatgatcccatccttaagagtcctcagtttatcattttgccgtctccagagggcaaaccaatcactcacacacttcaacctcacaaaacttgagaagctcgatctgtccatgaattactttgaccacccgtatgcatcttgttggttctggaacttaacaatcctcaagttcctcgatctttcacaaaaccgtttgtatgatcagctaccaattgcactaggagacatgacgtccctcagagtccttagaatttcaaataacgatttgggcagtatggcaccaaacttgctgaggaacctatgtaatttggaagttctagaccttgatgagagtctttcgggagggaacatgacagagttgtttgggagtctaccacaatgttcatcgagtaagttatcggaattgaaaatgtcatacaataacatcaatggatctctaccagcagggttgttccgacagtttcccaaccttgtcactctcgacatgtctatcaacctaatcactggacctctacccgttgagatagcaaatatggaaaccatggctatggaatatcttgatatacgttcaaacaaactaagtggtcaaatacctctgttgccgagaaacctttcagcattggatattcacaataactccctatctggaccgctaccatcagaatttggagttaatatatacatgctaattctttcccacaaccatttgtcaggccatattccagggtctttctgcaaaatgcaatacctggacaccatagacttagcaaacaatctttttgaaggagacttccctcagcaatgttttagcatgaaaaacataaaagttcttcttttaagtaacaacagattcgctggcacattcccagcttttctagaaggctgcatacagctacaaatcatagatctatcaaggaacaatttctccagcaaattaccgaagtggataggagacaagaaggatttagtgttgttacgactaagctataatgctttttctggggttattccagacaatatcacaaatcttccgaatcttcgccagttggacctagcagccaacagtttatcaggtaacttaccgcggagtttcacaaaattagaggggatgaagcgagaggacggctacaatgcttcaggttccgtacctgaagatggcttgtcatcaaactgcttaattggtggaattcccgaacaaatagcttctcttgctgctttgaaaaatctgaatttgtcaaggaataacttgaatggaaaaattccatacaagattggatcattgcagtcactggaatcgctcgagctctcaaggaacaatctttctggagagatcccatctaccctatcaaatttatcatatttgagcaatttggatctgtcgtacaacaatctatcaggaacaataccctccggatcacaacttggcaccctatacatggaacatcctgatatgtataatggcaacaatggtctatgtgggcctcctcttcgaaggaactgctcgggagatattgaaccaaggcaacatggctatggtgatgacaactattgttcaatttggggaatttttctagggttagcctactcagctcaccccttcctcatctattctattagcataacactttacagatag

SEQ ID NO: 37213 - DNA, 361 bp, Oryza sativa
  Clone ID: PAT_MRT4530_40962C.1
tcttttgtgcgggtgtgggcgctcttctgcttcccccttttccctcctgtatgtaaaacaagtgagtagactcctctcataaaagagagacaggatcgcaaggttgctacagtacacagaaccgacggctccatatccaccggcgggggggactcctgccgccgagccggcgtgcgacatagctgagcgcgccatacccaagcatgaaggtgaaaagggtgaaggctgatatgtaccaaaacaagggcgggacatgatcatgcgatacctttgaagttatggaagagcacagcgaggaggccacggagaatatactcattaataaaggtgcttctgcatgctacaaaacacaacgttgata

SEQ ID NO: 37214 - DNA, 383 bp, Oryza sativa
  Clone ID: PAT_MRT4530_40963C.1
tcttttaattataactcctttagtttactaaatggctgattgccttttgatctagtgcattggtggatattacactttgatacataataataatatggttatccctgcaagaaaattaatatggttatcatttactctctctctctctctctctttatttttgcaggaataactacccctgaatgtagaatggagtgctatattaatatggttatcatttactctctctctctctctctctctctttatttttgcaggaataactacccctgaatgtagaatggagtgctatttagtaaaggaccaatactgaattcatgtaagcagatgatcaaagacatacgttggtgtttcttctttattaacacttctgtgaagataca

SEQ ID NO: 37215 - DNA, 349 bp, Oryza sativa
  Clone ID: PAT_MRT4530_40964C.1
gtaaatatgaactacttgattgaacttggatctgccagccagattattccttgcccccaatttgatacaacattatgttctgttgtagaaactatccaagtatgtagttttcccataatgatgataaagttgcttttttcttaataaattatgctgggtttgcatggattgcaatgtttgaagcttttgctaacttgtgaatgattatttgcaacagctgttgagttcagttgttgtgatatactgtttctgaggctcatagaatgaaattgtttctagtaaataattttgtcacatacatgtagtgtaggattgaagaactacatgtatgaaaaaaaaaaaaaaaaaa

SEQ ID NO: 37216 - DNA, 1739 bp, Oryza sativa
  Clone ID: PAT_MRT4530_40965C.1
gaatctccaatacgcaagcaattactcggaaggaatgctaacacggtaacacctgacatgtacagcctcggcaacgaggggagggtcgaataatcgaattctttaacaacccattacaacatgatgcccagaattctggcaagaaattttcctacccagattacacaaatcagagatgcatgaggaatgaaccgcaaatcgcaaaattagagagcacctgccaaccccatatcctcatttgcttctttggggaggcagaaattaaggcaaatgaaaacatcatctatactggcggtcaccaggattgtcgggaaaactgtacactaaccggaggcaagaatcaacgagaggtaaaagaaatccccccacagcctcaatcccaagtcaactgaagctaacagtctaacactagattattaatcaatggcgaggcagctggccatgctcgctgaagctacctctagaccggtaaaatgaggcaagctttttcttcatccggatgggtcctgatctattctgcagggctggtgattgtgcatgaccacctgttgacaatgcaaagcgggggtcacgcgctccttcgatcctgccagagctgtattccatggtaataactggtagggggttccggttgtcaaaaaacccagaaggatttgagcttctattccaccagctaccactaccgctgtcaagggccagggccccatggtagtcatcgtactggtcacacgatgagtccctgtggctgtaagaatcatcgcaagccgcctccgcatcattgtaaataagcttcagtgcctgcactacttcacccatgaatggcctctgtgacggatcattgtgaacacacatggaagcgatggatgctactttagctacatcatcaaagttgaaattgccattcagagaagggtcgatcaacctctccaaaccctccttatggcatagcagaggacgagcccaagtcacaaggttctgaggaccattggtatcagacatgcatacgggcttccttcctgataaaagctccagcaagacaacaccgtaactgtagacatcactcttcacaagaagatgcccggtcatggcatattctggagcaacgtacccaaaagtacccattaccctagtagaaatgggttgaattccattagttgcctcccttgctaaaccaaaatcagtaaccttaggagtgaaatcttcctccaacaatatattgctgcccttgaagtcacgatgtataacatgagggtttgagtcttcatgtagatatgctaagcctctagctgcacccagagcaattttcatcctaacatcccagttcagcatgcccttagccttatcagcaccatgaaggtgagattcaacacttccattgcgtataagctcataaacaagacaccttttgttgtgctcaatgcaaatgccaatcaatttgacaagattacggtgatgtagtcgactgagcatttcaacctccgcaatgaactctcgatcaccactcctgtcttctcttgtgagcaatttaacagcaatctcgtctccaccatccatggtcccatggtagacgcgtccaaacccaccttgacccaacactctttttgaatcaaaaccatcagtggccttttcaagctgggaaagtgaaaatgtctttactgatgttgtgcaagttgccactgttgagagcattgacgccgatgcagagctcaccctgctaacagacaaagttgatctgccac

SEQ ID NO: 37217 - DNA, 315 bp, Oryza sativa
  Clone ID: PAT_MRT4530_40966C.1
atggcgacgccacatttgcggcgcgggggaaagtccaagtgcaccgcgctttcggtcggcttgtgtgccgtgcgctgtgcctgcacccagccagccagccggccagcctacgacgcgggccgactcatccatcatcgacggctacctcgatacctcctcctcctcctccccgtgaagacattctccacggtcgcgccgtcgctttcgtcccttttcgcgcctccacgactccacccctgcctcgcatccattccaaatccaaccgcgtcgctcgcccgcccgcccgcctgggagccacctcggcttccttcgtag

SEQ ID NO: 37218 - DNA, 438 bp, Oryza sativa
  Clone ID: PAT_MRT4530_40967C.1
atgaggccagtgccgacgcgccgtcgccgaactgccgagcgccgagccctcaatgcgccgtcgcccgtcggcggggagtggaggcatggattaggatttgggcccggggatacctacgctgaggggaaggggtcctttcccttctaccacgtggccgcgtggcccggatcccccatcgggggatcggatgcacggatagtgaatagccaaggggtgcccatgtctccccaggaggctcgggggatctcgtcgtacccctcgggcccgagaggcggcgtcaccccgaggccctcgctcggccgccacgcggcgtgggggcaggtggaggacttcgctggggaccacctgaggacgagcgtgtacttcgcttccggtccaaggcatgggcagctatcaacccaggccggagtgggcccctctccaaggaggggagcgtag

SEQ ID NO: 37219 - DNA, 280 bp, Oryza sativa
  Clone ID: PAT_MRT4530_40968C.1
ctttcttcctcttttttttttttttttgtggattggatttttttttttgtcttttatttcttctggatgttgatgagctagcacacccagaggatgagtgatgagctctctaagtataaggaattcctcctagactccagcagaaaaatacacttggcattgcttgccccattcacggctacaaaaaaacctgaggcgaacatgggagttacctaaggccatacaaccagttgtatcgagctagcggtgacccggttcttgtgggcagaaatctttctgg

SEQ ID NO: 37220 - DNA, 238 bp, Oryza sativa
  Clone ID: PAT_MRT4530_40969C.1
cccacacgtccgccaggacttcgagcggaacgtcgagcagaaggacgagcaggaggaccagcgggaggacctccggccctcctacgcggcgaacgaggccgtgaagggcaccccgaggatcacggatcagcgtgcttaaacacgtgctcaaccagctcggcgacgacgcgtgcgacgccaagtgcaacgccaacaaaagcgcctacgacgacgacctcgactgccagcactactacca

SEQ ID NO: 37221 - DNA, 371 bp, Oryza sativa
  Clone ID: PAT_MRT4530_4096C.1
attgtcgatcaatcactaaatgtgtgctgataatcccccttcttctgttttgcgaaataggtgacaccgtaggcccaggaccattggttgaggatgcacaggaaaccttgtcaatcactctgggaccgtgatgtactccataccgggaacgatttaaggtgaagatgcgaatatattgtttcagggtatccgacgtaatgctgtctttcctaaccagacacgctctcgataggattttcttaagaaacatgtgaaatagattttgaattatcaaacttgtgcactgtctgctgggaatgtgatcgctgctatctactgagtcaccaagcagagtcaatacagacggctcttagacttgcaaaaaaaaaaaa

SEQ ID NO: 37222 - DNA, 181 bp, Oryza sativa
  Clone ID: PAT_MRT4530_40970C.1
gcaatataatgttgggtgctctggtgatggtaaagttaaatgttgttaatgacctcacatcagatcactctatttaaggataaggatataatttttgaagtactcagcttttacttaattaatcttgaacactcagatgtatacaacaatgaacaagttaaattaaaaaaaaaaaaaaaaa

SEQ ID NO: 37223 - DNA, 110 bp, Oryza sativa
  Clone ID: PAT_MRT4530_40971C.1
gaccggaatgccgtagaccttgtgcttccacaacttaagggggaactcaaacgggtcgggctgcacctgcctaccccgaacgtgtccgtggtggacctggtgatcaacac

SEQ ID NO: 37224 - DNA, 327 bp, Oryza sativa
  unsure (1)..(327): unsure at all n locations
  Clone ID: PAT_MRT4530_40972C.1
gtcttccagtnccctactncagttcaattcatgcgatattngacagttcttnantcaacactgctattnctactaatnngaagatcaccacatgcaccagcacatntatgcangtcacttgacaagtaacgnaagaagctattattanaaaaaagtttnaccanttagttaattatcacagnatttagaattactgagagttacccatgcaaantangtttgcatgcagtcacgtaaaaaagncccnaagcctttcaaaagattatgatataaancgggcagtggtacaccactgtggtttttcactatagggcattantaataaaa

SEQ ID NO: 37225 - DNA, 150 bp, Oryza sativa
  Clone ID: PAT_MRT4530_40973C.1
atgacccggctcggagatgatcaaacagtcatggggcggccggtcagaccggccttggctcggtcagaccgccatcggcttggtctgaccgacctcggctctggcggctctggatcggccaccctagagcacaccacccagggcatatga

SEQ ID NO: 37226 - DNA, 528 bp, Oryza sativa
  Clone ID: PAT_MRT4530_40974C.1
atgcgcatgttccacgcgcccagagattcgcggcaaccaagacgtgacccgagcgacaaggaccccgaaaccggcggcaccgtaacccgccagcccggtggaggggcccatcccccacgccacgagaccgcgcgatccggcggcgtcgtaatttcctacagcccacgcggagcatacggcggctgcctgtcaccgtcgtggcagattgatcgtgcagcacggcagcagaccttggaaacgctcgagctggcagtccctaccgtccaatggaccgagttttacaccggcggaggtggtactgcacgcttttcacgccgcccgcccgggctccagatccacgggccgcgccggccccacaccccgcgcaagtggacaagcggtcggtgcctcagcgcgccgggcgcgtaccactacagcagcctcgcgatccaggcagcgcggccgatgccgacacttgtcgagggcccacgctacagcctcgaacgtcgtcgcccgcccgccccgttccctcgcgcgcctgccgcctaa

SEQ ID NO: 37227 - DNA, 597 bp, Oryza sativa
  Clone ID: PAT_MRT4530_40975C.1
atggcgagaactccggtggcagcggagtccggctccgacctccgtttcggcttgctcgaggaaggccggccgcatcccccggtcgtcgcggccgcggcggcggcgctcgtgggcggagcgcagcggcgccgcaactcgacgcctccatggctgcacgcgcttaggttgttctgcatcatcgccgccaccgcgatggtggccgtcttcgccgcgtgggttttcccccggtgcaagggcaagcaggacgtgctcctgtgcgtcgtcgccctagccggtgccgtgttcaccgggccgatcctggggtttctgctgacgacgtgcgccgccgacgctgacgaccacgaggcggccgcgcgcgtcgcctcgcgctacaccaggtgcgaggagaacgtgggacgatccgtcatcctggccgttgcgctgctgggcctctacgccatctacctcgccgccgtgagctgcggcggagaagtcgacaggttcctgctggcggcttactacggcgtgatgggcgtcggggtgatcgttgggcactccgtttcgtggatcatggtaaatgccaattgctttttctcggtggttgcaattggtttttga

SEQ ID NO: 37228 - DNA, 338 bp, Oryza sativa
  unsure (1)..(338): unsure at all n locations
  Clone ID: PAT_MRT4530_40976C.1
taagcaaaggnaaggcacagcatcgtntccagcggagtcaaacacaaagacaagtcgagatccggcggccggtggcgtcctcctccctctccctcctccccaaccaacggcgctgatcccctccgccatctccgtccatctccgcctaaaaaaactaagcgatgtcggaggggttcgacgggacggagaacggcggcggcggcggcggaggcggagtagggaaggagcaggtcccggttcctgccgatcgtcaacatcggcgcatcatgcgccgggccgttgccgtagaatcggtaagatcgtcaaaggactnccaagnagtnccgttccaggatgtt

SEQ ID NO: 37229 - DNA, 1569 bp, Oryza sativa
  Clone ID: PAT_MRT4530_40977C.1
cccacgcgtccggtcttcgtctggtcttcccccacccgcatcccccggcctcctcaccgcagccgcaaaagccaagccgccatggcaaccgccgccgcgtcggatctggagagcaaggccaaggcggccttcgtcgacgacgacttcgagctcgccgccgagctctacacgcaggcaatcgaggccagccccgccaccgccgagctctacgccgaccgcgcccaggcccatatcaagctaggcaactacactgaggctgtagctgatgctaacaaggccattgaacttgacccatcaatgcacaaggcttatcttcgtaaaggcgctgcatgtatacgactggaggagtatcaaactgcaaaagcagctcttgaattgggttactcgttcgcatctggtgactcaaggtttactcgcctaatgaaggagtgtgatgagcgcattgctgaggagcttagtgaagtccctgttaagaaggctgaagatggagcagctgccccctctgttgcttcttttgttgaggaaaaggatgatgctgcaaacatggataatacaccaccaatggtagaagtgaagccaaaatacaggcacgacttctacaacagtgctacagaagttgtattgacaatttttgcaaagggtgttcctgctgagaatgttgttgttgattttggtgaacaaatgttaagtgtgtcgattgaagtccctggagaggagccgtaccattttcagcctcgtctgttttctaagatcatccctgagaaaagcagataccaagtgctatccacgaaggttgaaataagactggctaaagctgaacagattacatggacctcacttgattatgataaaaaaccaaaggctgttccacaaaagataatccctccagttttactgatagcccttcttttatcagctgaatcggcccagaggccatcatatccttcctcaaaatccaagaaagactgggataaactggaagctgaagttaaaaaggaggagaaggaggagaagcttgaaggcgatgctgcattgaacaaatttttccgtgacatctacagtgatgctgatgaagacatgcgacgagcaatgatgaaatcttttgttgaatctaacggtactgttctgtcgaccaattggaaagatgttggctcgaagaaggtagagggaagcccacctgatgggatggagcttaagaaatgggagtactaagatctcggttcgtgcatgctgtaaattcgttatcgtcgtgagtcatcacttggctggagatttcgcgcatcattgtcaagttggattttgtgtgatgctcttcgttgcgtttccatattgtaagctctctgtgtgacaggctagcttgtctaagactttatcctagttttggaagatacatctggacacaagaatacgttatctgaatctttgctccgaagtgcagaatgctctgtcgttttactaatattgcaaagtagtgctgtatctcctatcatccctgaaatgcgatgttcgtcttaattgtagcctctacaatgctcacagttagtttgttgactatctgtttactctccc

SEQ ID NO: 37230 - DNA, 1670 bp, Oryza sativa
  unsure (1)..(1670): unsure at all n locations
  Clone ID: PAT_MRT4530_40978C.1
gggttctgctctcgctccgccgccccgcctcctccgttcgccgagcgcccgccgcgtcgccggccgccacacggccaacctcttccttcctcgccgccccctcgcgcttccagttcctcctcctcctccgtttctaactagcgaggattagggttagccctactaccttcgcgctcttcccccaacccccgcttcgcttcttcctcgtctcggtcgcagcacgacgtccgcttcagtgagggaaggggagggagagggatggatgtgctgaggaagcaggcgagcaagttcaaggagcaggtcgccaagcagcagcaggctgtgataaagcagttcagtactacgggctatgaacattcagacgctgttgtaattgatgaagttgaattacagagacatcaacagcttgagaaattgtacacttctactcgttctggaagggatttccaaaaggacattgttcgagcggctgaaggtttggtttctattggaatcaggcatgttgaagtgggaacaaaattttcagaggattgttatagatatggaggtgaaagtagtgctagtgatgaagcccttgcaaaagcagcatctctgtatggaggtgctctaagaaatgttgagaaagagtacgaagaatttaatagaattttatcttctcagactatagatccattgagggctatggctgcaggcgctcccctggaagatgctcgtggtcttgcacaacgttatagccggatgagacatgaagctgagatcctttctgctgaaattgctagaaggaagcaacgggtacgagaagctccacttgctgagcacactacgaagcttcaacagtctgaatctaaaatgatagagcacaaagcaagcatggctgtgttaggaaaggaagctgctgctgcacttgccgctgttgaatctcagcagcaaaggataactcttcagcgcctggttggcatggtagaagcagaaaagttatttcatttgaggttagctgctatacttgatgatgttgaagctgagatgtcctctgaaaagcaaaagagagaatctgcaccgcctactattcattcccataagcgtgctgagaaggcccagtacttccttgctgaggcggtgcataacttcaatggtaccacagaaaaggagttgagtttaattgttggtgattatgtcgttgttcgtcagattgctccgaatggttgggccgaaggagaatgcaagggggtggcaggatggttcccggctgcctacgtggagaggcgtgaaaatatcccgccaaacaaagtcttcccgcaagcataaaccgccaaatgctagttgaaaatctagatttgcgctgctaaaatctgtaatttggtttgggactgccatgatttttggtccttttggagttgtttaggccgtatgactggtatgttctttgttctaccttgtacatgttttagtaacttgtgatcagtatacatgttttcctggcagcagattagacagtagactaaaagctttggccattcatgatgatgcctttcgaatgtaaagttatttatgtaccaaattctttcgctaatgatgtgcttattgattgatgattcccttccgtaaaaaaaaaaaaaaaaaaaaaaaaaaaaaanaaaaaaaaaaaaaaaaaaaaaaaaaaaaaaaaaaaa

SEQ ID NO: 37231 - DNA, 419 bp, Oryza sativa
  Clone ID: PAT_MRT4530_40979C.1
aaaaaatccaaaatttttttgaccccaaaccagccaaaccccaaaggagggcaaaactcccctcccttggccctctaacccaataagccaaccaaaaaccaagacagggttaatcccctttatttggaaaagtcccatgggggggaaggaaaggcccccccccccaagcggcccagggaaaaattttttggacacacccttaagttggttttaaggggcagaaaagggcgaggaaacagaaagtttggaaaagcccaaagccgggaactgggaaaacccgggggggggctggagaggggcagcccataaggggctttttttagggggagagccgggttgattaaacgggaagggcggcaccttgggagggggggggggcccccgccgcgggccggattaggggcccatttaaacaaaaa

SEQ ID NO: 37232 - DNA, 440 bp, Oryza sativa
  unsure (1)..(440): unsure at all n locations
  Clone ID: PAT_MRT4530_4097C.1
cggtgagcgagcggcggcgggcgggggctgaagcgacggtggccggcgggggctgaagcggcggcggctgcgggagctagctggaggtacatccttccccatgagcaagctcctccactgcgccaccgtctccttcccgcaccacgcgcgcgccgctgagatcctcttcgagcacttcacccctcgccccaacctctacatctacaagactacaatttcatgctctcttcggcgacggcggcggcctcctcctcgccgagtcgtcgaccggctgctctctacatgtcgatgatggcgtcatccattccccccgatgagcaaaccttcctgtcgatgctcaagtcggagcgccgctccgtcgggaagcaggtgcacgtgcacgtggaggtgagtggcttgcattcgagcgtgtacctncggaactcgctgatcaagatgta

SEQ ID NO: 37233 - DNA, 4113 bp, Oryza sativa
  Clone ID: PAT_MRT4530_40980C.1
atggaagctatggaaggtcggcttgtggacatgatccagtcgttggtgaagaaagtggaggaggtgaacgtaatgggatccaagctggagataattgataagaaattggagcagtatggggagcaattggggaaagtgcaggcgaaggtggatctatccatggattcccttgggcaagtgcagatggagcaagctttcgtgaccaaggcactcaaggaaggaaacccacacgctgcgccaacctcgactcgccccggcaaggctccgattctgcaaactccatcgacggcttctacgtcatcgacaccaccaactccaccaccgcttcctaatttgaatgggtatgcctctgttcagcccattcactctgctgcgcgtgatcatgctgaagtagaacacaaacgaaattggacccctaaaatggatttcccgaagtttgatggattgaaagatgaattgcactattcagttgctgctcagttgcctgaaaacgttcatcaagctttccaggttgctttaatctttgagagtgcacaccgtatgaaaaagggagttcataagaaggaagggtatctgactaagggaatagatacaccagcaaaagtaccaggagacatttggaaggcgcagcagttgaaggagtatcacaaaactcatggtttatgctttaagtgtggagacaaatatgcacctaggcatgtttgtgctaagcaagagggtccacagttgaaggcaatggaagtggagcaaaattctgaaatgttgactgatgaaatgttagatgtggtggcctgtttggagactcaaccagagaatatgttactgtctattcaagccatttctggttctgtggctcctaagaccattcagttaagggcattggtaaaagatcaggtggtactgattttagttgattctggaagctcacatagtttcattaatgaagctttatgtcagaagttgcaactgtcaacagtacctcatccttcttatgatgttaaagtagctaatggagctctcttgacttgtgcttctcatgtaccacactttaggtggctattgcagggacagacatttcagtttcctgtcaaagtactagctctgggaggttatgatatggtattgggaatggattggttggaacaacatagtcccatccaatgtgattggaatttgaagactatttctttcaatcatcagggttcttgggttactttacaagggattcaggccagtgctatgcattctttgactgcagcaactcctgatcagattatgaattggtttcagggtaatgatatttgggctatggctgttgttcaacagattactcctcccttgaactctgttataccatctacagtacaagccttgttggacaaatatcaatttgtattctctgcccctgactctttacctcctcatagagctgtggatcatgccttgccattactgcctggtgcagttccagtcaattgtcggccttacaggtattctcctgctcaaaaagatgagattgaaaaacaagtttgtgaaatgttggaggctggtctaatcactcatagctgtagtccttttgcttcacctgtcctattagttaagaagaaggataacacttggaggttttgtgtggattatcgtcgtttgaatactttaactgttaagaacaaatttcctcttccaattgtggatgagttgcttgatgaattaactggggctcaatacttttcgaagttagatttgaggagtggatatcatcaaatcagaatgttgcctgaggatgagtacaaaacagctttcaaaacacaccatggtcattttcaatctagagtaatgcctttcgggcttacaaatgcaccagctacatttcagtatttgatgaattctatatttgctccatttatgaggaagtttgtcctggttttcatggatgatatcctggtatatagtcactcttgggctgagcatttgtcccatttggagctggtctttcagacattacagaatcatcagttatttgctaaactctctaaatgctcctttgctacacccactttggaatatttgggacatactatatctaaagatggtgtggctactgatcctgcgaaaacagcatgtatgcaacaatggcctgttcctgctaatatcactgaactcagggggtttcttggtctcacaggatactatagaaaatttgttcaccattatgggattattgcaaaacctctgaccaaactgttacagaagaatgtgaagtttgtttggactcctgaagctgattctgcttttcacgccttgaagcaggctatgtgttctaccctagtgttagcactgcctgatttctctaagccctttgctctggaaactgacgcttgtgacattggaataggagctgtgctgcttcaagatggtcaccccattgccttttatagtaaagctataggcacacaaaacactattgggggacattctggaggtcaagccacttatcaacgactgaagaaattgtttatgtgggctggtctgaaacagcaggtggaggaatttgttcagcagtgtgctgtgtgtcagcaagctaaacacgaacactgcaaatatcctgggttgttgcagccactccctatacctgaaggtgcttggcaagaagtgtgtatggattttattaagggattacctctgtcccgaggatttgatgtcattttggtggtggtggataggtttactaaatatgctcatttcatccctttgaagcatcctttcactgccttacaagtggctgaagttttcctcaataatgttactaagttgtatgggttacctaagattattgtttctgatcgagacaaggtgtttaccagtgcattttggcaggctttgttcaagcgttttgaagttcatttgcatctaagctcagcttaccatcctcagtccgatggacaaacggaaagggtcaaccaatgtttggagatgtatttgaggtgtgctgtttctaatactccctctaagtggtgttattggttgccattagctcagtattggtacaacactacattccatactgctattcagtgttctccacataaggcattgtatggtgtggatcctcatcatggcattttaccctcctttgctttggaagatgttgacacctctacttcgtcctctgaggctgataacttgctgaaagatcgcactttctatgctagtttacttcgtcaccatttgactcgagctcagcatcgtatgaaacaggcagctaatgctaatcgcacgttgcgttcttttcaagttggtgacatggtttacttgaagctccagccttatgcccagcattcagttgtttctcgcccctgccccaaactggcaatgaagtattttggtccattctccattgtcagcaaaattggctcagtagcttacaagctacagttgcctgaagctagccgtatccatccggtattccatgtctctcaattgaagcaagtgatccctaataatgcaccagttttttctaccctccctatgtctttggagctagatgttcagtcattatctccttctgccatattggatcgtcgcatggttaaaagaggcaatgcggctgtcgtccaagttaaggtgcgctggggttctttgcctgaagatttttccacttgggaagactatgatgtcttgtgtgttcgttttccggaggttaaatcttggggacaagattcctctcatgggggcggcactgtcatagctgcagccatgacagagtcgaagtctaaagcagaggagaagaagaaaggcaaagcagagcgattggtgtggtttgatgattctcgaccttatgttgtgttgatgtgtacaatttcgcagggaattggtggatttgttttcggaaacgagaggtccgagtccaaggaagacagttacgtcgagagattccttgactgcataagcaacggtaccatacctgacgacagcaggcctgttctcctcaacgttctaaaagaagaccatgaagatgctgagcttgtgagaggtgctctagaaacctttgtgagtgcagtgactcctattgaaacctcaaaaaaccgaggttcagcctgcatcagtgaactctga

SEQ ID NO: 37234 - DNA, 396 bp, Oryza sativa
  Clone ID: PAT_MRT4530_40981C.1
gtcaggcgggactacccgctgagtttaagcatataaataagccggaggagaagaaacttacgaggattcccctagtaacggcgattaaattagttggatatttcacaaccttgtgaaagtgatattctacaacatcgctgagctccttgtttagtaacaaatgtacaggcaatctcaacattcctactggtagtgatacatgttactcaagtggcttttgccttttgtggcctgtgtgtatcttagttatgcagatggtagaagtcattttaagatggctgtatcacctttctttatgctgaagatcttcggaatgatcatatctgtacataattttgcttctttcacaataaatgatcgaccttctttgatgctcgtgcaaaaaaaaaaaaaaaa

SEQ ID NO: 37235 - DNA, 684 bp, Oryza sativa
  Clone ID: PAT_MRT4530_40982C.1
caaacttctaacttttttatcacatcaaaattttctacacacataaacttataatttttttcttcaaattttcaattttagtcaaacttttaattgtagcgtggaactaaacatattcgatcggtccctcgactcaacctcctctttctagtttttttaggaggaaactttttcccctctctcctacccaccccttcaaaatcgaaacaatgtggtagtaattttattagaaacacaataaacatatttacgcatatacacatttatatacttatccatataagagtgagtataataagatgacgtaaacagattgtccaagtcactccctccattttatatcgtaagactttttggacttatctagattcatccattgatcaatatatatattttatatatgtgtctagattcattaacatttatatgaatttggataatgttagaaggttttatactgtggaacggaggaagtaccacattatatttgtgcttatgtgaagggagagataaaaggcacgtaaaaagattgtacgtcaatatattaaaaggaagagagttcttgttacacacagtattaatcattaatatattaggtattaatgatgcagtatttatctataattaactattatataaatgagctattagattggttataaataatggttcaatttttaaaac

SEQ ID NO: 37236 - DNA, 213 bp, Oryza sativa
  Clone ID: PAT_MRT4530_40983C.1
atggcatattggcatggcggcccggccgggacgactccgcgcgtattgaaagccaagtacacgctctcttcgcctcctgcgcgcgacgacctcctcgaggactccgagacgcccggcggaccaccggggggtgaagaagaggccggcattagaggcaaggggcatctaacgtttaatggcacagctggatggattgctggagcccaaatctag

SEQ ID NO: 37237 - DNA, 1119 bp, Oryza sativa
  Clone ID: PAT_MRT4530_40984C.1
atggccagggcctggcggttgccgggagatttcgagccttcgggcgtggcagaatttcttgtgtcggtgaagcccccggggcggagtcgtgctggccaagtgagggcgcaacccctgcgtgaggcgaagcccctgagcatagtaatcgtgcccagggcggagtcgtgccagtcgggtgaaggcggagcccccgggcatagttgtcatgcccagggtggagtcgtgccggccgggcggagctcccaggcgtgcggcgtgcggtgtagagcccaggcgacgagagaggtgaagccccccgagcctgtagggaggttggtgaagcgtgccagctgggtgaaggacgaagcctcccagcgcggagaggtaggtgaagccctcgagcccgtggcgaggtcggcgaagtgtgctagccgggtgagtgacgaagcccccggcgtgtggcgtagcgcccaggcggagagggtggtgcccgtggcgaggtcggcgaagcgtgcttgccggacgttcgtcgatgtagccaatcatgtggtagtcgtggtcatggtagtcatgatgtcagaggatgagagaatgccattggggacgtcttgcatattcgttgtcgttgtagatgacgtgatcgatgccgtcatcggtgacgcggtcgttgccgtcgtagaggacgcggtcgatgtcgtcgatgaagcgtcttgcagattaatctgtcagaggacgcgaggtgtccatctatgtggacgagtcggcggcggcgcgcttgttcctatgttgatgaagaccatcggcgatgttgtgtcggagaagacaaatattggtcacgcggcatcgccggcggtgccgcctgccagttctgcgcgactggctgggctgccagctgaggagcaggccgacgcgttaccgcgctgccccggagcagaggatgttggcgaacttggcgtcgagtggcagcaacttgctgcgttcttggggagaaggatgtggtttcttttctgcattttaattctccgccggtgcagatgcggcgcggtcgtcttgcttgagcagcaggttgtcgatggcgtcggagacgatatatgtcgtaagggaaccggcggcagctgtcgtccgagccgcaccgcgaag

SEQ ID NO: 37238 - DNA, 519 bp, Oryza sativa
  Clone ID: PAT_MRT4530_40985C.1
atctcaccacagactattgtctttcacgctgactcgctggcaacttcgtagggtagtcaacacccgaggaatcttaccaaagattcggttttggctcagatccaacgtaagtacgctcctagcgaactcaatcttggagatatcgaactgaaacatgtttctcgacagatccagttgtcttgttgttttgttccgtccgaaaaacatggaaccatctccggttaaactgtttcccgacagaaacacagcgttgaagtcgtgttttgacaatgactccggtattttccctgaaatggagtgtcataaaacccgggatttataactttattaataataaagaatgttaaaatgatggttacctgagagctgattgttagacaagtcgagttcagggacgttgccaacaaaagaaccgaaagagtttggtatagaaccggttagcttattgtccgtggatctcaatggcttcaagcttgggcatctgagatagcgaaccgggaattggaccgggaaattggt

SEQ ID NO: 37239 - DNA, 605 bp, Oryza sativa
  Clone ID: PAT_MRT4530_40986C.1
atggaggtcgaggggatagtgaagctccgaccgctaagagggagggaggtggggcgccggtgctctgatggtggaacggcttcgacggcggtggccaagcgtgttcccgagcgacgcgcacccggggaagtcggtggctggccgagagagggaggagttggccggaacggcgagtagaagagcttggtttcggccggtatagggggcggcggtggtggcttaattcggaggggaagaggaagggaaaggttagggaatggatttgcctcgtcgaggcgaaggtagtggcgcgagggcttggtcggaaatgctccgacgagggagatcggccgatggccggcatttggaagagagagagaagagagaagctcggggctcggcttggtgtggagaaaatgggaggggttgccggctatttataggcggcgatggtcggtttgcaaggtcggttcggaggaggaagacgaggaaggcacggcgacggcttcgtttgcttagcggcgacggaagaggagttggcggcggcgtgcgccgtgcacggcacgcgcaccaggaggaggaggcggctcggctggtggtgtgggctggtttgggccggctcggct

SEQ ID NO: 37240 - DNA, 366 bp, Oryza sativa
  Clone ID: PAT_MRT4530_40987C.1
atggctaggaggtacgagacggtgaccatggttatcaggcacaaacaccaagacgccgccatcgtcagtgaggaatgtggtggcgtcagcctctatggtgtcacctgggccttcggtggcatcatccaagaccaccacttggcatctacggcagcactcgcttcacactttgcgtctcagccgcatgatcctatggtctgtctcgggcccggccctgttccataccccgggctcaccctagcccttgcagattctacaatcctcggcaagagggcgtcgggcctcgtcgggcccaccacgcaccacgtggtgagcacactggcggaggcccaactgtctcaaacgaagcctgggagcccggggtaa

SEQ ID NO: 37241 - DNA, 485 bp, Oryza sativa
  Clone ID: PAT_MRT4530_40988C.1
taacgatgccaaacttttccccgagacataccgtcgttacatggaaaagaagcttcgctctgatgctggattcccaggaacccctattcgtttattgtggcgtagccaggaagagaccagataaaaaaggtaaatctgcagacaacagcttgcagagctcagtaatcccaagcagaatggcgttagccacatgagttacacatgcttttcctttcttgagagcggaaaaagggagagaatacagaatgctttgcctgcattttttcccaagaggtcaagactgccggtaaaaaaagagtacaaattgtatatgtagtggacgagtactaggactggaggtcatctactaggtgttgtgactacatggtgctagtataagttctgtatccttggatgtctaggatgaccagcaagttgccacgtttggtgttctcgacatttgcttgtgcccttggacgaatactgaatagtactctctccgtttc

SEQ ID NO: 37242 - DNA, 138 bp, Oryza sativa
  Clone ID: PAT_MRT4530_40989C.1
atggcggccgacagagatgagctcgacgtcagcggcagcggcaccgagcctgtgaattgggagctcgagagccgagacgccaccgccgccgccggtaggcttctctccgtcagcccctcctccttgttgcgttgttga

SEQ ID NO: 37243 - DNA, 188 bp, Oryza sativa
  Clone ID: PAT_MRT4530_4098C.1
atgcgaggtggtaacttgagaatgatggttgggagaatgcaagatcagcgttcctatgacggtggattacttgtggagcttgtggataggacgaacacaaatatatatgtagctaagggtaaaaatcctaccgttgcaaccgaggctctgataccagatgatgaggttgttgtcccgatcttcacgac

SEQ ID NO: 37244 - DNA, 135 bp, Oryza sativa
  Clone ID: PAT_MRT4530_40990C.1
atggagatgcagacaatggcaatgcggcggaggttggggaaaacggtggcaacgacgggctatggccaggccaagccaggccactgcctccacgcggcccttgtggtgggagttgtcggtggcgtggggaggtga

SEQ ID NO: 37245 - DNA, 207 bp, Oryza sativa
  Clone ID: PAT_MRT4530_40991C.1
atgttgagtgtgacattgaaaagagctgttgggcatatattgccatcaggtggtggaggcaccgtgatccctcctgggaaccccaagatctccaagcaatgtggatctccaaagacagatgatgtcaaagataaattcgactgctcaagcaaggaaagtgttcttaccaggaagtaccccagggtcatcatcagggatggtttctga

SEQ ID NO: 37246 - DNA, 446 bp, Oryza sativa
  Clone ID: PAT_MRT4530_40992C.1
tgtgaaccttctttgtggcatctttaatatccaagttcgtggtttgtcgtaaaaaaaaaaaaaaaaaaagggcggccgcctgccccgtctgccgcgcctccgtctccgcctccgcgagctgatggcgagaaatccttgccgtgagaagggagcaaaggcgctgccaatcgcgcacccgccgtggtggcgacgcaacccccatgtaaactctgtaaggtttggcccccccgttaggtgttcggctaaatgcctttactttgatcatgatgtgtagtgtactagttttagctgtacattttgcatgcttctttctgctgttgtaaccaaagaagaaacgaaagcatgcatacaagtttcccttttcacataatcttgcggcggttaactctgtactattctgtagtttttcttgcagtagtaggcattgtgtaaaaaaaaaaaaaaaa

SEQ ID NO: 37247 - DNA, 501 bp, Oryza sativa
  Clone ID: PAT_MRT4530_40993C.1
atggagagctcctcgagatggaggcaggagcggaggacggcctcggacggagatcttgtggaggttagtggtgccggcggcgagcgcggtgatgccgtcgtcgatgatgaggcagtgccggagcggagcatgaacgtggggtcggcgacgctcttcgcgcggcggtcgcacttgagggcgagaagggaaatggccggcaagcctagagcacggccatctccggcgaggatccctgggagcacggcgtggaacaggactagccaaagcaccggcgtcgccgtcccatggtcctgcagcgtcgtacccatcaaccgtcgaggattgatgaaggggaggacggtgggactggctagagcagcgccggtggccggcggggcttggccggaccagggggagagagaaaagggagagtttgtgagactgacaggcgggtcccacattgatatttacactgcgttgccacgttggcataccacatgggcaaaagtggcaaatagttaa

SEQ ID NO: 37248 - DNA, 261 bp, Oryza sativa
  Clone ID: PAT_MRT4530_40994C.1
atgtgctgcaaggcgattaagttggggttcgcaagcgacggccttctcaaggcttgctgcggcaccggtggcacctacaacttcaacgtcagctccgcgtgcgccttacctggagtggtcgcttgcaaggatccatcggcctcgatatcctgggatgggattcactacacggaggccatcaaccggttcgttgccaaggggtggctctatggtccttatgctgatcccccaattttgactgctatccaccaccatcactga

SEQ ID NO: 37249 - DNA, 1639 bp, Oryza sativa
  Clone ID: PAT_MRT4530_40995C.1
gcgctcaccctaaccgcatttattgcggtttggacgagcgcgtcacgccgcatgtaacgcagtgcagcgcgctcgttcatccggtctgtgatcagtcacagaccggtcagatcgtgggctaggtggcgacaggcggtctgacgcacgcctcgccccatcccgtcaggacgagagcctccaagcactccgccggcgccggtgtggtcgttcggcgcgttgccgccattgatcgagccggcggtggtcgagccgcctactgcggttgcgccggtgcacgccgtcgccgtcggcgaggcgccgccgccgttgaaggaggagagcggcagcggccatgtcaagaagagcaagcacaaggacgaggagagggcgccaccgcccaagaagcaccacgagaaggcgccgccgaagtccaagcaccacggccgccacgctccaccggatcagccggagctttcgccgccggcgccgccgcccgagtcgtacacccctgatgcgccgccggcgccggaggcggcgagcccccaccacggcggcggcgagaacccggcgtggccgcgtcctggaaacaaccagtggccacctctgccgccgttcaaccagccgccgacgccggaatggccgcacccggggaacaaatggccgccgctaccgccgttccacccgcctccgacgccggcatggccgcatcctggtggcaacaagtggccgccgctgccgccgttcccgtctcacccgccgccgacgccggcatggccgcaaccaggcaacaagtggccgccgctgccgccgttcccgtcccacccgccgccgacgccggcatggccgcacccgggaaaccagtggccgccactgccgccgttcccgttccaccctccgccgatgccggcatggccgcaccccggcaaccagtggccgccactgccgccgttccacggcagcgatgtgccaccgcctcagctccggtgtccacccagcggcttacccgtggggcccacccgctcccgcaggccgcagcaactggcaagccagcaagatgagcaacacgcggctcggacctcacgaccaccacgtgtctcacagctacccgggccccgccgatccccggccccacctgtcatccacacgaggcggccaccgccaaacacccctcgccctccacctccccctacaccccgacctcccaaaccccagccacttcgccgccgcagccgccgcagcagcagccgcctctcgccggcgttgaccgccgccgccgcagccatcatggacccgcgattcccgccgccggcgccgtccgggggagcgccgccgagggggcaccaccggcgggcgcactcggagacgttcatccggctgcccgatgccgacctgctgctcgacccggacggcgagttcggattctccgacctcgacttcccttccctctccgacgactcccccgcggcgtccgacccgaccccgcctcctcccccgccggcgctgccgcaggcggcgccgcggccgcctgggggtgcacacctgaggagcctctccctccgagtccgcgccgcccgactacgccaagaaggccatgcccgccgataggctcgccgagctcgcgcccgattcctgattacactccgtataatacgaatccaga

SEQ ID NO: 37250 - DNA, 204 bp, Oryza sativa
  Clone ID: PAT_MRT4530_40996C.1
atggaagaaacacaagacacgggcgatgtatacaggttcgggccgctgagaagccctcaatcgtcctcgatcctccggatcctccggatcccctttctaagtgggcaaggaggtaacacgccggctccggctagggacgagtgcttggaggctctcatcctgacgggatggggcgaggcgtgtgtcagaccgcctaccggataa

SEQ ID NO: 37251 - DNA, 498 bp, Oryza sativa
  Clone ID: PAT_MRT4530_40997C.1
tagatgagagagatgagaagcggggtgtaagtttacagtcggcttaggcgcaggagccaagaaatctgtgatacagacaggtgggccatatatttatagtgaagagttaaccactatataagtgagttaagagatagactataaagatctatacagtaagcagctagctgtattattatccttgctcttagagaggataaaaccctacagttgcttctcccggctgcttctctctctctccaagcaaaactcccatttccaaaaaaaaaaaaaaaggtgggcttcacttcacaagttcttctccaattccgattccgaagtcctttcaacccaaaaggctgatgtgctggttgccttgtctagggtgctcctgaaatgttctttggctatgggtaccaactgaagctttgttttcgcggcgtcctcttttcatgtagttcaaattgcatttaccatttgatcaaaagcaggtgcattttgatccataatttttatgac

SEQ ID NO: 37252 - DNA, 1367 bp, Oryza sativa
  Clone ID: PAT_MRT4530_40998C.1
atggacccgcgattcccgccgccggcgccgtccgggggagcgccgccgagggggcaccaccggcgggcgcactcggagacgttcatccggctgcccgatgccgacctgctgctcgacccggacggcgagttcggattctccgacctcgacttcccttccctctccgacgactcccccgcggcgtccgacccgaccccgcctcctcccccgccggcgctgccgcaggcggcgccgcggccgcctgggggtgcacacctgaggagcctctccctcgacgccgcgttcttcgatggcctcgcgttccagggaggaggagggggtggtggtgctgggagtgggagtagcggcggtggggctgggcataagaggagcgggtcgatggatggggagagctcgctgttcgagggcgagtccgcgccgcccgactacgccaagaaggccatgcccgccgataggctcgccgagctcgcgctcctcgaccccaagcgcgcgaagaggattctggcgaacaggcaatcggcggcgaggtcgaaggagaggaagatcaagtacaccggtgagctggagaggaaggtgcagacgctgcagacagaggcaaccacgctttcaacacagctcacgctgctccaggcgtactgggatgctatgatcataaaaagtgttagtctctgtttggttgtatttattctcaactgtgagtaccgctatagttctgtacttgcaaattgcactttccaggacaagcagggccattacaaggcaattgaaatcaaagaatccaaatatatttatccagataagcaaagcaacctgttgagaaagccttctctgtttaatgcagctctgaatgacgccctacgagaagaagttcagcggcttaagatagcggcaggccaagttccaaacatgaacggaaactccttcaatggaggactccagcagcagcagcagcagcagatgccgacctatttctcgcagcagcagcagatgcactacttaagtggccaccagggacgtcatcaccacccaaataatccccataactctttgaacggaggccaatcgatgagcggccagaccctaaatgactccatggatttcatgtgagcaggactcaagcacacctcaagttgcacgctaactgcaactcatgtactgtaaagatagctgatgtataccatatgcatatatgaatcattcgtagggtagctagctgatctttgtaccattactgaaaatgcaattcatcctcctgttcaatcatctgttaatgccttagtctgaaggttgaaagaactgtgtttaacatgtttgcgacggttgttttgtaaagatgttgttatagtgaatggaatgggttctgattg

SEQ ID NO: 37253 - DNA, 679 bp, Oryza sativa
  Clone ID: PAT_MRT4530_40999C.1
ggttgatctagcagacacaggatcgagctctcctcgagtaacttgctgttgtcaacgacgacgaggggacgaatcgaccgcaacagaaacgcgaagggtctcagatcctcttcaccttgtctttgccgcggtgttcatccctttacaagagagaaaaaaaaattaccaattcaatcggcgacacaatcggcgacagcaatggccgctcaaccttggtggcggttcctcgccctgctgcttccgctgctcatagcggtcatgaggcaggtggctggcggcgtccaagccccatccccaaggctcttcccagtggccatctcgtgagggtggccggatttctgatcatgttgcgcgggagagatggcagcagcggctggagcgatgtgatggggaacaagggaggaggccagcatcaggggtagggtagttgtctggttgtccatgttctaatttacctcattagtgttgtgctaaatcgaaggcgagttccagtagtgccttattcacgatcattaggaaaatgaatcaatgatgtacacaaaagctggcagtgcaacattgctgccttccatgaaatgatttcttccaaaagaatggaatgataatttcatcgttcagcatgatgcatttttccactcgctctcagtggagtttaccaagtctcaagttgttacatcaa

SEQ ID NO: 37254 - DNA, 592 bp, Oryza sativa
  Clone ID: PAT_MRT4530_4099C.1
ctttttttttttttttttttttttttttttttttttttttttttttttttttttttttttttttttttttttttttttttttttttttttttttaaaaaccaaggccccaaaaggggggcccaggcccaaaaattttttacaacccgggcccccaaaaaaaaaaaatttgggcgggaaaaaaaatccccaaaaaaaaacccggggacgggaaaaaaaaaaaaaagcccccccccccaaaaaaaatttaaagcagggggggggggccccaacgaaaaaaaaaaaaccccttttgggaacccaggaaaggggaaaccccaaggttggggccaccaccttcccccttaaaaaaaaaacaaaattttgggggcttccccaaaaaatttttaaggaacgggaaacttcaaaccaagggcctaaagaaaatttttaacgggaaaaaaaaaaaaattttctcccccagggggaaaaccaaaaaaaaaaaaatggccccgggaaacgggaacccccgaaaggaaagggtttttaaaaaaccaccaaattccagggggggggtttcaaaagggaacattgggaaagggtttttttttccct

SEQ ID NO: 37255 - DNA, 204 bp, Oryza sativa
  Clone ID: PAT_MRT4530_409C.1
atgggggcgactggcggcgtgcagaaggcgagggctgggggtggcatgcaggtgcaggcgtgtagcgtggcggtgggctgccggctgcgtcgagcagcgactctggtggcggagtttctggatctggatgtgtcgagcgggggaggagccaatgccagtgacgtggagcatagcaacgacaagggccacgctatggagtggtag

SEQ ID NO: 37256 - DNA, 274 bp, Oryza sativa
  Clone ID: PAT_MRT4530_40C.1
cgctgtcactgcgcctgctggtgcgactaatagacacgagcgctccctcataggaccgcattcgcgcctttggccgctaccaccgagagagccctgcgccgccgcccgcgtaccttattctgccgatgccctaggcagatcgccgtatcgttgccctagtagcacctcgtgtgatattccctcatctcacatatcttttactttcaaacgaaccgtactggagtgagcgagatgccgtactcgtaggtcccgtttgtgcggtgatctatatcat

SEQ ID NO: 37257 - DNA, 475 bp, Oryza sativa
  unsure (1)..(475): unsure at all n locations
  Clone ID: PAT_MRT4530_41000C.1
tgatagcttcacaaattacaaaacgcaatcaggaccaccacaacacggcggcggaaatggcagcgacggtgacccagaacgtcgactgcaaggctttcaacgacgcccttctgttcttcgacgccgccaagcaccccgcccttccgcataggtgacctacaagccgtcatccccgtccactgctagcgcaagacccccctccggtacctatactacgtgggccgctacctcctcatccgacgccggcctcttccgctcatcacgattcctccatcagtactcgcatggtcagtgggcagtggacgctctactgctcggcgcatggcaccatgacatgggcgctcttaaggactcgacaccactgcagacactggagcgtttccgacagcgccatgctcaacagcgctctgngncaactgcatgactgcttcatgcttgctcgctaccatggatggaggatcaggcacagaacaca

SEQ ID NO: 37258 - DNA, 276 bp, Oryza sativa
  Clone ID: PAT_MRT4530_41001C.1
atggccaactgccggcgagcgcgaggcggcggtcggacgaatctcgtgttcctttcgctccgtggtggcgcgtcctaccgcgagagcggctggttggtcaccacggtagcgtacacgaacacggtcgatcgggagacgacagacgagacgccatgcatgttcgcggccgctcgccggccggtgttagcggtggccggtgaccgggtgtctgaaatcctatccgatctccttgggaaccggagccccatgcgcgaacatgagcatcacaacgtctga

SEQ ID NO: 37259 - DNA, 198 bp, Oryza sativa
  Clone ID: PAT_MRT4530_41002C.1
atgacgatgaagactcgcagtgatgacgagcggacgacaaagctggtggcggcagtgggggcacgaagtggagacaatatccactgcaatgaggctcatttagttttctttgatgtttcacatgttggtttggcggatgcggattatatatctgggtatttactgaacaatcgcaagtatttcatccatattgtttag

SEQ ID NO: 37260 - DNA, 356 bp, Oryza sativa
  Clone ID: PAT_MRT4530_41003C.1
cttctggtacaaggtggactacgggatgttcctgttctgcatcgcttactgggagcgggactggagggagggtgaccgaccattacaagtttatcgatcagtgcctgtctacggtggacctgaagcaccagccgtggtttagggtttcggcgctacctttttctggtctatttctccaacttggtggttcgcctaccagggctttttccatgatcccgtatggatgtagagcttccatcggtcttttgtactttctctctttccttttttctactttctttttttttttcttttattttccctttctttctttttctacttttatttcttcttttttcccaatccctttttctttt

SEQ ID NO: 37261 - DNA, 504 bp, Oryza sativa
  Clone ID: PAT_MRT4530_41004C.1
atgaccattgacgaacacaatgccatgtgccccttctcaatccggtgtcataatcagcggcaaataggagccccgtcgtggttaccggtgcagaaatggtgggaaagaactgggtggggaggacaacagcttggtgcaaacaaaatggcatcaacgactgtccacaaatcaactgcaatctatagacattgcaaacgaagagggaacaaaggagaacatgcaaatcaagaagttcatatgaccatagcaccatacgcacttgtccgattcgttgtccgagtcgatggctccaaaacttcgttcacaactcgcaaagaagaaacaacaatgctcatccgagatatactagctctgctcactgctcagcaacgtggagataaagttgttggaaaacgccgggatcgggagcccgacacgcgtaagaaaaatcgggcgccccccacgtgtccccaccactctcttcctgttacaacaaatccttcacatattacggaaatgctctat

SEQ ID NO: 37262 - DNA, 972 bp, Oryza sativa
  Clone ID: PAT_MRT4530_41005C.1
gggaccagcaggtggccggcctgcaagttctcaaggaaggcaggtggatcgccccggccgggcagcccaacgcgctggtgatcaacattggtgatcagctacaggcgctaagcaacggaagatacaagagcgtgtggcaccgtgctgtcgtcaactctgacaaagcgaggatgtccgtcgcatcgttcctgtgcccctgcaacgacgtgctcatcggcccagctcagaagctcatcaccgatggctccccggccgtctaccggaactacacctacgacgagtactacaagaagttctggagcagaaacctcgaccaagaacactgcttggagctcttcagaacaacacctacagacacatcttgaattcttgatctactcgagaactggtttgtagtactcggttgtaggtgtaggtggtgttttgggaggagaggggttggtctgtgggagagagcccggacttatatgttttggtgagaggatctcccgaaatcaccccacggtagtttctcctggttgtagtgcggtttgtagtactcggttgtacgtggactggtacgagccgttgcattgagtaatcaaatcaaatcaatcgatactgtgaaacttactacctccgaaataagtttgagttcactcttggatgcctatttgctctctgttaattggacactaaattcctcagcggcctccattcctagcttcacttataaggaaaaagagagcacaaagagatttcgttaatagccatcatagggaagtgtggattgtgttgaaggtcctaatcagttggttttttgtccctggttttggatattaggagggtctcttagtatctttctttttgtggaacaactttcagtgtctgtaactctgtattcctttttttacttgcaaagggaatggcatcctttgtggttgtagaaaaaaaataaaaaaaaaaaaaaaaaaaaaaaaaaaaaaaaaaaaa

SEQ ID NO: 37263 - DNA, 1624 bp, Oryza sativa
  Clone ID: PAT_MRT4530_41006C.1
ccggccgggaaaaccctcgtctccctcactgtcccgtccctgcggctgcgctccactcgtcgccgccgccgccgtcgtccgcgtctccgtctccgtccccgccgaggtatcccgtctcgtctcctccgctccttgcgtcatctctctgctgaacaggggaggggcgccgatctccatctggcgagcagagcaggggaggggatcctgaacattgtgagaatggcctggagtcagagtgctagaaagcccatgattgggcttctgtttcgcgcccaacaacattctgctcggggttactcttattcagcgttccaggctcacctttcgagcagcaatgtcgatcaaagcgccacacttctcaggagattcagctccgaagttcctgcgtcggagcaaatgaatctcatcaaacagctgagggagaggacgagcgctccaatcaaagatgtgaaggcttccttagttagttgcaactgggatattgatgttgcacagaaggacctaaggaagagaggggtggttcttgctgccaaaaagtcttcacggactgcagctgaaggtttgcttgctattgcacaagatgagaaaagggccgctgtggttgagcttaactgtgagacggattttgtggcaagaaatgatgttttccagtatctggcttcttctttagcaaagttggctttatcagcaagggatcctggtgaattggtttttccttttggtcctgactatttggagaaccttaatgtcaatcttgatcatcctaaacttagtggggagacaacagtccaaagtgctgtcacagaagttgctgccatggttggggagaatgtcaaattcagaagaggtttcattatgtccacaactgcacatggtgttgtttgctcttatatgcacacatgtccccagccaggtttgggtcgtcttgctggcttgatcacactagaggcagaagacagcaatgctcctcttgatgctcttcagagagtcgggaaatctattgcaatgcacatcgttgcgacaaagccgttgtttttatcaaaagaactggtctctgcttcagctgttgaaaatgagagggacatactccggactcaggctgaaagctctggaaaatcccaaatggccatggagaaaatggtggaaggccgactaagaaagtattttgaagaagttgtgcttttggagcaaaaatatgttgtcaatgacagcacaaacatcaagagcgtcctgaatgatttgtcaaaggaagttggctcaaaagttacagttggcaattttgctaggatggaagttggcgaaggagtttcaaaggtacaatatatttgtcacagcaacaatggattgagcatttttatagttttcaagctgacatgaatcaaatgtgataactgagatatgctgaggtttctcttcttctcaagttagatttattagtctcctgagaactgtactactttgtccgcggtttggctccaacaatacggtcatatttttctacaaatgctatgtatcaattagttcacaagtgaactttctctagagagtagtgtcacaattcgaatttaatgaaataatgtttgatctaaacaaacaagccatacaaggtcacgctgactcctgc

SEQ ID NO: 37264 - DNA, 517 bp, Oryza sativa
  Clone ID: PAT_MRT4530_41007C.1
gggaaaaaggacaaggcaattttttcctacgggaagggacccacaaaaataccattacccacaacttttgaaaacatgtcatggggggaaggtggacccgctgggaattgaacaaacccaatttgaaaggctgaacaggactaccacaattattggcacaactcaaaagacacggccccctcaaaaaactaaaacaaaaaaatggccattttttggatagggaaaactaactgaacagggagcccactttgaaaacaacaaaggggcccccagaagcataaaaagagcgacccaaaaaagttcttcctccttgggggggggaaagacccaaccccccttaggggacaaaatgcatgtcaaaacgtatcccccgcccatttggttctcggcgaggaaggaaccttccgactgataaaattctcccgatgacattttacccgcacatgtggagcatgacccaacccggcatgaaaaaggcagctcccccccgggagtttcaggggccccgaaaagggag

SEQ ID NO: 37265 - DNA, 256 bp, Oryza sativa
  unsure (1)..(256): unsure at all n locations
  Clone ID: PAT_MRT4530_41008C.1
gcgtgctggtcctcgtcagccacggagcctcgggatcacctagattatacgatagctccatatgcatgcggaggcccgcgaggcagatgcataccgtncgccctctcttgatgacgactagactaacgtgctcttatcgttacgaaggagtagagatcactgattgccctttactggaggtgcctatgttatcgatgctttgccggtagactgatatctttttcttctactgtaaacattactctatcaccttatt

SEQ ID NO: 37266 - DNA, 358 bp, Oryza sativa
  unsure (1)..(358): unsure at all n locations
  Clone ID: PAT_MRT4530_41009C.1
angcncggcctnnngcncnacccnngnttnangngcnnnaccatcaagcctcagaccgcacgatcggncttcccggagaccaacactggcatnantatcctnnntgagaggangcntnangaccctncggagcgctantncacnccatannntnatnatcanctngtcataaantaaccaggttatngnncanntngngctgtngnnnggngaagagcactggcaagnacgagncgaaggtntaagnncttccaaagcacnatgnncgngaaggtggncccanttcacttggntaanattngtgacaggntgntcaagttctctaagttgcnggntacctacatcagggttcangttn

SEQ ID NO: 37267 - DNA, 356 bp, Oryza sativa
  Clone ID: PAT_MRT4530_4100C.1
gtggttgagagcgcggacgccgggaagatgaccgagtggtgccggggttgtagaaggaggcgatggacatgcggttgacgctggggctcgtgaggacgctgtgcatgacccttttgtacctgccgatggtgatcacctccagttggtcgtcgatgttggcaacaattgtttggcgtatggtacgggacgtacacccactagttttccttgagcagtttgatgccgcttacctgggggcaactggaacagttggatgatgccaccggcgtggcttgggcgcggagcgtcgctttcaagatcggggccttggatcggcgggtagctgttcaccttgaggccaaacgattgtgcgcact

SEQ ID NO: 37268 - DNA, 375 bp, Oryza sativa
  Clone ID: PAT_MRT4530_41011C.1
atggtggaccccaccgagacctacaacgtctgcctcttcaaggtttcaaaaggagtgtcgagatctactgaatctacatcttccaggaagagtgtcgagacttacaagatcatcttcaaggtgctaaagcagacactgacggataccggtgtcttgtctaaagctatgcccaccatgaactccttcttcatcaacatcttcgagaagctcatccaaaacaacaataaaatctatctttggcaatatgagcgcgctcgagtccaaccgtcggtatggttcggtcttaataactatggcgggggtgccctgaggattcgaggtgacccaagcacggtggctagtcgaacacaagttttcaatcccttggggacctga

SEQ ID NO: 37269 - DNA, 164 bp, Oryza sativa
  unsure (1)..(164): unsure at all n locations
  Clone ID: PAT_MRT4530_41012C.1
tccccttggggtccttttgccgtttagagttatttagctaagtgtggtccctgtaattgaatataagtgccaatataactaccagttggatatnccataacccgaatcttaatgccaagattttatggatgaaaaatgaaagataaaaaaaaaaaaaaaaaaaa

SEQ ID NO: 37270 - DNA, 408 bp, Oryza sativa
  Clone ID: PAT_MRT4530_41013C.1
atggtggaccccaccgagacctacaacgtctgcctcttcaaggtttcaaaaggagtgtcgagatctactgaatctacatcttccaggaagagtgtcgagacttacaagatcatcttcaaggtgctaaagcagacactgacggataccggggtcttgtctaaagctatgcccaccatgaactccttctttatcaacatcttcgagaagctcatccaaaacacaataaaatctatctttggcaatatgagcgcgctcgagtgggcaagggttatagttattgagaccggactagtccaaccgtcggtatggttcggtcttaataactatggcgggggtgccctgaggattcgaggtgacccaagcacggtggctagtcgaacacaagttttcaatcccttggggacctga

SEQ ID NO: 37271 - DNA, 129 bp, Oryza sativa
  Clone ID: PAT_MRT4530_41014C.1
atggcgtcggagtcggacccgaagaagggcgtagataaaaacattttggccgacattttgataattgaaagctttattgttgcaaatggtagtatacaagaggccaagagcagagaaaaagggatttaa

SEQ ID NO: 37272 - DNA, 594 bp, Oryza sativa
  unsure (1)..(594): unsure at all n locations
  Clone ID: PAT_MRT4530_41015C.1
ataccgtaatccaagcaagccacaaaaagttctaaaggtgcaatagagaaggacagggtgtctgaagggttcccaatctgttcagcaaatactcactttctgaaagagaaggtatctatgcaaaacttgtgtgagaaggactggagatgtaacaaaactctaacttttctgtaagcggagaaagattttgcagaaaatgcccaggggaaccacaatgggtggctttcagaaaatagtcctttaaaagtgtaagctttngttcctactccttgccctntgttgctaaactcttctaaattctagcttccccctcaccaccaaagagtagttttcgcagggttacttgaggtgctgcctcctaggcttaagttctcattttgccctaagtaaaatttaactctacgctttaaaaaaaaaaaaaagagagagagagagagacttcattctggcaggcaggcaagggtcccttgatgatagttatctctgagtcagcttgtgaaactcagcagctcaggagttgccctgaagtcctccagagccagattatattcgagactcagaggcagtccctctatacagaagcaccaaactatg

SEQ ID NO: 37273 - DNA, 597 bp, Oryza sativa
  Clone ID: PAT_MRT4530_41016C.1
tgttggcatcaggaagcggaggcggcggcgacggcgatggcgtgctacagggaggaggcggcgtgctggatctaatgggttaggcggcaagaacgggcatgtccatgtctggcgaggaggcgaggacggtttcgctctcgtttccgcggttgtcgtcggctccctccctcaagcgagaaaagcaagaagcgcgccgcctccgccaaggctgccgacgaggcctccaccaaccgcacccgcgctacctcccgacgccaactcctccgctggatccctattgctgtatcgttctccttggtgaggtggggacttctctagggtttggggattgggggatttatagggttcctctgccctccctattcttttggatctggagaggcaccctccctcgtcgccggcgttcgtcctcccccaggctctaccgtccgccctccaccgacgcagacgtccgagagcccgcgcctttcttcccatgcatggccctccctgctcctcggccggccatccacattggccgtggtcgatgcggtgccgaacccgccagcacctcgcgtcggccacggcttcgaccctcatcatcgggggcatcgacat

SEQ ID NO: 37274 - DNA, 1333 bp, Oryza sativa
  unsure (1)..(1333): unsure at all n locations
  Clone ID: PAT_MRT4530_41017C.1
gcacgagggcgccattggaagcggaggtggagaaaggaagctggcattggtgcgtgattgaaatgctgacctgattttttttagtacattgaggatagtgggatgatggcaccatgatgggggctagtccacccgaggagcaacattcaacggtcgaagaagttgttgtcgtgagacgaaaccagaaaagaacaaagaatttcagcgggaaggaagacgaagggttggtttcggcatggttgaatgttagtaaggatgtagtccaaggcatcgaacaatctcgttgtgcatactggaagagaatttacgattacttccacgcaaacaaggacttcacctcagaccgttctcaaaattccctcatgcaccgctggtctactattcaagagaatgtgaccaagttcgagggttgtctaagccggattggggatagaaagcaaagctgggtttcaagtcaagataagattatgcatgcatgtgctctgtacaaggccgaagatgagaaccataggccatttcacatgatgcactgttggaatctcttgagaaaccagcaaaaatggattgataggtcgtctcagctgccatctcacaaaaaacagaagataaccaacaattcaagtctaggtatgtctactactactactgatgatactgcggctgctcctcctcctcctccaggatttgagttatcgaagactccagaaagtattaatgctcctccaagatgtgagttatctgagagaccagaaagtaggaatgctcctccaagatgtgagttatctgagagaccagaaaataggaagggggagaaagaaaaactacgacgaggtggagatgtggtctttgtggaggatttagatgatttgttggcaaagaagaaagaggcagatgtggagaaagagctcaagaaagatgagagatatatacaatcacatgccctagagcaagagaaggttgcactagaacaagcgaaggttgcaaacgagacaaaaaatcttgagatgaggagcaaagaattagaattgaagaccaaggagatagatttgaaaagaatgttagaagaagagaggattatgactatggatattagtgccatgtctgggctacaacaacaatattacaagagcttgcaggaggagatcgtcactcgacgatttaatagctcgggttgacctcgtatgtctattattggttgttcacggactattatgttttggcgaaccatgttgaagtcgtatagagaattatggtancacccccnnaccttgttaaattgttcggactgttaatggaactgcatcccttataggcttactccccttaaaaaaaa

SEQ ID NO: 37275 - DNA, 300 bp, Oryza sativa
  Clone ID: PAT_MRT4530_41018C.1
atgggaactaacagcccctatcccccaaagtccaacgcctgcgtgatgctaccgtactactacgggcctgtgaaagggcggtgccgaggcggaggcgtcctggctggaggcggcgccgacacggtggaggttggaggcggagggtggaagcggtgcagtggaggcagaggccgagcggcggggatgagcaatgtgggtggcatgcagagagcaagattggtgaggatgagacgcgagaggagcagcgacttctccggtgacgacgacaaccacgtgagggccgggctggccgcttgctag

SEQ ID NO: 37276 - DNA, 752 bp, Oryza sativa
  unsure (1)..(752): unsure at all n locations
  Clone ID: PAT_MRT4530_41019C.1
ctctccttcttcactcctccacactgaaatctcactgccattgccaatggcggctcgccacctcctcctcccggtgctcctcctcgccgccgcctccgcggtgacctcccagtcgtctccggccggcgcgcccagctccggcgcggcgcactcaccggccgcctccgcaccttcgtcttcttccaggaaccgccaccgccacatctccacctcccccgccgcgtccccgtcccactccggcaacaagctcacctccccggcgacctccccggcgccgacgacgtcgcctccgcccgccgcggccacctccccgtcgcccgcattgccgcctcccgccgccgcgccggcgccgacgacggtgtcgccgtctcccccggcgccggccccggtgctcggcgcgccgccgcccacattgcccccgccggtggccgcgccgccggtagcgctcgccccggcgccggcattgtcgtcgtcgccgccgccgacaccggcgcccctcgcgccggctcccgtcatcgccgcggcgcccgcgccgtccgacgacgtcccggcgcccgcgccggcgaccaagaagccgaagaagaagcgcatctccccggnaggctcccccctcgccgccgcctcgccggggaccaccgccgncttcgccccgggccccgccccctcgncgncgatatgtcgagcgacgcggcgcgagggtcancgcggtgggaagagggccggccctgctgctgatgctgctgctggggctg

SEQ ID NO: 37277 - DNA, 348 bp, Oryza sativa
  Clone ID: PAT_MRT4530_4101C.1
atggcgacgggttcgaggaggcggaggacgcgcacctcatcatcgcagccgccgcccccgttttcgttgtcctccgcgacgccctccaatgttgacagcatcatcgccatgggcggcaacgccaccgccgccgaggatgatgacgatggcgacgggttcgaggagcaggaggaggagaacacacagctccgctatggtttgtcgccgggcggccatcactgtggtttgttgctggcccgctccgccccgccggcttcgtgcgccgccactctgcccacaccaccccgccggcttcgcatgagagagagagagggggataggatacagagaaaagaagagagtggatga

SEQ ID NO: 37278 - DNA, 219 bp, Oryza sativa
  unsure (1)..(219): unsure at all n locations
  Clone ID: PAT_MRT4530_41020C.1
gtagattagtttgtacatagatattttccaaaatcataattaaatatagagtagtctaacttaaacataattataattttggaaaatatctatgtacaaactaatctacacaaccatgcaaanagntatatcgaaacgtaaaccctaggtgatcancgtncanaacactattacantatgnctgccagttatactatnnctatntgtattatgcancct

SEQ ID NO: 37279 - DNA, 1263 bp, Oryza sativa
  Clone ID: PAT_MRT4530_41021C.1
atggcggaggacgaggcaacggcggcgcgcgccaggcagcagaggcagccgccgtcgtgggcggacatcccgcgggacctggccgtccaggtgctccgcttcctcccggcccaagtggacagagcctgcttcgccgccgtgtgtccgcagtggcgcggcgccgcgcggaacgccctcctgccggcgcccctgccgctgctcgcgctcccggacggcgccttctactgcctcccctacggcaagcccttccgtttccctcgtgccggctgcgccggctacaagaccgccgcctgcggccgctggctcgtcttcccgcacgacgacggctgcttcttggtcgaccccttcgccggcgccaccgtgacgctccccgccctgtcccgtgtccggctccgacccccaaatgcggttgctagttatgtaaatgttgggatcgcagggcgtaatgcacatgtcagcatgttctaccctcacgctacttggatgcatatcaagacttcggacaagatgcccataaacaagctactcctgtgctcgcagaacctcgtcgccgcgttcatcggcagctcactcgccaatgctggacgcaacagccagattctagtgtgccagccaggggcgtcctcatggtcggtacgagcttatgacaagtgcaagctgtttgaagacatggcattctaccgggggaagctgtacgccctcgctcatgatgagaacctccttgtcgtcaacatcagccaggatccaaacaccggcgatccacagatctcccaaattgggcaggtcatcaagggcgatcccacctggtcttcagttctgattacggatgacgacgacacaagcacaacggacaaaaagaagctctacctagttgaatcatgtggtgtattgctgatggtacgcaggaaggtttgctgcagagtggtaggcaagaccgtcgtgcctggacagaacgagtttgaggtgttcaaggctgatttggagaactcacggtgggtgaatgtgacaacccttggggttgatcagatggttttccttggacggccatgctctaaggcagtgtccgcgtctcagtacgggatgccaaatgaccaaatcttcttccttgatgatgttatggagaataacaaggagtattcctatgaggaggagaccacttctgtcaatgtctacgacatgaggagcgccgaggtctcttcccctctgccgatggcctggaagcatgagatgatttctgcaacatggctgttcccttgggattga

SEQ ID NO: 37280 - DNA, 1386 bp, Oryza sativa
  Clone ID: PAT_MRT4530_41022C.1
cccctctcttcctcttctcagatccaatcctcttcctcctcccatcccctctcttctcctcctccccttcctcttctcctcctcccctctcctccctcccatcagccggcccttcctcttcccctcaactccctcttccatcagccggccggcggccttcgtcgccctcgtcgcgacggtctggacgctcctcgtccggtccaagtccaagacatccgccgcggacgacgccgaggcgttcctcttcttcttcgccgacttccgcgagcggctcgaccctcccgtcgacgccaggtacttcggcacgtgcctcaccgggtgcttcgtggcgctcccagcgcgcgacctcctccacggcgacgggaataagttcatctgagatcccttaaatcgattcctcaccacggacgtccgtcctggaatccatggcgctgcggcgtttcgccgtcgccggccgcgtcctcctccaccgtgtggaatcccttccacctccgcgcccgccgctcgcgttcctctcctccgaatcccgcggccacctcgtccgccgcttctccaccccctcttccaccccaccgcacttcatggtccagtacctcgtctccaagtgcggcctctcgccggcggccgccgccaaggccgccccgcggttcgcccacctcgactcggcgtccaggcccgacgccgcgctcgccttcctccggtctcagggcctcacccgcgcgcaggtccgcgaggtcgtgtcgtggaagccggagctgctgctcagcgacgtcgacgccaccctcgaccccaagttccgcgccgtccgcgcgctcggcctcggccgcgccgacgtcgcgcgcctcttcgccctctacccgccggcgctcacctacggcatccacaccaacctcctcccgcgcgtcctcttctggatcgacttcacgtggctgctccggtacagcgtcgacgccctcctccgcaacctctccacgctccgatccctcggcgtccagcagagccgcatcaccaccacggtgcggatgcagccgacgctgatcacgcagacgccggccaggttccagaagctggtcggccgcgtcgaggcgtgcggcgtcccgccaagctccgggatgtacatgtgggccttcttcgcgctgcacaacgtcagcgagggcagcttccgtgccaagaaggcggccgtggtgggagccgcgggctgcacggaggaggagttcgacgccatgttccgccgcgcgccgtgcctcgtgttcgtgcccgcggcgctgctgcggcggaaggtggagttcctgatggcggagtgccgggtgcgacgcgacgcacatcgtcaacaaacccgtgctgctgaccgctgagcctcggcaagcggatggcgccgcggtgccg

SEQ ID NO: 37281 - DNA, 510 bp, Oryza sativa
  Clone ID: PAT_MRT4530_41023C.1
gttcattgagctagggttagggagaggcgctgccagccacacagccgcacgaccacacgcgcctcagcgccggcgcgccgcctccccggctcccgtctcccctcgcgcctcctgactcagtctccgcctcggcaccgcctcctcgcctcccctccctagctctgctcccccagtcctgttggttgtcgcccagcgccggcgaccgtagccatcggccggctgcctgggcgcttgggaccggcccggcgaccgcctccctggaaagggaagacagggaggagtcgaggcgacaccgccattctgccggcgccgggcgccctcggctcctccccattcgccacctctccctcctcttgacgaccgtcgaccgagaccgagaccgacgagctccctagctccctctctagcactcctgctgcaaagcaaagtgcaaagtaggactacccaaagaaaaattcttggctacgccactggttgccaccttccctcgctacctgtgcctcgctcggt

SEQ ID NO: 37282 - DNA, 559 bp, Oryza sativa
  Clone ID: PAT_MRT4530_41024C.1
gacaaaattgcagatccactcctccacactcactataattctgttatgtacaatttttagatgggaaaattttctgataactacaaagggcataagaagcatatatctacacgggcaactagtaacaacctatacagattaagaactaaatacaaccccaaagaatgaacgaatatcactatgtaactacaagaaccaacatatcaagatgtacactttacaggtaaagatgaagatgatgatacagagtaaagagctttaagtaaagaaatgaacttcacaactgtttcttcagagaaccacttgagtttccatgtatgcactgtgtaaatttcatctggttgcttgctctgtgaatttgtaatgctaccgttactgcaaaatcttccttcatgtgcatggttgtccaaaactaatgtcaaacatctcttgtcacagtgatccacaaccacttcttgaatatcgttgataaaacaacaagcatccagagaaaaatatggagtatccggatcatcagggagggaaccaaactgatgtatgttctcgatacacacaaata

SEQ ID NO: 37283 - DNA, 355 bp, Oryza sativa
  Clone ID: PAT_MRT4530_41025C.1
ggaagggaaattaaactgatttattcctgggtccattaaaaccatcacactggggtccggggggaacccgggaaggttaaaaaacaaaaccgggggtggaaaacgggtttattccttggcccataaaaaccatcaccctcgggtccggggggaacccgggaaagttaaaaaccaaaaccaggttttgttggggggggccctgctcgtttttacatgaggggggcccgagaaaccagcccacgagcggggcttccagcccacccccagaagggaaacgggtgggatgcccccgcccccgcggtcatattcctctcccgggaattatgctgttgtctcgatgttaaggtccccccgg

SEQ ID NO: 37284 - DNA, 3393 bp, Oryza sativa
  Clone ID: PAT_MRT4530_41026C.1
tcaagatgtacactttacaggtaaagatgaagatgatgatacagagtaaagagctttaagtaaagaaatgaacttcacaactgtttcttcagagaaccacttgagtttccatgtatgcactgtgtaaatttcatctggttgcttgctctgtgaatttgtaatgctaccgttactgcaaaatcttccttcatgtgcatggttgtccaaaactaatgtcaaacatctcttgtcacagtgatccacaacaatgatatcacagcttattttggtaggacacaacttcactagcacttcttgaatatcgttgataaaacaacaagcatccagagaaaaatatggagtatccggatcatcagggagggaaccaaactgatgtatgttctcgatacacacaaataatgacccttcagtaacagcgagggatctaataacaaaggatccttcttcagtatcattcttccaaaacatcaacaacgagtagagaaatattcccatttccaaacttggatggatacaattctcaagcaatttaagttggaccttctcccagctttgcaaagatatactactagttaattgtggaaaattagacgcggttaagagccaaagtatatcttctgcttccttggaagtccttgtcaagaataggtgagttgtattatctgccatgtgtaccctcaatgcttgtagacccagtccgatcaaaatattctccagatcttccatccaatagctgcccaaaactcttagcatagtgtcttgtccatcttgagccatatcaactagcacaacatgtagtttattttgagaacatcgcagcaaggctacctctctttgaaccaaatcacttccagtgccattttgaaatatgtatccacaaaaggctgtcttttcacaaatttcagatgcgtcgcttgcaatttctaaattgaagaaatcctcaataagcttgtacttttcagtgttacaagaaactgtattggcactggcacataagttatccttgtgcaagatacttgaattatggttttctaagctgtgttccctgcaaagagtacagttgttcaggttgcatcccagatggccgttccctgcaactgaaaccccattatccatttcatctccattgaccttcggaaatacaagtttagtgccattatgattcttaaaaagaggaggtatcctcatcttaaacttctggttactctgttgtctgaccaaatgatctgaaccttctcctaaatgcccattgctcttgtacctatcatgtaactgcttaataccaaactcaacggaatctgtaaaatttgggacatcctctgctgaataatcaggcaaacctttcttcccagaaaaatattccattccatccttttcctcataatcacctacagaagaaaacctagctatttgaccattgggggacaactccatttttgttcgaattgcaacacaatcatcttcggaattgcatgaacataaatcacctgaagagtcatcactgcaactgctaccactaccaagcgaaccagcacaattaaagtctcccgaagtctgcaaaacctcttcctccatacaaagtcttcgatgcagaatgtcctccttgtattgtgggggtgactgcggactagaatttgtgaaggatagactcggttctaccagcttgttcatcaaatttgatgaaactccatttgtatgtaagtttccagtgccatcttccatctcacaaaaagaatcagcatgcgaaatggctacaaaatttagtggaggaagttgctgggaagaattcaagtgcaactttaaaggagcctggtatatattcccttcatgtgaggattctgtggtaacaccattagcactgtaacatgcaccatcagtgaaagataagtcagattccaaaatgtttgagctgctcccaccttctgacgtctgtaccaagtctgagatgtcctttgagttcttttgagctttctgcattttcttttgttcctcataccttccattgctactgttgaactctatgtaaaggttgtcaggttctgtattctccatgttttcatccatccactccttaaattcacgcagccaatcagttgatttctctttcttcaataattcagctgtattgatcaacgaagtaatttttatgtcattatcagcacctgcaacttcatccttcttagaactgtcactttcgtggggggtggtctgctggtccacaccttcatcacaaagacttctctcttcctccacaattaaggcaagtcgagaaatctttttcatctttgaatttgatgtgtcttcatcctcatggtcatcttttgcaggaaaataaaatccatagccagcaggttgcttttgcctgcttgaaaacagtacttgtttttcccagtactcctgtgtgttcatacctttatcatctaacttcaaactttctgagttgtggagaaaactgaaaacacgtgctcgataccaacgagcacagcagattgggttgccttccaaccataggttctgtagcaaaaaaaggctaccaagtatttccagctccgagaaatttgagatgatgttgtaagacagatcaaggtccataagcgactttagatttttgatcccatgtagtgtagttaaagcattatttctcagtacaagttgcacaattcgaccgcaagcctcactcaaggatgatatagagcgcaaatgattaaatccaagatctagatttcgtagctttgtgcatttccgcagattatccacctttgcaaactggttccgactaagatcaagggtttcaactgcaggtaacaactgcaatgactcatccatgagcaccagaccatttgaagcacatgatacatacaacagccgaccccatacgggtgagtccttgatatccatgatcctgctcgtgaagatatgcctaagagcatccgtggaattgtaacagatgagcttctcgagggtgtggcggaggtcgagcaggcccctggcggcggaggaggtggagaggtcgcacccacgcagctcgagcacgcgcaggcgcgcgaacggcacgagtgatagcggcgccgggtcccgccccggcccgggggccacgaccttgagcgacgtgagcaggcgcaggatccggcggagctgctcgagcgcgcggtggtcgccgaggtcggcgacgtaggcgcggaggtagtcgacgggcgcgccggcgccgaccgcctccagctcccgcagcgcctcgaggcgggaggcgacgtagtggagccccacggggtggagtcgcagggtgacggagccgtcgagcagcgccccggcgttgcggcccacgaagcggaccagcaagtcgaggtagcggtcgccggtgaccggcggcgcgccccccgcacggccagccgccat

SEQ ID NO: 37285 - DNA, 519 bp, Oryza sativa
  Clone ID: PAT_MRT4530_41027C.1
atggcgcacacttccattcatgaactacaaagtgatctttggctgctgaagatgaagaagaagagttgccatgggagggctactcatgatcctcagcatggtctttccaagatagcaggtgaatcaacaaagcatcagcaaggcaacatttcaggttcccaagctgctgctgctgtgaagagcaagccatggaagaagagatacctgaccttcctgtcaaagtttcagaacaagatgaagaagcacaagaaacctgacaacatcaaggctcatcataccaggagccacaaaacccgcagcattctcctctccagcagccagatcatggaggaatgcagcaaccttgtccaggtgatccggcacaccgccgccgactgcttcgccgccgcggcgacggcggtggcggcggcggtggactacgaggaggatgatcatcatcagccttacatgcagcttgaccaggtgaactatggagtgatgaaaagggaggcatttggccctgtttacctggtcacatag

SEQ ID NO: 37286 - DNA, 1825 bp, Oryza sativa
  Clone ID: PAT_MRT4530_41028C.1
ctgtgacatggagcatcctcccttctttctgctccttgtgtcgcttggcttcaaccttatagccctttgtgccggtcaaaaccaattcatctaccatggtttcaccggcaaaaacctcactatcgatggcaccaccaaaatcacaccggaaggactccttgagctgactagtgacaagaatgatctcaatggccatgcattcttcccaacacctatgcatttccgcagttcacccaacagcaccgttcagtcattctcggtgaacttcatgttcgccatccagtccttctactccgatagaagctacgatggcatggcgttcttgatagccccaagcaacaatctctcgactgcgtggccagatgggtacctgggtctctttaacatcagcaacagagggaattcaagtaaccgcatcctcgcagtcgagctcgacacctttcagaacaatgagtttggggatatcagtaacagccatgttggcattgatatcaatgacgtccgctccgtgaattcctcctttgctggcttctatgatgacaagaacgggattttcacaaacttgactctgtacaatggtcgggctatgcaagtttggatggaatacagcgaagaggccacgcagatcaccgtgaccatggctcccattgatacaccaaagccgaagaggccactgctctatgccacctatgatctctcgactgtgctcacagaccctgtgtacataggtttttcagctgcaactggcgtaattagcacacgacatatcgtgcttggctggagctttggcatgggtgttccagctccggacattgatatcaccaaactaccaaagctacctcgtgttggaaccaagcctcgttccaatgtcttggaaatcgtcctcccaatagccagtgccatgttcatcatcattgtcggcaccatggtcattttgattgtgcggaggaagctactgtatgctgagctacgagaagattgggagattgattttgggcctcagcggttttcatacaaggacctgttccatgccactcaaggatttaagaataaaaacatgattggagtaggtggatttgggaaagtctataaaggagtccttgcgacatccaaattggagattgccgtgaagaagatctcccatgagtcgagacaaggaatgaaggagtttataacagagattgttagcattggtcgtcttcgacatcgcaaccttgtgccactacttggctactgtcgacggaagagtgaactacttttggtctataactacatgccaaaaggcgactttgggcttgcacgactatatgatcatggtactgacctacagactacacatgtggttaggaccatgggctacctagcacctgagatggtacagacaggtaaggcatcccctctcacagatgtgtttgcttttggcgcattccttcttgagaccacttgtggacaaaggccagtgaaacaaaactctcaaggcaaccaacttatgctggttgattgggttcttaagcattggcatgatggatctctcactgaggcagtggacatgagactccaaggtgattataacattgaagaggcatgcctagtcctaaaattagctcttgtgtgtttgcatccatttcatgcttcaaggccaaatatgcggcaggtaatgcaatacctcgacaaggacttgccacagccagagttagcaccaacacgtctaggtttcagcaagctacctttgatgcaaagcaaaggatttaacccatcagccatgtcatatccggagtttaggacaagcatcggcacattctctggcctctcaggtggacgatga

SEQ ID NO: 37287 - DNA, 302 bp, Oryza sativa
  unsure (1)..(302): unsure at all n locations
  Clone ID: PAT_MRT4530_41029C.1
atataatggttcgcggggaaaggcgcgctgctgtctctgtcgcgtattgatggctcccgcgcggcgcgaacgngacaccggggtgtggctagacgtcagcgagaggggccggctgcggggtgctctgacacggcggaccgtgacgtgtctgacacacaggcagaggctgcactgggacaggcttcccaggataaagcttcccacctgttttttgnctgcgtcttcaccaccagcaagtgcttcggcttcggggccctaatcgatcaatcgatcacgtcgtcgtctcggctcgtcatcaaatc

SEQ ID NO: 37288 - DNA, 2259 bp, Oryza sativa
  Clone ID: PAT_MRT4530_4102C.1
ttcctggttggtttcctctctcacctcaatccctgtaacagatgtttaacagagaaaaaggaaagaatgtcagcgggtatgcctccagtaactcaagttttcaactcaatccgccactggcctcaagagagttaacaagggcacaccctcggtccattccaagcatgctgcttagttcacagctaccattagttggaagtcaagaccaaaatcagtatgtgtttgatcgagcgtttgccacccaggtcaatgagcttccaatgctagaagaggatgtccccttttgtcacgattgtagagagcaaggacactatgccctgaattgtccatgggtatatgtcaaagaagccccttcctttggttcagcagggcagacatcgctaaaccagcctcctcgcaccaagtcaagcttgcagcctagtgtgcaaagtgaagagcccaatggagacaatccattgaatcctagaaaatgctttcctcctagcctttcgtaccacgtggggtcacgtactaagcaagccaaaggcaagaagagtaagaatcaaaagagaaaagcaccgatgcgaactgaagaagaagtacgtaagatgactattaccagcacagaatggcctccaccaggaatgacaaggcgtcagagaagaaataccttccgaggtgcaccacagttgacagagcatcttttagctaatggaggtagagtgtctgatagtgaagattcagatcaagtctcctcagatgatgaagatgaaatggaacgtaaggcatgctctcgttgtggagaaatcggtcatgtcgccagctcgtgtgccactatatgcgttcattgtgaggaagaccatccacccgacaggtgtccaacgagcaggatcacttgtttcttttgtgaaggaactgatcatgtaccaaaaaattgtcaattcagttttctgctgacgaagaagatggctaaccaacccgccagttccaacggagagaagcctcaaggcaacaccaatcctcgccaagattacagtctcagcttaaaaccagtgccaggacagaggaatcaaaatgagaaaagaaaatgccgagtccgggaagatatctgttgcttcaattgtcaaggaatgggtcatttcgccgacaagtgcccaaaactgagaaacatagctgccagcacgtcagtccacacaactccctgcaatcagaagcttgctcctcagcgaattgtcatccatgcatcccgaagcagtcctatagcccgcgttgcaacagctccaactccagcaggcgcattaccacaaggtgtcaatgctcaatttcagccccagccagcagttgacaagacagaggccagtatcggcatcgtacctttggatgttccagcacagcagccaagaaatcaagtacaagatgaagaacccgagcaagaccatccaccaggggagtgtcccactcgcaaggtgacatgttttctgtgcgaaggaacaaaccatgtgcccaaggattgccaactcagtgtgttgttgaccaagaccgcagaaatccaacgaacgaccctacgattgtctcgtcagctagtcagctccaacaacaacatcgatgatatcatccacagcaccaatgctcctcttgctccacctaactctgcaataaatcatggcaataatacctacagcactaaccattctctgcaccgacagccccagcaaagaattgtcgtcgatggaagaagttgtgtctctccccgacctactccaggccaagcaaagggcaatcgacctccggagggcgataccaagcagaagaccgtcatccgcttcaaccagcaatcagaaggaagcttctcctgtgaatgatagcattatgcagtcctatcacatcatcacagaaccaatcaaggatgcagtcactagaacaataccagctatatctctccagaatcaaaatgagcagccatgtttgtggtttccagttcgctacttatcatggtgtaatcgaaagtttgcagcaatcattggtgacttgtatgaggttgactccgaagatatgaatcatgagaagttcgggaacggaagcatcattgaactaccgcaacctagtctgagtcagccaaaaggtgcaccctggtccaagtcaggtgaagagaagattccatccgcaacaggaggtcaagccaagcagttccgagtggtgaagttttgctggaagtttgtcaagacgcaacggaagaagtcagacaagaagagaagaccgcccaacctatcttcttgctag

SEQ ID NO: 37289 - DNA, 2544 bp, Oryza sativa
  Clone ID: PAT_MRT4530_41030C.1
atgggtggcagaggcagaggcaacgacgacgacggtggtgtggtcgtcgtcgatggcttcgtcgccatcctccgccagctcggagacctcgcgcagctggcggcggaggtgttccaaggcatgcacgaccaagtcatggctctatccacacgacgacgccaactcgcgctgcgcctcaaccacctcgatcacgcagcaccaccagcagtagcagcaccacaagattcttcttcttccttcttctgtcacaaagattactacctcttcgttgcttccaacataggccgtgtccattggcgcgcaaatctcattctgaagcaggggctcgttgcaggaggaaacaacagcttgcctaccattatctttgaccgcatccacagatgcagagggccacccaatctgtccctccttgacaagtacgatgctgacggcgagggtgcctgcttgaagagatacactaatccttcattcttcacctctcactctgcctgctctaccaaactaatccaccaacgcatccacatggcaaaacaacctccaaagctactactggaaaccaaacctacatttcagtgttcagattcagacaactccaggcctcagaaggcatcccagtgcagtgactctatgcctgaaatggacgcatctcatggattcctatccatgttccgacaactgaaatatcgacagacgaatggaagccccatgcctcaaatgcacaactttcagaacgagacttcttcatctgagctgaacatatcttcaaactgttcgcctgaatcaagcatcaaggtgacacaagacatcggagcaagcacaacaggtacagattcagtcagtgaagagaggaacttggagctcgagaggactagttcattcgaggcatggctctctccaaatgcacataatattcagcatgatcagatagcagaagaaatgcctcactacagttgtaacaacaacaatggattcgtcaatcatgtcactccgaatgatgccattggtgcaaccaacaatggcaattgtaaggacgattccaacacctacaagaaggctgtgaggtcaaagtatagaggtggcatggagttcatcgcctcaagggtcagcagttttcccaggaagctcttcagaaagaagcaagatccacatccactgtcagtggcagattccttccggaacatgactagcaagattcttgagctgaaatgcaacaacattcgagacaacgattccaatggcatgggatcaatcaacagagaggaactgctcgcaagtgaaaacggtgagcatccatctcctgacgctccctttcgtcacgtatcaacagagcgtaggtatatgcacgccacgagagcttcttctgaagatgttcctgcacttgctgaagttgcatcggataagaaaagcaaacaggagcactctgacgatgcatctgaagcatcttatgacaaattgttggatgaagaactgcatcaatctgttgtacgtcaggaacgaaatggttctcccgttccgcaggtctgcagcactacaagattttctcaactagagcgtgaaggtcctgggaaagatatggtgccgccactccctccgatgcagtggttatcatcaatcaaggttcattcaggatcaagggttgcatcatctccaagacttaaaacacttaggccacaatcaccagcggtaccaaaccatgcagctggaagaagctattcgcatccggtaagaaagcagctggaaactgacaatgttcaggcgagaggccatttcggcatcctggcttcacacgctgagatagcccagacatcagcttctgatattaaatctgcagctgttatctcgattagaaatggaatctgcagatatgggttccctgggaaggattctgaagaaattaatcatcaagaaaaggatatcattcagccttcagaaggtgaaattctgaagactacggaggaggtctgtgagcctacggtacagtcagacgagtctccgcctgaacaacattcagaaatacaacctcaacgagaagaaatacaccaaactggtaatggagattctgattgcaacaacaagaataatctcagggccaccacagaagggcctatctatagcaatggaccacagattgatgtgcacaactcactggatcatcctactgacagagagagcaatactaatgtgcacgtagaaagtgtttttttctctgcagtagaacagctaacaaagatgaaccctcctccggtgccaaggcctaaatattctatacttcaggttggagtccaagatagaagcacggtaagaacggctccaggtttgatatatccttcaagaaggctttcaggagagatacgcaaattacctgaacaaataaacgccaagtcttgcgatctgaagcctgcccttgaaagaggctcaaatgtgacagttgatcacaggaacacaaaagtggctacaatcttgcagagggttgatcacattcgtcaggctcacgcagaaaactacgacattgacagtgaggttagctggagtgacagtgactga

SEQ ID NO: 37290 - DNA, 564 bp, Oryza sativa
  Clone ID: PAT_MRT4530_41031C.1
tgtttcatatttcagcttctttgtcgattaattacggttttttctttgtgcatgagcatgtaggttgcatccaaaatttcaaatagatgtatggatttggggaaatttgcaggtagcttcacaagcaatctaggcatcaggaatgacctctacttccgtaataaatcattgcaagtagtaattcaatgcttgtccaaaagaggcagctttttgttcgttgtgttgatgtcataattattaacaagatattgtcattgaagatgacatgttctggatttatgctttgctttgcttcaatggattggtttctttattctatctccattgctgacattagcaacaagattattcatgttgtgaaggtgaggcaatgttaatgttatgatccgaaccacttgccaaaaagttgggactctggtaaatattttatgaaaacaatatataacttcttttttatcttgcgtaagcttgttgactgtgtttaaccccttttctggatcaggcttttattcttatggttttagttgaactatgaaatgatatttacccggtgaactatgaaat

SEQ ID NO: 37291 - DNA, 144 bp, Oryza sativa
  Clone ID: PAT_MRT4530_41032C.1
aacatcttcctttaaaaagctaatccgcggtggctgggcatataccatatatgcgaaaaagcattctcacttattacatgtcaggattaatgaataatgggtttagctcagcgagaccaacctatgccccataagtaggaaaat

SEQ ID NO: 37292 - DNA, 1252 bp, Oryza sativa
  Clone ID: PAT_MRT4530_41033C.1
atgggcatcttgtcgctcatcaccgggaaggccggcgcgagcgggttcggctccgggtccacggcggagcaggtcaccgccggcgtcgacgccaccggcctcaccgtcatcgtcacagatttctggaactttcttgactacagagaattcataattcaatcaggaggagcgagtggcattggtctggagacctcgcgagtctttgcgatgagaggagcccatgtcatcatcgcagcaaggaacacagaggctgcatctgtagtgaggaagaaaatcattgaggaaaacccaaaagctcacatcgatgttctgaagcttgacctcagctcccttaagtctgttagagcttttgcagatcagttcaactcgatgaaccttcctctgaacatcctgataaataatgccggtgtgatgttctgtccgtttggattgtctgaagatggtgttgagatgcagttcgcgaccaatcatcttggtcactttctgttgaccaacctccttcttgataatatgaaagcaaccgcgaagtccacaggtattgaaggtcgtattgtgaacttgtcatcggttgctcacctccatacatatccgaagggaattgagtttgataaactcaacgatgagaaaacatacgatgacaagatggcttatggacaatctaagctggcaaacatacttcacgcgaaagagctctctagacggctgaaggaagaaggagcgaacatcactattaactgtgttcatcctggattgatcatgaccaatttgatgaggcactcctttttccttatgagggtgcttcaatttgccacctacatcttgtggaagagcgtaccccagggagcagctaccacttgctatgtaggactgaaccctcagctcaagggagtgaccggacaatactttgctgactgcaatgtggagaaaactagcagatttgcgaggaatgacgcgctggcgaagcaactctgggaattcagcgaaaagctgatcaagtcttcttcaaaatgagagcccaaagcaggatcatcagcagaaaaaagaagtgttctgatactgtttggtttaatggcatactagtatgtgatgattgataaatatgtgtagcagcagtagtattaggaacctgaagtattctgaacccttttctaatgtttccttcggtcatggctgagaatgagatcaaccctgtgtactcttgttaatatatttgccaaatacatgagttgttccagcaaaaaaaaaaaaaaaa

SEQ ID NO: 37293 - DNA, 771 bp, Oryza sativa
  Clone ID: PAT_MRT4530_41034C.1
atggcggcggcggcggcgatagcgcagtggctgtctgatatggccgggttggtgatgaggtgctgtaaccctatccctagctacaccaacgaggacggccccaaaaacccggaagctcttaccacccaaaccatatttaccgtcaacgagattgaagccttatatgagcttttcaaaaggattgatggtgccatcatcgaatatggcaagatcaacaaggcacttagtcctcaccacgaagaaaaactgcagcggaaaataaaatctagcgaagctccggctccactcccacaggcagctcaactggggtataagccaaacgtcttctccttctggattctttttcttcaactgaggttgattgattattgcaaggaagagttcaacttgagagtatttggtcctgaaaagggaggcaccatgtttactgatcaggtatttgatttatttgatttgaagcttgaacaagctctcggatttgaagagtttgcagtagctttatccatcttccatcctgacactcccatggaggacaagatcgatttttctttccagttgtacgatatcaagaatcaaggttttattgaaagagcagagctaaagcaaatgatggttgccacactggctgaatcagatctgaaccttacagaccagacatttgaggaggcagatacgaacaaagatgggaaaattgatttcgaggagtggcaagcacttgtcaacgcccatccatgtttactgaagaacatgactctggcctacctcgggtag

SEQ ID NO: 37294 - DNA, 279 bp, Oryza sativa
  Clone ID: PAT_MRT4530_41035C.1
atggcggcagattgggaggggagatggtcatatggagatggaggcggaaagggcctcttcgtcacgtatagcaacttgtgcttccactccgcttccacttacggcctccgcctgaccgtgagtgcggcggccgccggcgttaggcccatgggggcgggagtggaggaggccacgcctctccacgtcgtccttatctgcgccggcgagaggagggagcagaggggagatatagagagaggggaagaagaggaagggattgagaatgacagccacacgtag

SEQ ID NO: 37295 - DNA, 348 bp, Oryza sativa
  unsure (1)..(348): unsure at all n locations
  Clone ID: PAT_MRT4530_41036C.1
aagaataaagtgggtgacaagtgttgggaagcgggaacatagtgttggagaggtctttgagtccaaagcacaatggtgaggataatgacgnacaatataatcagactgttgcttatatttgtttttttgtacttgttatgatgctcccaagaatgatggggtcatgtccatcattttcccttgttatttgcataattacagggagactgttccttgatttgctaacaaaaataactgttgttacagtttatttggcaggctaatcgtgatacatgtttaacttttatgacgaagacaggaaataaagtagtacaaaaactttcataaaaaaaaaaaaaaaaaaaaaaa

SEQ ID NO: 37296 - DNA, 711 bp, Oryza sativa
  Clone ID: PAT_MRT4530_41037C.1
atggacatctctaggataaatgaaggctacacgagctgcggcccggtagtcgagatgtcatggcacagggccggctacccggggcggcgacggcggcggaacgagggaaggggcgacggcttaccgacggtggcggtggcgacggcggcgcaaggcgaggcgacgctcggcgcggcacacggcgcggcgcggcggcaccgagggcggcagcgcggcggcacgaggacggcggcgcagtggcacgaaagcggcggcgcgggaagagggggagaaggagaggggaaggggcggcggcttaatggcgacgtgacggcggcgcacggggctcgggacgacggcgacgcgcgggcggcgacgcgatggcggcgcggggctcggagcggcgatgcgacgggcagcggtgtggggctcaagacgggcgacgcgacgggtggcgtggggctcgacgtggcgacgacgacggcgcggggcgtcggcgacggtgagggcgcgcggcgatgggacggcgatgcggcggcgacgggcgacgcgacggcgacggcggagcggggctcgagacgacggcgacgcgcgcggcgcggcagcgggaccggtgacgcgacgcggcagcggcggcacggaagcggcgacgcgacgggcgagcggcacggcggggcgcggggcgcgaggcggctaggggacgggcgagcggcgtgtgggcgcggggcgtga

SEQ ID NO: 37297 - DNA, 450 bp, Oryza sativa
  unsure (1)..(450): unsure at all n locations
  Clone ID: PAT_MRT4530_41038C.1
cggtccggtaatncccgggtcgacccacgcgtccgcggacgcgtgggagagaggaaggggagggagagggaggtgtgtgtgtgtgagagagagagagatggcggtggtgaagacggtgccggccggtgtgaggacggtgctggtgacgtgcggggcggtgttcatcggcagccacgccgtgctgcatctccttctcgccgtattccgcgctgtcgtcgtcttgaccttaacttcttttcctagctcgccttgctacgcgttgcctctctggcctttgaccactcctgtatcctcgcctttcacacggttgatctccgtgtctagggatctctgtaaaatgtttttggttgagcaagattttttgctcgtattaattttgttgggctaattgctgttgtcgatagtgtgcacacgccattggtttattactacatctatgttaatgtaaca

SEQ ID NO: 37298 - DNA, 697 bp, Oryza sativa
  Clone ID: PAT_MRT4530_41039C.1
ctcctcttcttgcaggcgccacgccgcctttccatcccgggcgccactgcaccgccgtctgcacatccctggagccccgccaccgtatcctctccaaccccatcccctcatcctcctgcacccctgccacagcctcctcctccccatccccactgtcgtttcctcgccatccccatcgatgtcttctcttccccatcttcagtggcactaccatgacctcctcctatccatctccgacagaagctgcagatctggtgtccttccatcttctttgctccctattcctcgcaatggggaaggtcaacacctctgcctcctttcgtgctggtgactccaatgcttctacctgtctccatccctaattcgccactaggaggcacggtgaagcaaagacaaaagggagacgccgaggggaatatggcggcagattgggaggggagatggtcatatggagatggaggcggaaagggcctcttcgtcacgtatagcaacttgtgcttccactccgcttccacttacggcctccgcctgaccgtgagtacattttatagaacttgtctagcctcatgttcaactttggtggataaccatattttgttcatctgaggtgcggctgccggcgttaggcccatgggggctgggagtggaggaagccgcgcctctccacgtcgtccttatctgcgccggcgagaggagg

SEQ ID NO: 37299 - DNA, 809 bp, Oryza sativa
  unsure (1)..(809): unsure at all n locations
  Clone ID: PAT_MRT4530_4103C.1
ctctaatccaccaccgagccgccctccccactacaaccagagccaccgtcgccatttccgcctccggccgcgccgcaccgcctcttcagtccgccccgtgttgtgccgtcgccctctgcggtaccgcagccatcattcgtggctcagcaatccctccgtgttcgccggtcgtcgccggactcatctccccgtgcctcccggtgagctccgtcgtcatttcggtcggcgtttcccgccacactgcaactccctaccctctcctaacctcttcatttccttccctaggtccctccaaccatcggccgccggttcctgctcacggaacgccgccgaaccgccgtcgccgttgcctccccgaggagcgccgccgcctcttcccgccgccggcgacctcccgctctgcctcgttggcccgcatgctcagtgagcccctcctcccgctccccttccctttcgcgtgcatcgccactgcccgtgagcgccgccgtcttccggctgctcgccgccgttcggcgccgccggctgctgcctccagaggccgcnnntgcccagcaccatggctcggccgtgtccatgccccagccgtgccgcctcgtggccgtccgatcggctttgggccgatccgggccgtcggttcccgtggaccggcggtggaccgcctcggtggtccctgtccacggtggaccggcgctcttatgccgctgaccggtgggccccgcatgtcggcgccggccgcccctttgctgacgtcagcgaggaccatttcctttgtaaaaataaataataattgcgcaataaatcgagtttaa

SEQ ID NO: 37300 - DNA, 1301 bp, Oryza sativa
  unsure (1)..(1301): unsure at all n locations
  Clone ID: PAT_MRT4530_41040C.1
gccccggcatcggccccgcgcgccgtcgactctcaccggtcctgctcggccggcccccgccgccggaggagggagagggtgctcgtcgctgcggtgcggccgcaatggcccccgcggcgcaggtggcgtcgaacccgcggacggtggaggacatcttcaaggattactcggcgcggcgcggcgcgctcgtccgcgcgctcacctcagatgtggacgagttcttcgggctctgcgacccagataaggagaatttgtgcctgtacggcctcgccaacgggagctgggaggtggcgctgccggcggaggaggtgccgccggagctgcccgagccggcgctcggcatcaacttcgcccgcgacgggatgaaccgccgggactggctctccctcgtcgccgtccactccgactcgtggctcgtctccgtcgccttcttcttcgccgcgcggctcaacggaaacgaacgttggcgcatgtgtctgcatgtgcacatgtatcccgtgctcttctttttgtttcctttctttgctttgagtgaattggagtcatgcgttctggatgtgctggctgtagtgtactggccgttctattttaagaagtctgcgtatgctatgtcctggaagcggctcttcaacatgatcaatgatctacctactgtatatgaagcattggttgacaggaagcacgtcagggataggtctggtgtcgatagcagcggaaaatccaaacattcaacaaagagaacaggcgaagggcaggtaaagcgctccagggttgtcgcagaggagtacgaggacgacgacgaagaacacaacgagacattctgcggaacttgcggtggcctctacaacgcgaacgagttctggatcgggtgcgacatctgtgagcggtggttccacggcaaatgcgtcaggataaccccggctaaggcggagcacatcaagcactacaagtgccctgactgcagcagcagctcctccaagaaaaccaggctatagagggtgtaaagttggtggtgtggtgccagtcgtccgtcgtgacccagtcgngagtcaaacgacacagtcgtggtccgtgccaccgtaggaaaaaaaaagagtgggtgaagctggtgtcgttcgggtccaantggtcggtagcgttagcgtagagtggtgaaaggtcagtcgtagacaacgttggtgcgtggtgtgggtagatgaggccaaaaagagtgaactgtaaaagacgggaaaaacgtattcgatctttagctttgttttataaatgttttcttcatngtccaaaaaaaaaaaaaaaaaaaa

SEQ ID NO: 37301 - DNA, 267 bp, Oryza sativa
  Clone ID: PAT_MRT4530_41041C.1
atgagggatctagagttacctccaatttcattgagttcatgtttgagaaataagactacactatccgtcgactacgtgagaaagctccatgccgccaagtcgatagagactacattaggtgaggctctcgggcagcaaaggcatgtcttcgtcatcttctgcctcaaggatggccatggtcggggtccccaagtagtcaccaccacagtcgtcatcgtctgctgccttggcgacaagctgacaccatcgaaccttctccatcactga

SEQ ID NO: 37302 - DNA, 261 bp, Oryza sativa
  Clone ID: PAT_MRT4530_41042C.1
atggagttagaagggcgaaatgaaaggaggggatggtggtggatgcatgcgagtgttgtatcagtgatggagaaggttcgatggtgtcagcttgtcgccaaggcagcagacgatgacgactgtggtggtgactacttggggaccccgaccatggccatccttgaggcagaagatgacgaagacatgcctttgctgcccgagagcctcacctgcaggggaggagaattgccaccatatcaccgagattctctacgaggctag

SEQ ID NO: 37303 - DNA, 507 bp, Oryza sativa
  Clone ID: PAT_MRT4530_41043C.1
atgaggaaactcatgggcgaagaagcgcactacaggccaaggttcgagatcacaatttacattttgtgttttgctgatatagaggatgaggactttcagtgctggcttaacattggcctttgggaataccaaccaaggtggtgtaagcggataaaagaagaggataatgagttagttgagatggaaagcggttgggctgagcatcatctcgagtcttttgatactaagcaaaatcttgcagcttatgtcagggctcttcgttcttgttggggattctcttacgaagatcgcctgaaaccacatattcctgttgcaacggatcgtgttcttccactttccctggcttccagctacaagggaatgcgtttggtgactcttcagtcgaaggagaaagctgcaaggctgaaatctctccgagcaatgaacaagactgtggagaacatgcgtaccaagattggaatgaagaacaatgtgatccgcaagctgcccaagaactgcccatactag

SEQ ID NO: 37304 - DNA, 763 bp, Oryza sativa
  unsure (1)..(763): unsure at all n locations
  Clone ID: PAT_MRT4530_41044C.1
cagcaccatttcacacagggngggcttttccccacccctcacaccatnacacataccncccttaacgacataccttgggaccgccccccnatcccactantntcctcctncgcagntttncctctaacttcataccctatatctcggtngttttcctctccctccccctccctcgacacccctggaggcctcccttccttgaagccccccccgccatccctttatcgggtttccccgcccccaaatcccacactcacccttggngccccccacnacacctccgggcccccgagccgagttattccgaggccgtngtccgacttatggctacgacctcccaccgccctattcgcccacccattccggccgacgtgccgagtcccgaccacccggggggttccaccncgatccattttggcctagcccaccaacnatagcncacccatatccccccaattgccccacagggtacacnttttggtcccatccccgcacgttgtccattngcaccctccccggcccttcctgggtcacctcgcctcacacccaatcatccctggcccatggncctcacatccacccacagggcagcaggttcctcattggggcattcaaattttccccccgngcctncccccaacccacaccctccacccacaccacacacattcccccacaaccacattccttttggccccctggncacangccccccaaacaccccccagccaccccccacacacaattttccagggggcattgc

SEQ ID NO: 37305 - DNA, 568 bp, Oryza sativa
  unsure (1)..(568): unsure at all n locations
  Clone ID: PAT_MRT4530_41045C.1
ccacgcgtccgcccacaaccaacctataacatgggacaagacttttttcctcgcacctgttgggtgcgaagccatgagcttcgatcctgaaggagatagagagagagagagatagagatgagatggacgcgttttgctcgacctcggcgctgcatcgagggctgtggaacctgtggaactccgactcgttgaagagcttacgacgaatctacccggccgtccaactcgcagctgacgctcgttaaactgagcactcatgcgtcctcctgattgcttaggcccacagcacactcctgggcgatatcttaagcatgggggtgggatgccgtctatgctcgggtgcgtggagagcatcgcctggatggtctcggcgtcctgtctttgaggagaggaacatgtntgaagatctgcttgaccgctgacctccagaaaggagctgtacacctccactgtgacaatggacagaagatacctgacttaaactttgttagctcaggcacaccacaggcctcctgtggaagctacaccgaaagatgctgccatgcgcacaactagcacgacatattcc

SEQ ID NO: 37306 - DNA, 319 bp, Oryza sativa
  Clone ID: PAT_MRT4530_41046C.1
attctcttccattccattcccaaccatggcctcctccatcgccatgtcctccgctccctcgccgccaccgactgccttcctccccatgccctccccctcctccgccccattcctcctcctcctctccccgtccaccccgcgcctccgcctccacctccacctcctgctccacccgccgcctccctgctctgctgcctgctctgcctgggtcctgactccttcgaatccgcttctgtcctcctcctgcctgccgtgctcgacttcgctgagccaggcgcctgcgaggagtccgacgtgccggaggagtctgaccaggaag

SEQ ID NO: 37307 - DNA, 1564 bp, Oryza sativa
  Clone ID: PAT_MRT4530_41047C.1
atggagacgaggccaccgcgggcggcggcgccggcgccggcgagggtgtcgaggttccggaggctgcttgtgcgggtgtccgcggagccggagcgggcgggcggcggcggcggcggggaggtgagggagaaggaggagaaggcagcggagatggaagtggggtcggtggggttggaccggatggtgctcagcttcatggaggattccgccgccgccgccgtggagcggcccccgcgtggccgctgcggcagctgcttcaacggcggcggggacggcagcgacgacgaggagttcgacttcctcccctccgactcctccgccaccgccgccgcttcggccgccgccgccgccggcgacgccctggacgcgttaaagggcttggtgcagagcgcgagcatggcggagaggaacctcctcgccgacgcgtcgaggatcgccgagaggtgccgcaagggcggcaagaagaaggccgacgtccgctgcgccgtcgccgacggcctcgccgccctcggctacgacgccgccgtgtgcaagtcgcggtgggacaagaccccctcctaccccgcaggcgagcacgagtacatcgacgcggtggtggcggcggagacgcggctggtggtggaggtggacttccggtcggagttcgaggtggcgaggtcgaccaaggcgtaccgcgcggcgctgcaagctctcccgccgctgttcgtcgggacgccggaccggctcgggcagatcgtcgccgtcgtggcggaggccgcgcggcagagcctgaggaagaagggcctccacgtcccgccatggcggaagccggagtacatgcgcgccaagtggctctccccgcaagtcctccgctgctccgacaagccgccgccgccgccgccgtcgcccccgcccacgccggtatcgctctccagcttctccggcgagttcgagctacgcttcgacgccaagaccccaccaaacctcagcgccaccgccgccggcgacgacaacgacaacgacaacgacgacgaggtcgaggcgaagaagattacgatggtggtgtccccatcgccgtggcgcccggtggagccggaggcggcgagcaagaaaaggtcaccgccgccgccgccgcggcgccccgaggggaaggtggtgaccgggctcgccgccgtgctctaaccgcggcgaagaactcactttactacactagctaattaaccagctctcctccctcgccaattttctctgttttttttttcatttttccatcgccgctttgatccgtccgaggcttagctcatggtgttttctcagttttttttccgattttttggaaaaagacatttacagaaaacacctccatttttcttttttcttttttttattctagaacaaattttggtttccacaaaagggaagtgcaaggagcagtagctgtgacagcttctaggccccctattgtttagaagaggatgaaaaatgaaagtatgaactagagatatgcaacattatctggttgcttaatcagatcttaatcactacttgtactagcgtgagtgtatcatatcacttggtatcctcc

SEQ ID NO: 37308 - DNA, 1691 bp, Oryza sativa
  Clone ID: PAT_MRT4530_41048C.1
aaagatctagagtaccgcagcattgaagatctttatcgccccatgatctctcttgctcatgtgctgcttgcagcgcctgtgcacaggctgtctagcccagcagctattaggccagagcactagtcaatggcagagttctcgtcggaccccacgtttttttttcggacgcggcggcagattgcgttgagctgaagctgttcgtgtgactcttctacaccttccaggctatccggaatcgggagggtttcccaataggaaagcaactcaggactcaggagcggcgtctgagaggtttcagagatggagaaccagttccaggatggcaaggaggaggtcatcgaagcttggtacatggatgacagtgaagaggaccagaggcttcctcatcatcgtgagcccaaagaattcattcctcttagcaaactttcagagttaggaatattaagctggcgcctgaatgctgatgactgggagaatgatgagaacctcaagaaaatccgtgaggccaggggatactcttacatggtttgcatttcagaacttgttgatatttgtgatgtgtgtccagaaaagctgccaaactatgaggctaagctgaaaaatttctttgaagaacacttgcatactgatgaagagatacgctattgtcttgagggaagtggatacttcgatgtcagggaccaaaatgatcagtggatccgtgtagcagtgaagaaagggggcatgattgttttgcctgcgggaatgtatcaccgcttcacattggacagtgacaactacatcaaggcaatgcggctctttgtgggagagcctgtctggacgccgtacaaccgtccccatgaccatctgccagctagaaaggagtatgtcgaaaaaattatcaacaggggtggaactcaagctgtcgaagctcgttaaaggcatatcaagatgtgcttcctagttcggtgttctgttacactctacagatactgaataaactgtgctatcagctgttgcaatgggctcctaccgacatcttacatcatttggcagtattttgcacaaacccgcttaaaatctccctgaaaatacgcacgtcaccatgtcagagtgtttatatacaataatgacacttcagtccacagtcagcaagggactaatgacaatcattgtacttgtggtgtgtgtgatgaaaccacaatgatcaaaccgagtgtctgaatctctgaattgttttttttagcacaatgattgtgtaccaaaccctctgttgctgtgtgcggtggctggctcacctgatggcctttgtgctactcctgtcgtcttcaaagtatctgacggtgctgaccaaaatctttgaaatgatagtgctaatgctgttgattaccgaaaagttggggcacattgatggcagataacctagtactgtgggtttctatggaccagagaactgcaaggaagattgtattgtatgctagtgagattgaacacgttcatgtgtacttttggttgccacttgcccagttgcgagtccggccaacggtggaacaactattttcaggtcagagcagaacgcgctccgatggatcatcaattcatcattccactttttttttgtgaggcagcaaattttgcttgtgtgtgtagtgcgaaagcctcacactagtatatcaaccaatgagtagcaaatgaaaatatcttggacagct

SEQ ID NO: 37309 - DNA, 516 bp, Oryza sativa
  Clone ID: PAT_MRT4530_41049C.1
ctgcaggaattcggcacgagggccgccgccgctaccgcctccgcatcctcaacgccagcaacgcgcgcttcttccgcctctccctctccggcggcctccgcttcgttcacgtcgcctccgactccgtctacctcgccaggccggtgcccacccgcgcgttcctcctcgcgccgtccgagatcgccgacgtcgtcgtcgacttcgtcgagtccggcaacgccacggcgatcgtcctgcggtccgacgccccggcgccgtaccccgtgcgaacccagagcgacaacggcggagaccgtgccggtgatgaacgttcgtgatcgacgacgacgacgacgcgttgtcgacggagccggacacgtcgagcgtgccggcgaggctgacgtcgccgtcgcagtacgccaagccggacgcgagggaggcggtgctgatgcggcggatcgccatgtacgagtacaccaagggagggcaccgacgagccgacgcacctgtacctgaacgcgaggtcgtacatggacc

SEQ ID NO: 37310 - DNA, 4044 bp, Oryza sativa
  Clone ID: PAT_MRT4530_4104C.1
atggggcgcggcggcgggggacggtggacgaaggaggaggaggaggagctgaaggcggcgaagcgggggtaccgggaggcggtggcggaggggaaccgggaggaggaggcgcggtgggcgaacgtcatcggcgacatccacaagcggcggggggagtacgtggaggcgctccggtggctgcggatcgactacaaggtctccgtcaagtacctcccccagcgccacctcctcccctcctgccagtcgctcggcgaggtccacctccgcctcggcaacttctccgaggccctcacctaccaggaggttaccgcggtatttctattaccgtacccccgcagtaagggcggtaaccacggtaaccgcgcggttaccgacggtaataagaagcacttacaacttgccaaggaggctgatgaccttgttgagcagcagagagctagcacccagcttggcagaacttactatgagatccttctaagatctgaaaatgatcacagtgccattcggaatgccaagaaatatttcaaatcatccatgaagctagcaagggttctaaaggagaatccatcgtctcagaagtctctcttcctaaaggagcttattgatgcgtacaataatatgggcatgcttgaactggaactggataattatgaagaagctgagaaattacttgttcagggtctgaagatatgtgatgaggaagaggtacaccagtatgacgatgctcgcagtaggctccatcacaatctaggtaatgtttatattgaactacgcaactggaacagagccaagggccatattgagaaggacatagagatatgtagaaaaatacgccatactcaaggcgaggcaaagggatttataaatctgggggaggtccattcccgtgttcaaaagtatgaagatgcaaagctttgttacaataaagctcttcaaataacaaagtgcttggaagatgaggatgcactaatggaccaaatccatcagaatattgaaactgttaccaaagcagccaaagtacttgaggaaatgaagatatacgagcagaagctgaaaaagcttgtcagagacacatctaatgctcgtggaacatctaaagagaggaagctcctccttgagcagtatgcttggctggataatcttatggagaaggcaaggatgataactgcatggccaaaactgaaggaattttcgaaaggacaaaagagggtagcaaatgaactccatgacaaggaaaaacagagcaactctcttttggtcataggagaatcttaccaaaagcttagaaacttcagcaaagctcgtaaatggtgcatgaaaagctggaatatgtatcgatcgatcggaaacttggagggtcaagcattagcaaaagtgaacattgggaatgttcttgattcttgtggtgactgggctggtgcgttgcaagcttatgaagaagcatacaggcaatgtctctatgccatgctcttaatttctgtggaaggtggtctttcaaatgtgcaactagatgcccttgaaaacatgcattacagtcacatggtcagatttgataacattgaagaagcgaagaaactgcagcaagaaatagacagcctgaagagaatgtctgatcaacatgaagcaagggatacagttagtgactattgctcagaaactgaaagtgaagatggcaatgtatctgataatatcctcaatacagaggacaatgatgggaatattgcaaataatatttctgaggaatttgatgatgatgttgttcttgcctcacttgttcataaaagtaagtcatctaagaccaaagcatctaagatacatagtagtccgaagaatgttgatgagtcatgtgacatggatgggagccctgaagaagttgtaagtaaatcatttagcaaccattctggtagaaagcgtgttcgagttgtcatatcagatgatgaagctgaagaagctcctgaaattgatcagtcaaaaagaacacttactggtcgagcagatagtctgtctacctcagagcgaattgcaaatgcagcaaacagaaacagaaatcagcatacctctcatcccattgagaccaaagaagtagacagtgtttgcactccctgccctgctgaggaaagtatatgttcattcaaatctggtagtcctgtttgtcatggtaatgatggcccagatttaggagcttctagcataggaaagttatctgtgtccaaaccagcagcgagtggttccaaggttggtacacatgcatcaaacagtcggccccaatgtcaaaatgctgttggtcttcaatcctcagatgctgatcataagttctgggtgttcaaaattggtgaacttttggtttacttggatgcaaatgcatgtacatgtgagggtgcctttagcattgagtgtcttaaagttgaagtggcatgcgtgtactatcttcagattcctgatgagaagaggtccaaaggtttgttgcctattattggggaactcaagtgttgtgggaaggtactagatgacacggactcacgagattatattgatcaacttgcctctgaacagaagtgcattgatgttgttattgatgattgggtgccaaagcggctgatgaaattgtatgttgatttctgcacaaagttatcagaagcgccaaataagaagctcttaaagaaattatataatcttgaagtctccgaagacgaggttattgtgtctgattgtggactccaagacctgtcgatcacaccttttcttgatgctctaagattacataaaacaatagctgtgttggatctttcccataatatgctaggaaaccaaacaattgagaggcttcaacaaatattttcttcatcaagccaaacatatggtggcttgacactggatttacattgtaatcgatttggtccaactgctttatttcagatatgtgagtgcgctgttatgactaatcgattggaagtacttaatctgtctgggaatcgcctcacagatgcatgcggttcttaccttttcacaatcctacagaagtgcaaagaatgtgtgctctgtttacatatcgtaacagcactgtacagcttgaatgtcgagcaatgttctatcacatcaagaacagttcagaagatggcagatgcactgcatgaagggtctgccctttcacatctctccttaggaaacaacaatccaatttctggaaatacaatgcttagccttctctccaaacttgcctctctgaaaaggttttcagaactaagcctgactggtataaaactgagtaagttaatggttgataagctgatttctgctaggtggaacttacattggatcagtgagtctgcttcccacgcattttttttagaaaatggattaaaatccggcctctacatccacaatggatgtacacagccctgcttcccacgcatggaatgtgatgctattagggcattgctttcgaatccccaatgcagtctcagatctctcacccttgatagatgcaatcttgggcttgctggcaccgtgggcattattcaagcactagcaggaaatgaccaattggaggaactacgcgttgctgagaacacaaacctggcactacagagaacattgcagtacgatgaagacgcgcaggatgtatcaccaggtactgaccaaaaccaacgtaccaatgctgaagcgaacgatcacatagaccctgataagatggaggtgccggatagcgaagacgaagaggcagtccacgaggacacccgtgcagcgaccggcccagacgggagctgtgcaagttcatgccagagaaactcctcttctggctgtcatgccatccaagaactcgctgatgccatcatttctgcaaagcaactgaaggtgctcgatctcagtcggaacgggttgtcggaagaggatatccagtcactgtattctgcttgggcttctggccctagaggtgatggaatggctcggaaacatgtagccaaggaggtggtgcattttgcagtggatgggatgaattgctgcggcctgaagccctgctgcagaagagacttgcagatgtag

SEQ ID NO: 37311 - DNA, 332 bp, Oryza sativa
  Clone ID: PAT_MRT4530_41050C.1
gcacaacaaaatagtaatatatcaacacccagtgtcatctattatctaacaacaatttatcacattacaaaaattcaacacacataacaacaatattcaatccatacataaccccaatatactgacaaaccaatcattaaccatataactacttattaaccacatactaatattcttctacatccatcttctcttcatttacaccactagacccgactttctcatattccttctcaatcacaaacaattccttacttacttattaaaatttacctttttacattccattaccaacgtacgagttaacaaacacacacttatcatacattaag

SEQ ID NO: 37312 - DNA, 384 bp, Oryza sativa
  Clone ID: PAT_MRT4530_41051C.1
ctcgtaaacacggatgctacaatatattatggcagaaacggcaccaatgccgtttatattattcataggtgacatcccaggcacaagaggagacggagctcctaccacacaccacatttcactgaagtaaccccaaactaagtcagactcgagaactcccaaatgcaatagggcttacttttttaaggaaaacgtgcagagcggaggaatgcgaagcatcctgaaatatctctcttttcttttcatatgtgaaaccagagaatggagacaaagcaaacaagctgcaatgctctactcatgcagagtatgaggctgagatgctggccagattacttgttcgacagttcgtcatcgacggccaacggcacgagagtagccatggtg

SEQ ID NO: 37313 - DNA, 2279 bp, Oryza sativa
  Clone ID: PAT_MRT4530_41052C.1
atggggcggtggtggccgccgacgtcggcggcggccgcgacggcggagccgcggtcggtgcagctgctgctgctgggcgtcgccctcgtcgctgcctccttctacgccggcaccgtcttccgctccccctccgcccccgcgctcttactgcccccatccgcctcccgatcgcccgatccttccagaaccccagtttgtattgatggtgctccaaagtttacaaacagagtctctctttcttatcgaacaaaaccaatctcagttccagattatggagttgatgtttgtcctttgaaatacaacgagtatattccttgtcacgacgcatcctatataagccaattaaagaaactggatagatctaggcatgaggatcttgaaagtatttgcccaccacaagagaaacacttgttctgtttggtgcccccaccaaatgactacaagatacctataagatggccaacaagtcgggactatgtttggcgtagtaatgtcaaccattcacgccttgctgaggtaaaaggaggacagaactgggtgcacgagaagggtaagcttaggtggtttcctggaggtatgggggttgcggcttggaaggcagaggttgaggaaacaaggctagggaatatgacaacaaacagtactggtgatctccgctcggcaggagtggtccaagttttggatgttggatgtggtgttgcgagcttttctgcttaccttcttcccctagacattcatactatgtcatttgctccaaaagatggccatgagaatcaaatccagtttgctctagaacgtgggattggtgcaatgatctctgtgttggccaccaagcaattaccttatcctgaaaatgcatttgaaatggttcattgttcccgttgtcgtgttgactggcatgaaaatgatggaatattgctgaaagaggtagatcgtcttctgcggcccaatggatattttgtatactctgctccaccagcttatagaaaagataaggactttcctgttatctgggagaagttaatgaatataacaacatcaatgtgctggaagcttattgctaaacatgttcagaccgccatatggatcaagcctgaagatcaatcctgccgacagaaaaatgctgatacgaaactactgaatatctgtgactcgtatgataattctccaccttcatggaaaattccattgatgaactgtgtgagattgaacaaagaccagtcaaatatgcagaaactgccttccagacctgaccgcctatcattttattccaggagtttggagatgataggagttactccagagaagttcgcaaagaataacaagttctggagggaccaggttagcatgtattggtcatttcttggtgttgagaagactagcatccgaaatgtcatggacatgaatgctaatattggtggatttgctgtggcactaagcaatgatcctgtctggattatgaatgtagtaccccatacaatgagcaacacattgcctgttatctatgatcgtgggttaatcggttcttaccatgactggtgcgagccattctcaacatatcctaggacatatgatttgctgcatgctttccacatcttttctcattaccaaagtcggaaggaagactgttcattggaagatatcatgctagaaatggaccgtatcattcgccccgagggttttatcattattagagatgagaatgccatcttgtcaggaatcaatgatcttgcaccaaagttcctttgggatgtcaccacacatatgttggaaaatgaggaaagcaagccggagaaagtcttggtttgcaggaagaaattctggtccatcgtttgagtgagcggatactattcaggccagttctttccagatgagtgtcctattattgaaaaagcagatgtcattcggcaaaaggaacacagaaaaatacatggaaaagaaaagaggacaacaccgggtttccttcagcaactatttagattcgtatttcagtgcttgagtatatgtcgatttttctgactttaaaaagggcagaccaaaggtgtaaagatgcaagatgactttttcacttgtttgatgacgatgctagtatgtgttatgtactttctaatttctaactagtctaagttaacctaggtgttttagcaaaattttgctggtgtttctgttcttgtatgggagcacatgtggtactactacgactgaacggcatgaaggctaaatttacagtggactttgagggataattatttcattatctgtttaaaaaaaaaaaaaaa

SEQ ID NO: 37314 - DNA, 418 bp, Oryza sativa
  Clone ID: PAT_MRT4530_41053C.1
ctaattttttttactatatgtagatggaagggggactgtaactctatctagtttgctcagaaccactgctatttctttctggatctgccattggatgggcgggtggcgagtgagcgtggcggcgggtccgcgcggcagccaagcgacgacgggcggcggcagacgagcacggcctgcgggtagaacggagacgggtgaagcggtgccgggatgagggccgagatgggtggcggcgggaaagcagaagtcaagcgcggcgggttgcgggcagagtggccgcgttcgagcacggcggcgggcgagcgaacgagcacggcgggcggaggagggggccacaatggcggaggtggccgaagaaggagcgtggtggcggtgggcgagctccgccggcctactcagcccaccacgttgcccaaga

SEQ ID NO: 37315 - DNA, 1349 bp, Oryza sativa
  Clone ID: PAT_MRT4530_41054C.1
atgggtgttgcaacaccaaccgttaatacacgagtccaaggtgacggcaaaaatgcagaaatggaatcagggctccactccccttcttctcccttcgtccgcgccaccaacgggggtggtggtgggaagagaattcggatcgcatcgagctcgagctgcttcgcgaatcgaacatatgatatggctggtgtgatcagcgcccgtgctggtctgagccattccttgtctgttactcagacagttccgaatcgtccgctgcaggcttcacaattggcaacgaggtgtacaagcccatcatttctttctgctaaactttgcaagactcgtcccctggtagtagtagcagctatggaggtctcgaaggaagccccttctgctgactttgccaatcgccagccttccaaaggggttcttgagacatggtgcaatgccgatgcagtgtgttttgatgttgatagcacggtctgcttggatgagggtattgatgaactcgctgatttctgtggggctgggaaggctgttgctgagtggactgcaaaggcaatgacaggaactgttccatttgaggaggcactagctgccaggctatcgttaattaagccatatctgtcccaagttgatgactgtttagtgaagaggcctccaaggatttctcctggaattgctgacttgattaagaagctcaaagcaaataatactgatgtattccttgtgtcaggaggttttcgacaaatgatcaagcctgtggcatctgagcttggcattcctcctgaaaacatcattgcaaaccaacttctttttggaacatctggagagtatgctggatttgatcccactgaacccacttcacgaagtgggggtaaagcactagcagtccaacaaattagacagaaccatggttataagacacttgttatgattggagatggtgcaactgatcttgaggctcggcagcctggaggagcagacttgttcatctgttacgcaggtgtccagatgagagaagcagttgcagcaaaagcagattgggttgtcatcgattttcaagaactaatttcagaattgccataatttagtaccacactgcaatcctaacttttgcattgttgctaatgagtgcatgtaattgtagatgtcattgaagcattacaattttgatgcgtgattatttaattgtatgtattttattttttaattttcatctttcctcaaccttacctcctttttaaatgatcctgaggctcctaaacttgattcctatgcactgaatattgtgaataaattgtctcataagcaattgcttgagactgccagagttaagccattttaatgttttgcaaatacccaaa

SEQ ID NO: 37316 - DNA, 4596 bp, Oryza sativa
  Clone ID: PAT_MRT4530_41056C.1
atggtggcatctggcaaccagtcatgcttagcaatagattcctatgcagaagacattcgcaatcaatcagctcgaaatgtggatgaagctgagcttgttgggttttctgactccaagaaaaggctgcttgaaatgatcgataccaatgctaatgatggtccggccaaggtaatctgtgttgttgggatgggtggtttaggcaagacagctctttcgaggaagatctttgaaagcgaagaagacattaggaagaacttcccttgcaatgcttggattacagtgtcacaatcatttcacaggattgagctacttaaagatatgatacgccaacttcttggccccagttctctggatcaactcttgcaagaattgcaagggaaggtggtggtgcaagtacatcatctttctgagtacctgatagaagagctcaaggagaagaggtactttgttgttctagatgatctatggattttacatgattggaattggataaatgaaattgcatttcctaagaacaataagaagggcagtcaaatagtaataaccactcggaatgttgatcttgcggagaagtgtgccacagcctcactggtgtaccaccttgatttcttgcagatgaacgatgccataacattgctactgagaaaaacaaataaaaatcatgaagacatggaatcaaataaaaatatgcaaaagatggttgaacgaattgtaaataaatgtggtcgtctaccattagcaatacttacaataggagctgtgcttgcaactaaacaggtgtcagaatgggagaaattctatgaacaccttccttcagaactagaaataaacccaagcctggaagctttgaggagaatggtgaccctaggttacaaccacctaccatcccatctgaaaccatgctttttgtatctaagtatctttcctgaggattttgaaatcaaaaggaatcgtctagtaggtagatggatagcagaagggtttgttagaccaaaggttgggatgacgactaaggatgtcggagaaagttactttaatgagctaatcaaccgaagtatgattcaacgatcaagagtgggcatagcaggaaaaattaagacttgtcgaattcatgatatcatccgtgatatcacagtttcaatctcgagacaggaaaattttgtattgttaccaatgggagatggctctgatttagttcaggaaaacactcgccacatagcattccatgggagtatgtcctgcaaaacaggattggattggagcattattcgatcattagctatttttggtgacagacccaagagtctagcacatgcagtttgtccagatcaattgaggatgttacgggtcttggatcttgaagatgtgacattcttaatcactcaaaaagatttcgaccatattgcattgttgtgccacttgaaatacttgagtattggatattcgtcatccatatattcacttcccagatccattggtaaactacagggcctacaaactttgaacatgccgagcacatacattgcagcactaccaagtgagatcagtaaactccaatgtctgcatactcttcgttgtataggacagtttcattatgacaactttagtctaaaccacccaatgaagtgcataactaacacaatatgcctgcctaaagtattcacacctttagttagtcgcgatgatcgtgcaaaacaaattgctgaattgcacatggccaccaaaagttgctggtctgaatcattcggtgtgaaggtacccaaaggaataggtaagttgcgagacttacaggttctagagtatgtagatatcaggcggaccagtagtagagcaatcaaagagctggggcagttaagcaagctgaggaaattaggtgtgacaacaaacgggtcgacaaaggaaaaatgtaagatactttatgcagccattgagaagctctcttccctccaatctctccatgtggatgctgtgttattctcaggtattattggaacacttgagtgcctagattctatttcatctcctcctcccctactaaggacactcaggttgaatggaagtcttgaagagatgcctaactggattgagcagctcactcacctgaagaagttcgacttacggaggagtaaactaaaggaaggtaaaaccatgctgatacttggggcattgcccaacctcatggtcctttatctttatcggaatgcttaccttggggagaagctagtattcaaaacgggagcattcccaaatcttagaacactttgtatttacgaattggatcagctaagagagatcagatttgaggacggcagctcacccctgttggaaaagatagaaataggcaagtgcaggttggaatctgggattattggtatcattcaccttccaaagctcaaggagattccaattacatacggaagtaaagtggctgggcttggtcagctggagggagaagtgaacacacacccaaatcgccccgtgctgctaatgtacagtgaccgaaggtatcacgacctgggggctgaagccgaaggatcttctatagaagtgcaaacagcagatcctgttcctgatgccgaaggatcagtcactgtagcagtggaagcaacggatccccttcccgagcaggagggagagagctcgcagtcgcaggtgatcacgttgacgacgaatgataggaatcgtctagtaggtagatggatagcagaagggtttgttagaccaaaggttgggatgacgactaaggatgtcggagaaagttactttaatgagctaatcaaccgaagtatgattcaacgatcaagagtgggcatagcaggaaaaattaagacttgtcgaattcatgatatcatccgtgatatcacagtttcaatctcgagacaggaaaattttgtattgttaccaatgggagatggctctgatttagttcaggaaaacactcgccacatagcattccatgggagtatgtcctgcaaaactggattggattggagcattattcgatcattagctatttttggtgacagacccaagagtctagcacatgcagtttgtccagatcaattgaggatgttacgggtcttggatcttgaagatgtgacattcttaatcactcaaaaagatttcgaccgtattgcattgttgtgccacttgaaatacttgagtattggatatttgtcatccatatattcacttcccagatccattggtaaactacagggcctacaaactttgaacatgccgagcacatacattgcagcactaccaagtgagatcagtaaactccaatgtctgcatactcttcgttgtagtagaaagtttgtttctgacaactttagtctagaccacccaatgaagtgcataactaacacaatatgcctgcctaaagtattcacacctttagttagtcgcgatgatcgtgcaatacaaattgctgaattgcacatggccaccaaaagttgctggtataaatcattcggtgtgaaggtacccaaaggaataggtaagttgcgagacttacaggttctagagtatgtagatatcaggcggaccagtagtagagcaatcaaagagctggggcagttaagcaagctgaggaaattaggtgtgatgacaaatggctcgacaaaggaaaaatattctatttcctctcctcctcccctactgaggacactcgtgttgtatggaagtcttgaagagatgcctaactggattgagcagctcactcacctgaagaagatctacttattgaggagcaaactaaaggaaggtaaaaccatgctgatacttggggcattgcccaacctcatggtccttgatctttatcggaaagcttaccttggggagaagctagtattcaaaacaggagcattcccaaatcttagaacactttcgatttacgatttggatcagctaagagagattagatttgaggacggcagctcgccccagttggaaaagatagaaatcagattctgcaggttggaatcagggattattggtattatccaccttccaaggctcaaggagatttcacttggatacgaaagtaaagtggctgggcttgctcagctggagggagaagtgcgcacacacccaaatcaccccgtgctgcgaatgagggaggaccgaagtgatcacgaccttgcttgtgacgccgaaggatcccctgttgaagtggaagcaacggatcccctcccagagcaggagggagagagctcgcaggtgatcacgttgacgtcgaacaacaggtggattactaagacgggattcagggctgtcaccacctgctatctacctctgacaaatccgtgggatacagaacaaacaaaggtatgggaaatgaccaaactaccctctaaccatcattgggatgaaatcaagaccgtccaggtatggacggtcaaatgttatgatttaaggaccgtcaacagctggcaacaatggccctcatcgggggacgtgagcaacgaggtggattgtgagagggaggcgagcgtgaacgcttcgagcagcgaggcggaccacgagagggcagggacagcatggccattgccagatccactgccaccacccctcatcttcgacaccatgtaa

SEQ ID NO: 37317 - DNA, 475 bp, Oryza sativa
  Clone ID: PAT_MRT4530_41057C.1
gcatcaaaaaatatatcatgaatcaaattttctgtccaggtgaaaataaagaaaaagtgttcgctccacattcaatcaaaaaaacaccattgttttactccccgccggatcaccacaaatatttccatccactgccttgaacaaaacccattcttctacaagattcttattgttagaaattcgccaacctaagctcattcttaggtcccccattacattacaacccgcctaccattactgccactctgaagacctttcagctaagagttatacacctgaggtcctcaaaacccaactaaacctaactaagtggccctttctttctcgcatgtttcaaaatactgaaaccatgattgcaacagtcgatcaatataccagctcctcaaccaattgcacccatgaaatcatttaggacacacaatgcacctatttttactccaccaaatgcagcacctgtaaggatccttctccccca

SEQ ID NO: 37318 - DNA, 246 bp, Oryza sativa
  Clone ID: PAT_MRT4530_41058C.1
atgtctgggagtggcctcgtcatggctgaaaaggctatattcgagttgtcatccccaccccatggaggcttggcggcggcgacgacgacgagcggtggtggtaacgtgaggggtggagctggcacccctttcctctcccgcacggatcccgctacccctacacccgacgacgagaaggaggatgaggatgaggacggcggtgacgatgacgacaacgaggacggtggtagcggtctcgaaaaatga

SEQ ID NO: 37319 - DNA, 349 bp, Oryza sativa
  Clone ID: PAT_MRT4530_41059C.1
gacaccatagctgctgcactacactgcagctcacacacgccagaacccagcatgctaagtaacgcatgatcaatggcatacggcgaggtgaagatggacgtcgtgtgcctgctcctactgtacgccaggcatctgatggcctacaccacctgcgtgcgcccggacaccgtctacgacgcgtccagcctactgctgctgaaggaccaggtcaagctgcatgaggaggaggccctcaccctgcacgaggagctggcgcttgtcgactacggcgcataggacgacgtctgaaccatgtgatacttgcccaccaccttgagcaagacgtggatcaactcctgctggcacaagt

SEQ ID NO: 37320 - DNA, 256 bp, Oryza sativa
  Clone ID: PAT_MRT4530_4105C.1
gccctagcaattaatctttgtattttataatttttttttctccctttttttacccccaaggggaaaatccaagtacaaaaaatagacatccctttaatgaatctacgttcaaatatctgtccataacatcttccggccgggggggcaaaaaaggtccccacaccacgggggacacccaatcatcccccggaagagggaaaacccacccccccgttttttttttttcctccacctccaaaaaaaaaaaaagggggaa

SEQ ID NO: 37321 - DNA, 546 bp, Oryza sativa
  Clone ID: PAT_MRT4530_41060C.1
atggagggaggccctcttcaagctaaaggtttgaaaggtcgcaacatgcaaccctgcgtcgagctctgggcatcgtcgacgtctgggaccccctgtgctggctcttccatagcggctggctttggccccgtcggctggctacagcgcccagcttggcttgatcatggccctgcgtcgagctctggtcgccgccgacgccccgggccccctgaaataagttcacgacctaaggtacgggctaatctcccgagcccgcagcgcctcggagaccgggaggaaagtgggaagttaaggcgacgtatgaacccagggctaacgccgggggctactgtcggtgatatgggcccggggatatcatgtttagaggaaggaggctgccccccaatgccacgtggccctccccaaggggagttaggcctgaggtggggtggcggccactccctggccgagactagagggagaaggctgccccaggcgccacatggccctcccccgaggagggatcgggcccgaggtcagacggcggcggccccctcccgtgactag
